United States Patent Application Publication US 2022/0102000 A1 - sequence listing, part 19

SEQ ID NO: 3852 - DNA, 26951 bp, Unknown
  16S sequences of unknown bacteria
cagcagttaagctccttagcgctgatgatacttggcgggcgaccgcctgggaaagcaggacgttgccggtttttatttagggccctatggtcaagcggttaagacaccgccctttcacggcggtaactcgggttcgagtcccgatagggtcaccaaaaatatgcgcgtgtggcggaattggcagacgcactagatttaggttctagcgggagaccgtaggggttcaagtcccttcacgcgcaccaattttgcacacgtctaattccagaatatattttctgggtttttgcgtaaattgaatacatctggatagaggagcggatgatatcagtagatactgacttggaagttaagggctttcttatatgcggtgtcgaaaggagattctgccgaaggagattctgccttggaatttacctgggacgttatataacatatagcgtactgtcgctttgcggagagctatcgatggaattaggttaatagatatgattgaaatgccatggatatgcttcagatagttattcatggcactttttattatattttattaacggaggtttgaaatgaacagaaacagactgatttttttgattagtacagcactgcttattataatgatatgcccgatgctgtgctttgctacaggtgatgaagcagaatatgtacctgctttatttgaaacatggtggtcagtaattccgccgctggtagctataggacttgctctcataactaaggaagtatacagctcactgtttatcggtgttgttataggcggagtgctttatgcaggcggtaactttgaaatgacaatgaaccacgttcttcaggacggcattatcggttcactgtcagatccgggcaatgtaggtatccttattttccttgttatactcggtgtaatagtagcactgctcaacagaacaggcggcgctgctgcctttggtaaatgggcaatcaagagggttaagactcagacaggcgtacagattatgacaataatccttggtattctggtattcgtagatgattacttcaactgtcttacagtaggaagcgttatgtcacctatagcagaagcacagggacttccaagaacaaaactggcatatcttatagattcaacagcagctcctgtatgtatcatcgctcctatctcatcatgggcagcagcagtaacgggctttgttgacggcgaaaacggtttcgcactgtttataaaggctataccttttaacttctatgcgatattaactatcgttatgatgtttacattagttgcactcaagttcgactatggtacaatgaaaaaatatgcagacaagctgctggatgacactacagacacgcaggcctcagaccttgaaacaactgttgcagtcaacagaaggcgtgaaggcggagttatagatttagtattacctgttataattcttatcattgcatgtgtaatcggcctgatttataccggtggtttcttctcaggcgcaggctttgttgaatcattctcaaattcaagtgcttcggtaggccttgtaatcggcagcgttataactttaataatcacagttataatctatatgatcagaggagttataagcttcaaggacgctatgggctgtattcctgaaggcttcaaggcaatggttgcccctatccttattctgactcttgcatggacattaaagtcaacgacagacagccttggtatcgcggaattcgtagcaggcataacagaacacttcgcaggttcacttatgagcatgcttcctgcaataatattcgtaatcggatgcatacttgcatttgcatcaggaacatcatggggaacattcggaatacttattccaatcgttgtagaagtattccagaacagcgatcctcagcttatgatcgtatcgatttcagcttgtatggcaggcgctgtagttggtgaccactgctcacctatttcggatacaactattatgtcaagtgcaggttcaaaatgtaatcatatcgcacacgtttcaacacagattccgtatgcaattacagcagcctcagtttcatttgttacatacataattgcaggcttcacaagatcagcatggatttcacttcctgcaggtatcattatgatgatcggaacactgcttgttataagggctatccaaagatcaaagacagcaaagacagcataaacttaacattatataaacaaagacagagtggagcaaatccattctgtctttttaaatccctattttcttctgccgcacaggtattctgtgcagtttctgcattttatcgcatcgttgctgccctcccagaacctttccgggtatttcatattatatatctcccatattgccagcgttataagcgacattgcaagcaggcttattgtgaagaagcctttgcagaatatgccgggcagaaacatcataaaatagtcccagttaaaaatcctgcacgtattgcagcagcggtttttcattatccattccttgaacggacaccagaacagcacgcatatcagatcgcatacataaaaaacggtaattataacaaggagcagtctgttgtctatgacagaggcttttttgagtacccctataactgtggtaagcgccagccacaaaagcagtactttgattgcaccaagaccgctttgctttgtgtgatgcttcaaagtgtcggggcagtaggggatttccgtgtctatgtaatggactccgaactgcttctgtgagcctattgaaacaagatttctggtggggacaacctgcattatcatgctgacggtccagattatccatattatgtggagcagagtaaactgccggaaaaaattaaagccgttcaggacactgaacgcttcagatcttaaaaaatacattacaaggattacagcaagaactgcaagccgaaatacaaaccttgaaatgtattttgctctcatcggtattcttttcataaaatcaactgtgtgcctttcgctgaatatataagtctttactgataatattatacaacaaacttccttattaatgttgctttatttttctcctggtatatgaaaaatatccctgaaggaattgaccacagggatattgtgcacatcagctagtatgaaattacatttacaggacagtccgctgctgcctgctttgctttttcttctgccgcttcgtccggctgcttatagacctcggcaagaccgtcgtctgccatacggaaaacctcagggcatatctgctcacacataccgcagccgatacagccgcttcgttcgattgatacgttcaaaatctactctacctcctcaggaaatataactgtaaggagcattttgaagcgttcagcggcatatacggcatgaggcttgcctgctggcattacgatagcttctcctgccgacaggatattttctttgccgtctattgtgattttgcctgtgccgtcaagaactataatcatagcatctccgcccgagctgtgagtgcttatctcctcgtccttttcaaaggcaaagagggtaagactgtgatggttgttctgcgcaagtgtcttgcttacaacctgtccgggctgatatgagatttcatcagctatttttaacggtgtttcgtgttctatattcttgatatactgtttcatttgttcattgctcctttttaattaatatctccgattaaggtataattattctggtaaatattatagcataataaataaaaaaattataacaaaataacaaaaaaaccttgctttatctgtcagttcgttgtatactagtacagtactttgatacgcgcttgtggcggaactggcagacgcgctagactaaggatttagtgagtaacatcgtatgggttcgagtcccttcaagcgcaccaacattataaaaaatcactgatttgttcagtgattttttatttgtctttttcagtcgatataaacttgataggcagggcaacctgagttacataggattccttgttgctgccgtatgtcggaggtccctccatgtagatattgcggaaatatccgtgaggcgtcataccgttgtctcgggcatattgcataagtctggaatgaacggcaggtaagccctcatatgctccgcgatagtaaatacatattgccgcagcgcgcgggaacttttttatacagtcgccggtgctttccgaagcaacaggtattgcgtagattccgtcagattcggaagccgttgaaacaaaggtgcacattttgttttcgacatcagctgtataatgtttaagtgcatctatatatgtatcccgaagagcggaagtcttgtttgatatatttaactcgtgaaagttcctgcaataagcggtgaagcccggaagcgttacatgcataatttcagggatgttctcatttgactgccgcagctgcaactgggctatatgctgctcaagctgtgtcctgagaataataagtctgtttatctgttcgtcaagatttctggtgttgtcaaaatagctttttatttcggcaagtgacagtccgagattttgaagtgaacggataaggcggatatgcactatgttttccgcagagtaatagcggaagccgcggttctcgttttttaccgcaggtgaaaccagtccaagattttcataattgataagtattcttcttgtaagccccagagccttagttacttctcccatctgaaacagttctttttctttgtttttcatttgtttactcctgtatgtaaaacgtttgaaatgaacattaatgtttaatataagataattatacaaaccgattgtatacaagtcaataaaaaacggagaaatgacatataggcgcattaaactgtttgcaatcaaggcaatacaaataacgggagctcagggctattgtttttattgcaatatcctttttctgagagtataattgatttaatcgtactttatcttttatgagctttggctcattcagactttttcagtaaaattcccggatttaatcagaattaatatatagagagaaagggcacattttttgtgtagacaattatgaccgtaaacgaattaaaatcaaaaaaagtggcggagcttaaaactcttgccagaaacgcaggcattgacggctatgacgccatgaaaaaagcagagcttgtggaagctcttgcagcggcagaggagcccgcagcggaagcgcctgcagcagaaaaagaaaccaccgacgaaaagggccgcaggactgtcgtgcctgacaaggacgacggcagaattgaggttgagggcatactcgacatgtcggatcagggctttggatttctcagattttccaacttccttaccagtgataaagacgtatatgttgcgccgacgcaggtaagaagatttaacctcaagacaggagacaagataagaggcatagcaagacctccgagagaaggcgaaaaattcggaggactgctttatgtggtgaccgtaaacgatgacgagccgggagttgcaatgaggcggcccgacttcgacgacctgacgccgatattcccatatgagagattatcacttgaaagcagcagcagagatttatcactgagacttatagatctggttgcgcctataggcaagggtcagagaggccttatagttgcaccgccaaaggccggcaagactgtgcttctcaaaaaagtggcggcggcaattcagaagagctatcctgacgtagagatgatagtgctgctggttgacgaaagacctgaagaagttacggatatgaaacactcgctgggagactccggcgaggttatatactcaacctttgacgaaatgccgcagcatcatgtaaaggttgccgaaatggtgcttgcaagagcccaaaggcttgtagaacacggcaaggacgttgtaatacttcttgacagcatcacaagacttgcaagagcatataacttagtagttccggcatcaggcaggactctttcgggaggacttgaccccggagcgcttcacaagcctaaaaaattctttggcgcagcgcgtaaaatggaagagggcggcagtatcacaatacttgcaacagcgcttattgagacaggcagccgtatggacgacgttatatttgaggaattcaaggggaccggcaatatggagcttcatcttgacaggaagctttccgaaaagagaatattccctgcaatcgacattaacaaatcaggcacaagaagagaagacctgctgatgagtcaggatgagctcgaagccgtatggaagatgagaagagccttatccaatgcgggagtgcaggaggtcacagagaccataatagactatatggcgcatacaaaatccaataaggattttatacagcttatcaaaaaaatcaatcttgaacagggtagagggtaaacatatggatttaagcaagatatttgtaaaagacgcaaatcccacaaagatgggcgggcaggctgtaatggaaggcattatgatgaaaggcgacaaaaaaacagctgttgcggtaagccttccaagcggagacatacacatcaaaacagaagaaaacccgaaaaaaagaacatgggccaaaattcccatagtcagaggggtaattgtatttgtaaactctcttatacaggggaccaagacacttatgtactcggcagacgtactcgaaaaatatgaggaaaagctgggagagggagccctcgcagaaaaaggaaagtttgaaacatggcttgaaaagcattttggcgaaagagccgtatggaacatacttatagccatatcggtaattatatcgctggtgttttcaataggaatatttgttatagggccgactgccgttatcaactggatgacagccttcactgaaaacgaaatagtgcttaatcttacagagggactgcttcgtatagccatatttgtaatctatgttctgcttatatcaaaaatgaaagatatacacagggtatttcagtaccacggagcggagcacaaatgtattcactgctttgaaagcggcagagagctgactcccgaaaactgtcaggagttctatacgctccacccaagatgcggaaccagctttcttgtatttgtacttgtaatatcgctgatagtgttttcatttctgggctggccgaaccttgccctgagaatagtatcaaggcttttacttattccgtttatagccggaatttcatatgaagtgctcaaatgggcaggcaaaagcgacaactggtttatcaaaataatatcgataccggggctttacctgcaaaagctgacaacggctccgcccgacaacgagcagcttgaggttgccatagcggcggtcaaggctgtaatggatgaggacgcacctttatatgagggcatagcaggcaaggacggaaaatttataaaaacagcagaagaattttatgaggaagcaggagtttaattatgttacgactgaaagatttgctggctatgggagaaaaccagcttgagcaggcaaaggttcccgactatgcgcatgatgccagagcgcttatggaatttgcctttaatcttgaccgttcacagatgtttatgaaatgggcggatgatatagatgacgtgtggtgcgacaactatcttgacatagtacacaggagagctttaggcgaaccgcttcagtacataacaggtgttcagaactttatgggcattgatttcaaggtaaatgaaaacgtgctgataccaaggcaggacacagagagagttgtcgaaaacgcccgccttatagtcgaaagcaaaacaactaaaaaaacagcggaccccgaaagtccttacatatatgagacagtggccgcaagaaagaactggaagatattagacctgtgctgcggaagcggcgccataggcatctcaatggcaaagctctgccctaatgtaaagaaagtgctttgcacagatataagcggggaggcgcttgccgttgcaaaggaaaacgccaaagcggcaggagttgagaaaaaggtggattttgcttcaggcgatatgtttgaggctctgggcaaaagagcgaaatttgatatgataatttcaaatccgccgtatattgaaagcagcattatacctactttgcagagagaggtcagagagtatgaacctatgcttgcccttgacggcggagaggacggccttgatttttacaggacaatcatagagcaagcgcctaaatttcttgacaaaaaaggcatactggtgcttgaaatcggatacaatcaggcagaagagataagcgcaatacttgaggaaacagatgcctttgccaagacggagattgtaagggactacggcggcaacaacagagtcgtgtgcgcactgctcaaatagcggggcaatgcgcaagcacttttttgaatacattaaatttatgtgtttaaatgtgaaatgaatagtgatataatagccttgattgggtaaccggtcaggctattattttattagtttcaatttattcttgaagcataataacttcatttgttataaggaggcagactgatgtcaacaaagtcacattataagagaagtgaaataggccctggaaagcctggattttcaaagacacgttccataatcgaagcaccgttttatggaaacaacgttactaaggtaacaactttaaaagaagcatacaagcttgcaaagaactcacccggcactatagttactgatatgcctgtatacagaggtgaagaattcggtcttgacccagatgcaaaggttcttttattcaacgacggttcaattacaggaagatatgctcctgcaagaagaattacaggtaaggaaggcaccgacaccgaaaaactggacaagattattatggacgccgtatatgatacaagatggaagaagctgtatcatgcagaggttgttataggtcttgaccctgagtttatggttaaagcacatctgcttattcctgagggcgaagagaacctgctttactcatggatgctgaacttccagtatatgtccgagtactataccaagatgttcaaggattcagttcctgtaggcggcggcaatgaagccgatgtgtatattttctcagatcctcagtggaagggctgcccggatcagccggacgtatgcgaccctaagtgcctgtgctatttcaacacagaaacaaactgcgctgcaatactcggtatgagatactttggcgaacacaaaaaaggaactcttactcttgcgtgggcaatagccaacagaaacggttatgcttcatgccacggcggacagaaggaatacacattagacgacggttccaaatatgtagctgccgtgttcggactttcaggatcaggcaaatcaacacttactcacgctaaacacgacggcaaataccctgcaatcaaagttcttcacgatgacgcattcattatcaatacagatacctgcgcatcagttgcacttgagccgacttattttgacaagaccgcagactacccttgcgacagcgaagacaacaaatatctgcttacagtacagaactgctcggcaacagttgacgaggacggcaaggttgtaatagtaacagaagacatcagaaacggcaacggtcgtgccatcaagtcaaaattatggtcacctaacagagttgacaagattgacagccctgtaaacgctatattctggataatgaaagaccctacaatcccaccggtagtaagattaaagggagcttcactggcatcagtaatgggagctacacttgcaaccaagagatcttcagcagagagattaaaagagggcgttgaccctaacgcacttgtagtagagccttatgcaaatccgttcaggacttatccgcttgtaaacgactatgaaaagttcaagaagctggttgcagacaagaacgttgactgcttcatcatcaacacaggcgaatttatgggcaagaaagttcagaaagaagatactttaggagttcttgaggctgtagttgaaggcaaggcagacttcaagaaatggggacctttcgaggatatcgaaatctttgaatgggacggctttgttcctgaccttaatgataaggactatgtatcacagctccaggctcgtatgcaggacagacttaactatgttaagaacctggatacagcagagggcggatacaacaagcttcctcaggacgcactcgatgcaatccagagagttgttgatcaggcaggacagcttaaataacagacagtaaatacagcatatatttaaacccggagagttttggctttccgggttttttaacaaaagcaagacttttataattccatatttgcacgaaaaagcaggttggctgatgcctgatttgcacgaaaaagcaagttggacgatgccggatttgcacgaaaaagcaggttgcagcagatgagccatatataaggggagatatatgatgccggcttcttcatcacgaaaatgagaattttacaaactgtattatgcgcgaaaacgagaattttaatgaggggaatttgcacgttttcaagaattttgagcttcctgctaaaacagcgggtctatagcacggttttgcagaaatatgacatagattttacattaatatgatatcggccgctgctcttttgggttactatacaggtagtaaaacacaggagggcagatactatgaacaagataaagaattatataaatgcagcaattgataaactgaaagctgaccttcctgtaaatatcggaatatgcataggaattgcagcaggtacagctgtgaaggatatcgggcttgggctttgcctcggagtgtgcgcaggtcttgctgctggcatctttgtaggtgataataagggaaaagagaattaagccgcatatatattaaaccccggagagaactgtctttccggggtttaaccctattgcctcaagactgagtcgaggcgttttctttcatttgtgatatacagcactgcgcctgctgcggcaaccatacattcggtcagagggtaggagcaccacacccctgtcatattccatattgctgcaagagcaaaggctgcggggataaggataaaaaagccgcgcagcagcgaaaagatttgggcaggaacagacctttccgttgaaatcagatatgttgaaagcaccacgttaaatcctatgaacgggcaggctgtaaaatagagccttaggcctggttctgcaagctggcgaagcctttcgtttccgtcactgttaagtatatctacaatcggtgccgtatcaaagtacaaggcagagtaaatgactgcagataaaatcagcagcattgcagccattgcatgtttcagtacagcccttacctctgatatattctgcgcgccgtagctcctgcttattaccggctgaataccctgtgacagtcctgtatatattgcaaccaccacaagggatattacagtaattatactgaaagctgcaacccccgtatttccggcaaggcgaagtatgatgtagttgaataaaaacataacaacgcctgaggttgtttccgtaagaaacggagacatgccgcttgagagagcttttttcatacttttaaagtcgggcgcagatattacaaaatgaaaactatttttctttcgtataaaatgcggggataaaaccagcaggctgattaaaggcgcaagccctgtagcaagagcagctcctgcaattcccatatcaagcgggaatatgaagatgtagtcaaggacgatatttgatgcgctgcctgtaatcattgccgctgcagaaagtgtgggattgccgtcgtttctgacaaagcactgcagcagattattggtaataaatgcgggagcgcaaagcagtataatctgaagatatgctttagtcatgagaaatatcgtactgtccgcaccgaaaaattttgctatcacgcctgccgcaagaagccctgcaagtacgaatacaaggataaacgctgaggcaaggaatacagcgtttgtaaaaaatctgtctgcatttccgtcctcgcctcgtgctttagttatggcatatccggtgccgccgcctatgcctatcataagtccgaacccgcttataatgcagaacggcggaaatgccagattgagcgctgcaagaccgcttgtgccaagtcttgcggatacaaagaaggtatcggcaagagtatagcaggaataggccaactgccccagtatatttaatgatatgtatttgagaaaaactttaaaaatgctggtgttgttcatatgtactccgtgacaggcaaataaaaaccgtacacagatagcctttgtgtacggaagcgtttcaaaccgtacatatatgataccacagagaaacaggtaaatcaattgtgcgaaaaacagaaaaggttttcaatattaagtccggttatgttaaaatgcttagtgataatataatgaaattgaggaagcagtaatgtttgagcatatagttgtgattttttataattttgctgtgttctgcggagtttgcaatttgagtcttgcaggtctgctgatttataagaaggaaattgaaaatattaaaaaactgtttttgtttctattgttgttctttatatatggctttttaaatatgctggcctactacagggtgcatattgttcttgccgaaagcattgtacagtactatgcgctgcttgtgactgtggtttatgtgatgatgagttgcatgtggctggattatataatggatctgaaggctttttcgaaggaaaaagcaaggaaatggatatatttcggcagcggtatttgcatagtgctgtggtctgtggacaacctgatttttatgggtgatcagctgaacgtgataaatatagcaggaaacagagttgcaacaatagttgaatgcgctgcaattattgtaatgggtatagcttctttaaagagcgtatataagggagctgcattgttttatcagaaaatagaaacagcctttgtgctgctgttcttcttatacattacgattaaagacatccgtatttcattttttgattatacaattgaaacctattctgtatctccgtggtccttttgtgcagtgttctgcttttttacaaatatagcaacgcttgtttatcttgtacagctgtttataaatttcattgaatctgcgcatcgtgacaaacaggaaatacacctgctggaaatgacagcagaagagataaaagagaaatattctgtttcagatagagaaaaggaagtccttatattaatatataagggtaaaaacaatacagaaatagcagaggacctttttatttcgacaaatacagtaaaaaaacatataaacagcctgtttaagaagcttggagtttcgtcaagaaccgaaataatcagtaaaatcagactgaaagacttctaatggtacctgggggtaattgcttttttcggacaaaatcataaaatcttctcaacggttattttgtattttaataaaagtaaggagtgttttatgaaaagaaaaagtattaaagctattgctgcattattatgtttggcaacagtattctcgctgtcagcctgcggcagtgacaactcggcagaccttgttataagaaacggtatggtgtacaccgctgatggtaagggaacggttgcagaagcgattgccgtgaacggagatgagattgtatatgtaggagatgaacaaggtgttgagaaatttataaaatcatccacaaaagacattgatatgaatggcggaatggtactgcctggatttactgacagccatcagcatccttccgctatggcaaatgaactgtttatggtttctttgctagattgcaagtcagatgaagaatatattgaaacaattaaagaatattatcagaacaatccggatgttgagtctattgtaggtgctggctgggatcgcccgctgtttgactctgtaaagcagacaaaagaaaccctcgatgaaataagtgcggaaattccgattgtaatgtcagactctggatatcatatgaaatggatgaactcaaaagcacttgaaatgatggggataaataaggactccgaagtgcctgaaggcgctatggttgaaaagaatgaaaacggagaacctaccggcgtggtttccgattatcccggaataagcgataaatttaatcagtttacaaaagaccaatataaagaggccatacttgcttatcaggaagaagctcttgcctgcgggctgacaggttcttttgaagatactccaagcaactttgacagagttgtagaggcatataatgagcttgagtcagagggaaagcttaagtaccgggttaatgcatatatgcgaatatcaaaagatgatgacatagaaaaatcagttgcggaattaaagagctacagcgaaaataataataacggtcttttccgtgttgatggtgccaaaatatttattgacggagttcttgaaggagaaaccgcatatatggaagaggcatatgctaataaccctgaaaattatggccagtatagatggaagggagcaacagacaggcttaatgaattatgcagactgcttgaaaaggaaggtctcaattaccattttcacgctatcggggataaagctgttgcgatagctttagatgccattgaatatgctaaagccgatgctaaggacagcgtgacaagaccggggattacacatctgcagtttgtaaatgaaaaagacataaaaaggtttaaagagcttggtgtttcagctgtaattcaggcgttttgggcaggatatgatgagtactatgaacagtctgtagaactgctgggaaagagcagggccgacagacagtaccctattgagagcctttttaaagaaggcattctggtggcatcaggcagcgatttcccggttcagacagacagacctttgattgcaatcgaaatgggagttacccgagcttttccgggtgaaacaaagagcctgcctgaagataaagaaaaagctaagctggaggatatgatactcagttatactttgaatggcgctattgcaaatggacgtgaaaatgaaacaggctctatagagattggaaaaaaagcggacctggtagtgctggataaaaatctgtttgaaatacctgctgctaagatagcggagacaaaagaaacagtaacaatctttaatggtgaagtagtatatgagaaaaatgccaaaaattgatattaaccggtggctgaagcagtgatacagttggatgaaagaaaaaaagttctgtaaaaaaggaacttcaatcaaaaaaatgaacttcaatcaaaaatggcttgcattgacggtttgtctgtgataaaatagtcaatgcgtgtaaagcagagaactcgcaagagtattataaacattatgcaagggtgatagacctgagcaggaaagaggtgaaagcatgaaggaaggaatccatccagattacaaggaatgtaaagtaacttgcgcatgcggcaacacatttgttactaagtcaactaaagaagaacttagattagacgtttgctcagcatgtcatccattcttcacaggccagcagaaattcgttaacagaggcggccgtgttgagaaattcaagcagaaatacaatatggattaataaaaattaccggaattttaagttccggttttttttagataaattcggcttaaatatacagacaaagtatgatatactatatagttgagaaaaaacaaaacagaggtgcataatgttcgataaattagactttatacttgagaaatacgaggagcttgctttaaaggtatcagaccccgatatcataaacaatcagcctgtatggcagaagcacgttaaggaaatgggcgagatggagcccctcgttaacaaatacaaagaatacaagatgaccaaggataatatagcggccgcaaaggagatgcttgacgatcccgatgaggaaatgcgcgagatggccaagcttgagctttcagagggtcaggataagctggagcagatagaagaggaactcaaaatcctcatgctgcctaaggaccctaacgatgacaaaaacgtaatccttgaagtccgcgcaggcacaggcggagacgaggcagccctgtttggcgcagacctgctcaggatgtatatgagatatgcagagcgcaagggctggaaaacagagcttatggaaatcaacgagacaggcataggcggaatcaaggaggccgtaatgctcatcaagggcaagggagcatattcaagactcaaattcgagagcggagcgcacagagttcagcgtgtgcccgaaacagaatccagcggcagagttcatacctctgcggctacagttgccgtgcttcctgaggttgatgacgttgaagttgatttaaaccctaacgatgtaagagtcgatgtatatcgtgcatcgggcaacggcggacagtgcgtaaacactacagactctgccgtaagacttactcacgagcctacaggacttgtagtaacctgccaggacgaaaaatcacagctcaaaaacaaagaaaaagctttcaaggttttaaaatcaaggctttatgatatgaaggtgcaggaacagcacaaggaaatctcagacgccagaaagagtcaggtcggctcaggcgacagaagtgagagaataaggacatacaacttcccgcagggaagaatatcagaccacaggataggtcttacactttacaagcttgactcctttatagacggagatcttgatgaagtaatagatgcgctgattacagaggatcaggcagagaagatgaaggaattctaattatgaaaactaaaattctcgaacctacaaaagaaaacatcacctacgcaggcagactgctggcggagggaggcatagtggcgttccctaccgaaaccgtatacggactcggagccgatgcgttcaatgaagaggctgtcaaagctgtatacgcagcaaagggcagacccagcgacaaccctatgattgttcatattgcaagagcaagcgacataggacagcttactccgagattaagcggggatatagtggcgcttatagagaacttctggccgggaccgcttactatggtagtaaagaaaaaaccagggataccggatgccacaacaggcggacttgatacagtaggtatcagacttcccgatacgcagattgcaagagagcttatagaggcggcaggctgtcccatagcggcgccaagcgccaatatttcaggcagaccttcaccgacaaaggcgcagcatgtaatcgacgacctttcgggcaagatagatgccatagtcaaaggcgacgactgcagagtcggcatagagtccacagtccttgacgttacaggagatacacctgtaatactgcgccccggcattataacggcggagcagatagaggcggttttagataaaaaagtcgagatagatcctgctgttttaaaacaaagcacagacggcagccttaaacctaaagcgcccggaatgaaatacaagcactatgcgcctaaggcagatatggttgtactcgagggccagagggacaaggtcaaaaaagaaatcgaaagattaaaggggctaaacgagcagcttggcaacaaggtgggagtaatcctctttgaagaaaaggctttcatagaggcggctcacgacttctttgcaagactcagagagcttgacaaggagaatgtggacctgatacttgcgggggcgctttcggatatagacggagtcggctttgcggtaatgaacagaatgctcaaatcggcaggatataatatagtaaaagtataggagaacaaaatgaaaatagctttagcttcagatcacggcggatacgccctcaaggaaacagttaaaaaatatctgacagagagaaatatagaggttctggacatgggtacagactcagaggagtcggttgattatccggtattcggcaaagcggcggcagaggccgttgcagacggcagagcagacagaggcattgtgtgctgcggcacagggataggaatatcaattgccgcaaacaaagttaagggaatcagatgtgcattatgtacagacgtgcatatggcagagatgacgcgcagacacaacgatgcaaatatgcttgcaatgggaggcaggacaactgatgaaaagacagctcttgaaatcacagcggcatggcttgatacagagtttgagggcggcagacatcagagaagagttgatatgcttaataatatgtagttaattataaatactatggaggtagcaaaatgggtaaagtttatgtatttgatcatccgttaattcagcacaagacagcaataatcagaaagacagacacatcaactaaggatttcagacagctggtaaaagagattgcaatgcttatgggatatgaggcaacaagacagcttcctttggaagaggttgatatcgaaactccaatctgcaagactacagttaaaatgctcaagggcgaggacatagcaatcgttcctattttaagagcgggactcggaatggtagacggtatgcttgagcttgtacctaatgccaaggtaggtcatgttggactttacagagaccctgaaactcacgagccggtagaatactactgcaaactgcctgcagatatagataagagacagatatttgtagttgaccctatgcttgcaacaggcggatctgctgctgcggctattgattttgtaaaggcaagaggcggcaaggacatcatctttatgtgccttatcgctgcacctgagggaattgaagctctgcagaaggctcaccctgatgttgatatattcatcgcagccaaggatgaaaaactaaacgaaaacgcttatatagttccgggactcggagatgcaggcgacagaatattcggtacgaaataatgaaacagtgtacagatcccgcactctttgttaacagacccagagatgttaatgctgcctgaggagcgttagacagagaaaattacggaggaaacagaaaaaatgaatcacatacctgataatgttagtaaatatgataacgtctatgacgttctcaaagaaagaggttttatagaacagaccactgatgatgagggaataagaaaacttctgggagaagagaaaatcaaattctatatcggatttgaccctactgcagactgtcttcacgtaggacacttcatgcaggttataattatgatgtacatgcagaaatacggacatacacctgtagtccttataggcggcggtacaactatgataggcgacccttccggaagatctgatatgagacagatgatgactcaggatacaatcagagaaaacggactcaaattcaaggcgctgtttgacagatttatcgaattcgatgaagaatggaaatacgttccttcgggaagcgttcttgaaaagggctcatacaacaaagagcctgaaacaggcaaggcaatctgtgtcaacaatgcagactggcttcttggatttaactatcttgaattcataagagacataggcagcagattttcagtaaacgcaatgctcagagcagaatgcttcaagcagagaatggaaaagggcctgtcttttcttgaattcaactatatgctgctgcagtcatacgacttctatgcgcttgcaagagacttggactgcaaaatagaattcggcggcaacgaccagtggagcaatatcctgtttggtgcggatctggcaagaagacttttaggcaaggacaactactacggtatgactttctcacttcttacaaacagcgaaggcaagaaaatgggtaagactcagaaaggtgctctgtggcttgatgcagacaagacttcaccgtttgaattttatcagtactggagaaatgtagacgatgccgacgtaaacaaatgcctcaggatgcttactttcttacctatggaggaagtagaaagactttcagcgcttgaaggcgcggaaatcaacaaggcaaaggaaatccttgcatttgaggttaccaagcttgttcacggagaagaagcggcagcaaaggctcaggagggcgcaaaagcagcattctcaggaggagctgctcttgataatattccggcggtaacaatggacaaggcgaatttcgaaggagaaggtatgggcgttgtaaaccttatcagagaaatcggagttgttcctacaaattcagagggtttcagaactatcaagcagggcggtcttgaaatcgccggcagcaaggttacagatcctaagatgatgattactgcagatatgtttgatgatgcaggcaaacttctcgtcaagaaaggcaagaaaacctacagaatggtagagcttggatagataaacagctttaatgtggactaaaagaccgcttcggcggtcttttatattgcggcgaaatgcggcgcagaattcggatgaaaaggttaatgggatatgatataattagcttatacctaaagcagactgacaatatttgttttagattgttaattagaacataaaaagctaatgcatgtttatcatggtcacattataggactttattacaggtacatgatgaagctgcacgcattgatatagaaagaagcatatgagcaagtctggagcatgcgtattttgcaaaggaaggattgcgtgaagaaatgaaaatatagaaggtaagcttctatttgcagcagggagtggatagataaacaactttaatacagatatgattaatatagtgcaatgaataaaacagaggtggaagtatatgagtgaattaacagaaacagaaaaaaagtctaaaatggcaaaatttaaaaaaagagtaaaagtagcaatatttattctacttataatattagtaatagccggtgccatttcaatagtaagtaattattttgaaacggaaagcaaaactataaaaataggctttgaggatataggagaattggatacacaggttgcttatacaacagtaataggaacaattgatgatcccagaaaaatcttcggagtgaaaattccttttacggagagcaaatacatatacagctatgatgtagtagtaaaagcaggcttggatttcagtaaaattcgatggaaagagggagcagaaaagattagagtttctatgcctgctccaagggttacagattgctatatagatgaagattcaggtaaagtttattatgaaaaagaaagtattttttcccctataacctttgctgaggaaatggaatcacgtaaggatcttactgaaagaggcaggaaggatgcagttgcaaaaggtcttattaataatgctaaaaagaatgccgagaaactgctgaagagtttctttaacaataataagaaatataaagactatgaagttgaattcaaatgggagaaataaaatgagtaaaaaagatgatagaaaaaaaggaagtaacttatccgaaaaattattattcggactgatagcgatagccgcagttgtcgtgatgtgagaggagggtgcggacattttcttggactatctaagtgaccaatccaagtctatgtctgtactctataggactcaaatatcctaatgatttttttattcttttttcattataccaataaagataatcatttaaaataccaataaattctgagatgtttaccccagaccaatctgcattatagaacatctcatttttaattcttccaaatacgccctcgcaggcagaattatcaggtgaacagcctttctttgacattgatcgtatgaaaccatttttctccatcctgtcaatccagcctggccagcggtagtgtacgcctctgtctgaatgtatgattggtttttctcctacagatagtaatttagctgcatcgtcaagcatagaattgacaagtaatgcatctggagaagtgcttatattccaattgacaagtaagccatcaaaacaatctactataggcgataaataaacctttcctgccggaattgcaaactcggttatatctgttaaccacttttcgttaggtttagatgcagaaaaatttctgttaattagattatctactgctggagatatttcaccttgataggaattatatttacgagttcgtttgatttttactacaagttgttcttctttcataatcctacgaataactttttctgagacaattatattttcacgcttaagtagggcgtgaattcgtctgtaaccatatcgacctttattctctgtaaataattcaatgactctaacacgtaaaagtgtatatttatcttctttttgtagggattgttcctgataataataactgctttttgataattgtaatttctgtaataataatggcagtgagcatctatttttcaagacatcgattatcaccgccttctctctgttgctgagagcactctgatcgatgtctgggtctttttttaatacatttatcgtttctttaagaatgtctatttctaattgcatatcttgcatttgagccttcaactgatttatttcatcagaagaaatatctgtacttgaaacagaaccttctactaatgttcccggagtaatgtttttgtgattcataagacctaatgtaccttcttttaaataacgttttcgccattgataaatactagctctactatacccaatgtcttctgaaacatattttatattttctccgagttcatagcaacggtgaattgcatctaattttacttctaatggaggattgcgaggatgatcaggaggattatcaattacagggtattctctccttgttttgggtggggtattttcctcagcaatccatgtgtacagatttctacgtgttggataccctagaatcctaatagtttcagttacagactctgtttgatgatatatccgtagtgcaatatccttttgttcttttgaatacataaaaaggctcctttcgaagccctatagtagtccagaattttgtccgcaccctcgtctctcgtgatgttttatttcggtttgtttttaacgagataaaaatttgacaataaaaaccaagggagctgttcgaattgaacagctctttccccattttttacagttttgtagtaagccccaatctctgcttgtcatagtctattggtattatcttaaccctttaggttattcgtcttctgtttcaggagcactgatagtgccgctcattgaatagtcttcttcatcgtaatataaatagacattatagccttctgtgttatcagctgaataaaaaccttcatagctgcttgggttaactgtatacccaagttccttgcattcctcaacataagcattaaactgctccaatgataagccgtatgcatcaaacataaagatatcttcatcatctctgccaccttctactacttttacatcaggcttcggaattttgctgccaagatctgtttgtgaccactgatatgctgtttctgtttctgcttcggtagaatacttttttgaactgtaatcataatatacagtaaaaattttatcctcatcaatatacttaagcgtagcaatatcaggcgtaaccaagttataatgtgctatatttttcagataaaagtatccctcataataataacagtttatatttgagacagattcgcctggattaagaactctgtttgtttcggcgtacatcgaaattggccgacttctaacttcttccatatcttcatcacttgtttcgaaatcgctttggatatccgcacagaagtccgatttttcctcttcggtgataccagccttttctttgaatgtaattttaaaatctgttatcgtatattccgtattgttagtgtagctaagaagaacataacggtcaccgtcaacaataccctcatcaatattccaggcaatatcctctatgttaatctttccttttgtggcaccactgtttgtttcgttactgccgcacccggcaaagcacattattatactaaatataacgacaaaagcggcaaatatttttactttcttattcataatatgaacctcctaagtgtgtttgttaatcttcattaatttctacaatttcatagtcaagatcttatttccacaatgccccttgcggtttttgtggctgataaaactaatcgttccggaaatgaactgattggtatggctctgcagtatgccctcgataatatggagttaaaggatatgtagtgagccttttgagcgggtttttattaatgataaactatcacgcaggcgtgatagcaatagatgattataaatcttgcaaaaaatatgaggaagcatagcagtatctatagatattatgctatgcttccttcattcatttgactatacaatagtggctatagtattatgcgtcaaaggtatgatttaaagtcaaggagcgcctcggcataagtaacgccgcttttttcagaatatcggggaagtccctgctccataaaactttttattattttacgctgcatatccagtttggaaatttctgctgataaggtgctgattttattgtgcagaaacgcctcctgctgtgtttcgtgtgctgccagaagccgacttatctcctcaagttcaaacccagcctctttgtataaaagaattttccacaggcgttttaaatcgttatcatcataaagcctgtaattttcctttgtccttttggcaggaaggagtccgatatcgtcgtaatactgaagtgtgcgttttgataaacctgaaattctgcttaaatcttttatttttttcatacaatccacctttctttaactgtgagatattagtttcataaaagtgaatgtttttttcgcgaattgatattttcataaatcaattttttgtattgcggcgaaattgtaagaaacggctgcttttgattgacagtaagcagtacataaggaagaatagatataataaagagacaaaaaattgcggcaataataaaagggagggtatgaatgaagaaaaagaacctgcttatacttgtatgtatactgactatcgcacttgttactgcagcctgcggaagctcagaggataaagatcagagcgctgcgggacagataggcagcgaaatgagcggcagcgttcagaaccttatagaaaacggcgatgatgagcctatgggtacaatcaatggtgaaaacatatcaaaggcctacttcaaaatgagaagcgaactttacagagtgtgcggagccgagaagcctgcggcctctgcgtgggaagaactgaaacttgaagcagccgagaggggatttgcagaggcaaagggaatactgccggatgaggatgaaattctggaatatacaaagcagcagcgtgaaactgcagagtctacggaagaaagccatagtgttattaaggagcttcttcagaatatcggaatgacagaggactactactggaatgtatatcagctgaagtatgagtccccggtaatacttacaaagggcaatatagagaaatacaagacagcaaacaaccttgataaggtggattataaagaggttgaagcagttattacagataaagactattatgaaagtcttaactaaggtatacaaaggtgtattatgacgggaacgattgagagaataaaaaactatgcagtatgctatcatcagattaccaagaaaaggagactgacaaaatcatatgttctgtgggcggtactgcccggtttgctgcttcttagagcgccggaatttgcgtttaatattacgcaaaggctaccggtatatgcgctgcttttagtaatagtattcggtattgcgggtattggagactacagacagatgattaaagcggagacagacacgctgtcgccgcaggaaatcagactgtactgtataggcaacttcataatagcggcactgggaactgcgcttttgtgcctgcttgctgtgttgctgaatacatagattaaggacattaaatatttacatggagacaggccgtttgggttggattgatttcagttcaaacggcttttgtgcgttaaaatggctaatagaggaacagagcattacggtcgggagaactgcgaaaacacaatgtatctgtgtccgaaaaccgctggacaaacaaacgctgattgtataccatatctgtaagaggtatataaaaatgaacggaaaagaaatcttgtacaacgcttttaaatcaaaggatacaaggcttgacggcaaattttttgtcggagtttcatcaacgggaatatattgcgatgagagcggttggcgataccgatgtttttttgcagacagatgcaggcataaaagctgcgcttaaaaatatgccggaaagcagaattataagcgcagtggaaatgtgcagaccatggagaagctatgcaatgatagggctgtggaacagtttgtaggaggcaattatgtattattcgatgaaatatgagtcaccgctggggatgataacagtggcataaacagaaaatgctgtagtcggactgtggtttgacggacagaaatactttgaggatatgggagatgccaaagcgacagaagcgataagaaaacagggctttgcgtcaggtgaaatgccttctgttatggatacggtaagaccatggcttgcttgacaggtattttgcaggagaaaatccggatatagaggggattcctcttgcgccctgcggcagcagtttcagacagatggtgtggcagattttgtgcgggatacctgcggggcagactatgacctacggacagattgcaaagaaaatagcggagaaaacaggcaaaaccaccatgtcggcgcaggcagtaggcggcgctgtggggcataacccgatttcaattataattccgtgccacagagtcgtgggtacaaacggaagttttacgggatatgcgggaggcattgacaaaaagatggcgcttcgtgaactactccgacttatataagtcggagcttcctgcttcaaccactactgcgttggctgcggtgttacgcaactcaatgtcttacacaatgtccacaggcgtataagtttgggctaatt

SEQ ID NO: 3853 - DNA, 16756 bp, Unknown
  16S sequences of unknown bacteria
ggaaagtatgatgttcatagtgaggcgttctgagcttgcaaagccgcttcacgcccggctttttcttacggtgaatggcagttgcatttactttgcaaatttacgattttttcgcaaacaatgaacaaaaaaccgtgagcctgaatacttcggctcacggtcagctgtcacatctttaattgtcaggatttgttggctgttttatcacttcacgacaacgacagtctgcatctcagcgccgtcgaccgagaacacaatgtggtaggttcccgcggtcatctccttcaggcagtcgacagtcacgacgagaccgccttcagtcttgtaggagaaggtaaaatcagtctccggaaggatggtctccttgccggtctcggtgtcgacagaggcgataccgatgaactttaccgaaccgatgccggtgaagtcgtcattcgcggtgatggtgaatcttccagccgaatactctgagcggaaggtcgggtccgcggtcctgatgacagacacgacggcgccgttcttcacgatcacctcgacgtgtttcatgtaggtgtcggagaccttcagcgaggtgatattctcgccgtcaataccgatcacagtcacatcggagccgagagcgaaggtctcgccgccgaccgagatcgtcgttccggtgtagccggtgacgataccactgcggacgtcagccttttcggaggagacgagcccgtcgacagtcgttaagtagttcgcgccgacagtgaggtcattctcaaggctgcgcatcgaatcggtctttccggtggtgaggtcgaggacggtgtagaccgtgtagatcttgccgtcgacaagctctctgccggtgttcgcgagtatcttgacactcgacgcggaggagtcaacgcttccgagcgaaccgtcggagatgtagaggtatctgagggtctcgacgcttccgggatcgtttctgaacaccgcggtcacggacgcgccgtcttcaatgccgatggtcgacgcgtatctgccgttcgctatctggtactttccgttcttcttcacgatgatgacagagtcggagtcggtgacgaagctgatcgtcgactcgttcatgccggtcgagctgacagcggaggaattgccatttgagagggtgtagaacgagccgccgcggttgatcgacgctccgttcgaagaagagatgatgtacgcgatctcgtcgttcgaggaatcggactggacgaactggtcacgtccggagttcacgactccgccgctgacagtccacgggatgagggtgtaggttccgtcgccgtcgatcgtgtaacggtagaccttgccggactcgacgctctgattcgtgacgaagatgcttgtcgacgagccgccgatgttcgcttcgatcacatatccgaacttgccgttcgcgaagaccggagaagaggcgctctcggcgatgagatacttcgacggcgcgaagacagaggtggacgaggattcgaccgcgaggatcgcgccgttgtaagcgacgacacgcgctctctcaccgacggtgaggagatttcttatcgaagccgcagaaatgccgagcttgtcgtttccgagggtgtatctgacgccgccgatcgtcgcggaggtgtcggagagacgggtgacgacgcccgactcgctgatcccgagtacagtctttatctcgagggtcttgttctcattgttgaagtaatagagcacgttgtctccggagacggcgttatccgggttgactatagtgaggtcggattccttcacgttgcccgcgaggttgacctttccgccggatatcttcagcttgccgaaggagtacggcttgatgatgagtctgtccgcggtctcgctgttcctgtcgtcgaatatgagggtcgcgccgtaagctccgaggagctttccgaggtcctcacaggttttgacagcttcgagctttccgttcgcgccgtaagcgtagacgagtatctcgttcgcgttggtcgcgagggcgtcggagagcttttcgacaacgcggtacttcgtgccgtcgattgtcacgtatgtgttgttcttcgcgacggtgatttcttcaggtgtcgtcgtcttgccgatttcggtgcatccgaggacgtttacgagcttcgtcttttcgtcgcgcttgtagacgacgcggagcttctttccgagattttcgtccggtgtgcccttgagtccgagctcggagaacttcacggtgagaactccgtcttcaccggagatcgagacatagccgtctttggtcacggtctcgagtccgccgatcgccgaggtgttggtcgcggagaggacgctctcgtccatctcataaccgaacacgcgctcgattatcgtggtggattcgaaataagtaacgccgttcgacgaggtcttcgggatgatatactcagcggtgagcgcgttgtagagtatcccggcgacctcggcgcgggtgagctccttcgtgtaggagatgttctcgagcccgttgtcaaggccgagctttgtcgccgcgtcgatgaaggtccacggatagcccttgttcatcgtgtcgttcgagtgaccgagcgccctgacgatcatcgtcatcgcgtcctgcatggtgatgccgccggtcggctcgaaggtgttttcggatgtgccgatgatgtacccggacgcgttcgcccaggagatcgcgccgctgtaggtgtcgtcatagaggtcggtgaatgatgtggtgttgaggctcccggctgtatccttgccgatcatgagcctgaagagcaggagcgccatctgctcgcgggtgacgttgtcatccggagagaactcgttctcgccggtacctttgatgactccgatatcagagagcagtcctatctgctcagagaaggcgttttccgtcccgacgtcgccgtagctgacagcctggatgcctgccgccatgtttccggcgacgagaagagccgcgagggaaacagacagtgacttgttgattttcatttgttctttttcctcccaaggattgtttcgcgccggggtccaacgtgtccccgccgcgtgataatatgatatcatatctgagttgaaaacgcaatagttttgggacatatgtcatcaaactgtaagccacgttcactgctgatttatattatttgcataataatccaatcctgaatgaataatatggtacatcagacgtaatatgtaaaaaaacacattctctccggaaatgatagctgatatcctgaactccgcgccggagaacgcaaaaaaagaccgccgctcagagcgacggtctccggttttggggcggaactgtttatttcgcgagaagctccgcttcgacggcggagaacacggcttccttctctgtgtcggagagaatgccgtagacgacgtatctgccgatgaccttgacagacgcgttctcgaccttggagtgctcttcctcgggcatacatccgggcatccatgtgtcgacgcgggttttgagataggtctcgacctgacctttgagagcctcgacggtgtcgtcggaggacgccttgaatattccgtactcgtccatagtcgaaccggacgccgtgaccttgacgatgccttcctcgaagccggaggcggcgatgccgaggctgttctcgacgtactcggttgtcatgccggtcattccggaggaagcggcgataaccttgtcggcggcttccgcgagggtcgcgaccggaacgtccgtcttgtaggaagcggctttgccgccgcaggagacgaccgcgagcgcaatgaccgcgatcatgatgagagagagaattcttttcattttttataccgtccttatattttatatccgcgctgtcatcgcggtatcgttctgtttttagttcgtgctctcggacgcggcgtcggcttcaccgggccacgcgtgagtgcggatgttgttgagctcaatcgtgaaggaattcgtctggaggtgcattccgtctccgttatggtagtcctccgggagccagccgtcggcgtcgcgcagggctgagttcgtgtcgaggtatttcaccccgcactcggcggcgatctcgcatatccacttgttcgcggcgtcaatgagctcgttgtttatcgactcgagccgagcgtaggtcttcgcgaccgggaatatcgactgacagattatcttcgtgtccggacttgctgtctggaccgactcgattatcttcttgtattccgacttgaagtagtcctccttcatgaatgacacgccgttgacaccgagggttatgacgagatattccggcttcttcttcgcgacggcgtcggcgatggtcagctcctcgtcggtttcagggtagacaatcgtggcgaaggacgcctgcgacagggtgagggttccggtcttcggcgtccagacctgcgttgtgtcctttccgcccgcgagcatcttgtaggcgcgcagaccgtaggttgtcgagtcgccgaggaacactatcttgtcgatatacgcctgtccggcgtcggctgtctcggcgagcaccgtgtccgggtacagcgagaggtagtcgagcgtcgtctgcggcgtgtttgtcgacggaacttcaactgtgtcgccggagactggtgtcgaagccgtgtccggagacgtggtgtctggtgacgatgtcacgggggcatcagtcaccggaacggttgtttcgcccgctgtggtgtcggacgctgtggtgtcggacgcggttgtgtctgacgggtctatgttctgcgtgtcggatatcgtgtccttttgcgcggttgacgtctggtcgtccgttgacgggacgttgtctttcctgtatgagaccgagatcagcacgataagcacgacgaggatcacgaatattgcgaaagctgtcgccttgtacatgaccccgcttgattcaaattcattgtcgtttttcatttgtggaataatcctttttgaaatctgattttgtatggttcagtgttttccgtttctgctcgagaagaactcaccgaactgcgactcgtactcgaggtcgtccgagcggcggttcgcggcgataccgcggacgatcaggactatcacggcgatgaccgcgtatagcacggcgaatatcccgagccggacgaatatcgcgccgaagtcggcatacgccttcggtatgacgatgaatacgagcgagaaagctatgagcgagccggtgaagtgtatcagcaccttgagcgccccggacagtccgagcctgaacacgagattcagcgccgacatcatgagacacgccgcgaatatcattcccgcggcgccgagactcagaaatctgccgacggttccgccattttccggcgaggtctgcccgaacgccgcggcgaccgcgagcaggacgaattccgaagcggtgaaatagacgcaggcgtctgagagtatttttttgatttccttcatgaatttcatttcgaatcttccttcgtcacgacagagtgccacgaccggtacgccggaggtgtccttatacatcataccactttccggcagatttttcaacagcgtcgcgagataatttataaaagagtcacttatttataacaaatcgtattttttctgacaggctccgccgggaaacgcttccacgcgctgatacgctgaagtgtcagtccggcgcgtcgaggtcgatgattacgctgtcggcgacagtctctccggattccttgtcataatgcgtcgcggaacggaagcgcgacaggaacttcgtgtattcgtagaggtcaatccagatctggttccacccgtccttctgcgattcgtcgaagatcagctcgagcccgaagtgcaggtgcggcgtgtcgacattgttcgtgtcctcctttgcggagtagccggtcatgccgaggtagccgatgacctcgcccgccgtcacgttcattccttcctctatcccggcgaacgggtgcccgcggcgcaggtgtgcgtagtagtaatagcgtttcccgtcgtgactgcgtatacctatccgccagccgccgtactggttccagccgcacgcctcgacgcgtccggactcgacggcgactatcggcgtgccgatgtccccgagcatatcgtgcccgagatgcggccgtctgtagccgtaagagcgcgacgcgccgaaatcgtcgtagtcgccgtagtgatatccggcggcgatcggtgagaaaaccttgacgccgtatcttttttcgtagtttccgtcggagcctttcacggcgtagtttccaatgacgccgccgagcgcggcgccgtaggctccgctgtaataggcgaacagcttcgggttctttgttatgtcttcaggagcttcaccggcggcgaggcgttctgatattttccggattgtgtcggtctttattctctttacttctcctcctgtgtccgccgccgctatcgcgaggattgtgacgagttccgcgtgagtgcccgagcctttttttgcggcttcgtatgtctcgaggtcgcatttgaccgcggcgcggattagatcggatgtgaggtcgaagtccacccattttatgtatccgtccgccatcgcgggttcggcgccgccgcggaggaacgacggcaggagcaggaggaaggcgagcgttatatacatggcgcggagtatcactttccggcgggcggagggtcgtccggttttcaatatcgtgcgctcctttcggactatatatcattcatgtatgtgtatacaaaatatattatgcgaaaaatcatgatttatttacccttgacggttgacttttctgaataaagaatgtataatatacatgtatgctgatttattatgcattcgtgtgatgtatatatgctcattcaaaatatagatttcgccgcggaaagcgccgcggcacgaaaggaacagaacgattcatatggaagactcaagaaaaacagttgactcgagaaaggcggcgcgtgaattcaccgtcggtctccttttcgcaaaatcattcgcgccggaggaggacgccgacacgttcttcgcaagagagctcgacaattcggaggcagcgctcggtttgtttagcgactatgtgcgcggggcgttcttcggcgtctgtgacaacctcgcgggtattgacgaaaagatttccacggcggctgccggctggtcgctctcgagaatatcgcgcgcgtctctcgcgataatgcgcctcgcggtctacgagatgacgtcggtcgacgacgtcccgaagagggtcgcgctcaacgaggcgatcgagctcgcgaagaagttcgacgacgataaggcaccctctttcgtgaacggtgtgctcaacagcatcgcccattcgctcccggacagagagtgcgacaggaaatgagtcggtattatatcggtatcgacacgtcgaattacacgacctcctgcgctctgttcgacgctgagagaggggagtttctctcgaacgtgaagcgcctactccacgtagagcacggcggcagaggactcagacagagcgacgctgtgttcgctcacgtgaagaatcttccggacgtgacggcggaggctcttgccgggcttgaaccggagtttctgcgcgccgtgggcgtgtcggtttccccgcgcgacgcggacgggtcgtatatgccgtgctttctcgccggtgaggcggcggcgtcgacgctcgcgagcggagtgaagaagccgctcatgaaattttcgcatcaggcggggcatataatggcggcgctgtggtcgagcgggtcgccggatcttctttcgcgcgagttcatcgcttttcacgtttccggaggaactaccgagatgctgcttgtcgagccggagatcggcggacgcggcgacggttcgttcggcgtcaggctcgggataactaggctcggcgggacgctcgacctcaacgcgggtcaggcgatagaccgtgcgggagtcatgatggggctcgatttcccgtgcggagcggagcttgagcgcatggcgctcgagggaatccgtgagggtgtgaggtttgagcggaccggggtctcggtgaagggctgcgggtgtaatctctccgggctcgagaacaaggtcgccgcgatgctgaaaaatggttccgacccgcgcgccgcggcgatgtacacgcttgatttcgtcggaaggacgcttataaagctgaccgacaacgctctcgaagagatgacgacaaaaggacacaaaaaggttccggtgctgtacgcgggaggcgtcatgagctgttccatcataaaggatatgataaagcggcgcggatatgattcgcgtttcgcggaaccgaaattttcgagcgacaacgccgcggggacagcgcttttagcggcgacaggcacggagggaaccggattttggcagagatgaacagatctggcaggggtctcgacccggggatagaaaagctcctctcgggcgggcgcgggcatgaaaagctatccgcgggcggcaatgcatcggcggagcgtgacaagcgcgccgtcctgtcggtcgggcaggttaacgcgtatgttaaacgtatcatagattccgaccgcattctcgcgaatatctttgtccgcggtgagatatcaaattttactgatcattacagaaccggacatctgtatttcacactgaaggacgaggacggcgcgatctcggctgtcatgttccggaacgccgcggaaaagctccggttcattccggaggacggcatgaaggtcattcttcacggtcgtgtctccgctttcgtgaagaccggacagtatcagatatatgtcgacgacatagagccggacggcgtcggaagcctttatttcgcgttcgagcagctcaagagaaagctcgccgccgagggacttttcgacgaggcgagaaagcgcccgctcccgaggtatccgtcgagagtcggtgtaataacgtcgccgaccggcgccgccataagggatatcataaatatttccggcagaaggtatccgctcgcggagctgatactttacccggcgctcgttcagggcgatgaggctgcggcgtcgcttatttcggggatgaggtattttaacactccggacgaaaatggcggggatcgtgtcgatctgataataataggacgaggcggcggagcgatcgaggacttatgggcgtttaacgacgaagttttggcgaggaatatcgcggcgagccggataccggtcatatcggcggtcggtcacgagacggatttcacaatctgtgacttcgcggcggatctccgcgctcctacaccgtccgcggcggcggagctcgctttcccggacagaaacgacctcaggcggcgtttcatgaatgttataacacatatgtccctcgcgatggactcaaggataaactcggagcggaaaaggctcgacgcgctcgcgaggagccgctcgctcaccgatccgcggtatatcatcgacgacaggcggatgcttctcgcggcgctttcggacgggcttaacttgcggatgaattcgatagtcagggacgacagggctaaactcggagcgcttacggcgtcgctgcgggcgcttgatccgatggctgtcatatcgaggggatattccgccgtcttcggagacgacgggaagatcgtcaagtcggtcggggacgtgaccgccggagaacatctgactctgcgtgtcacggacggagagatagacgcggacgtcaccggcgtcagagtgatagataagaaaacgtgtaatggagaagaaaacggcaatgagtgagaccagaaagaaggagccgggcttcgagaagtcgatagcgaggcttgaggagatagtccgcgcgctcgacgacgggagcgcgccgctcgatgaatcgctgaagctgttcgaggagggcgttgggcttgtgagagcctgcaccgcgaagctcgacagcgccgaacagaaggtgaagatcctgaccggcgggaccgagaagaatttcatcccggttgatcagtgagattccataacggaaggaacggaaatgacgatggatattgaagcgatgctcgcctcacgcgcggctcttgtggagaaggagcttgaagctctctcggcggagagcgacccggactacggcatcgtctgcgacgcgatgcgttacagccttttgtcgggcggaaagagactgcgtccctttctcgccatagagttcgcgtcgctcgcgtcgagagcgtcgggtaccgaccccgcgagggcggataagtgcgcgctgagattcggcgcggcgctcgagatgatacacacgtattctctgatacacgacgatctgccgtgtatggacaacgacgacctgcggcgcggcaagccaacctgccacgtgaagtacggcgaggcgaacgctcttctcgccggggacgcgctgctgacgaaggcgttcggcgtcgcggcggggaatccgtttgcggagccggagacaattatgcgggcggtctcgctgatgtcgcgctgcgccggaatcgacggaatgatcggcggacaggtgatggaccttgagagcgagaacaaggaaatcgggcttgcgtcactcgaaaaattgcaatcgctcaaaaccggcgagctgatgcggtgcgccgcgctcctcggctgtctttccggaaacgcgccggagacgctgaacagagcggcggagagatacgcggacggtatagggcgggcttttcaggtgatagacgacatactcgacgtcaccggagacgagaagacgctcggaaagccgacaggcagcgacgccgcgagcggaaaaaacaccttcgcgacgttgatgacgatagacgaggcaagaaaatacgcggaatccgtaacgtcggatgccgttcgggcgatagacggcttcgaaggttcagagcgtctctcggcgctcgctacatggcttcttgaaaggaagaaatagcagtcagaaaatgaaaaacgagtttttaggatttttttcgaattatgtgctgatctgcgcgttcatcgcgtggttcggggcgcagttcataaagtgcggggcttatataatcaagaaccattcgttcagcttctcggtgcttatgtcttcgggcggaatgccgagctcgcactcgtcgaccgtctgctcgatggtcgtcgcgacagggaagctgaacggcacgcattctgtgaccttcgcgctcgcgttcgtcatggcgttcattgtcatgtatgacgcggcgggagtcagacgcgccgcgggggagcaggcaaaggtgctcaacaagattgttcacgacatctcaaccggcgagtcaaggtatctcgacaagaacctgaaggagctcatcgggcacacgccgcttcaggtcctcgcgggcgcggttctcgggatactgatcggcgcgctgatcccggtgttttaagagatgcgggcggacatatttctcgccgaaaacggctatgctaagagccgcgaggaggcgaagcggctgatcgcgtccggcggcgttgtcgtaaacgggaaaacgctgacgaagccgtcctcacagatagacggggagacgccgccggagatcctgataaccgctgaacggtcaaaatacgtgagccgcggcggacttaagctcgagaaggcgatagacgtcctcgggtttgatccggcgggggctgacgccgtcgatataggcgcgtcgacgggcggcttcaccgactgtctcctgaagcacggagcgcgccgtgtccgcgcggtggacgtcgggcgctcacagctcgacgggacgctgaaaaacgacccgcgtgtaatctcgtatgagggaatgaacgcgagatatatcggaccggaggatatcggcggcaaatgcacgctcgccgtctgcgacgtgtcgttcatttcgctcgcgttgatatttccggcggtgagacggatactcgagccggacggcgtcttcgcggcgctcataaagccgcagttcgaggcgggaagagcgaatatcggtaaaaacggtatcgtgcgctcgagagccgtacacgcggaggtcatctcgcgcgtgctgtccgacgccgcggtgaacgggcttcactgccgcgcgctcactgtctcgccgattgagggcggggacggcaaccgcgagtatgtggctgttttcgacggcggcgtcacctgcgggacgatatccgacagccttataaggcgcgtcacagaaggcacgctcgacagtgtcttcgcctccggcagagggcagtataacgatctgacataacactgaaaggtcggtatttcggaatgaagaatatcggtatctattctaacgcggataaggacaaggatttcgccgggaccgcggcggtgataggcgctctcggcgcgataaggctgacgcgtgacggcgtcggggtgttcatggatatttcgcaggagtgcgcggtgagggatactctcggtgaggacgccgtcagagacgtcgtttttctcccggagtgtgagatgacgaggacgattgacgtaatgatagtcctcggcggagacggaacgcttctcaaggcggcgagacgctgttcgccggcggggatacccctgctcgggataaacctcgggcgggtcgggtatatggcggagctcgagataaacgagcttcatatgctcgggagactgattgacggcaattataatgtcgagagtcggatgatgctcgacgcggcgatacccggaaagtccggaatgttcgcgctgaacgacgccgtgctcggcgcggagtcggtgttcaggatggtcgatatagagctctgctgcgacgggaagattgtcaaccactacaggtgcgacgggctcatcgtctcgactcctaccggatctaccgcgtattcgctgtccgcgggaggacctgtcatcgacccgtgcatggacgccatcgcggtgacgccggtctgcgcccactcgctgtcggcggcgcctatcgtcttttcggcgtcatcggtgcttgaggtgcggaacctctcgaagaggtctccggagatgtgcctgtcgctcgacggctccgaaatgttccgggtaggctacggggagagcgtcaggataacgaagtcgccgctgtcctgcggtttcgtgaggttgaaggacggaggcttctacgaggtgctgcgccggaagatggcggagagcatatagtctgaaaacaagttttcagaccaaacagttttgaggctttcacgacgtaggggcgtgaattttgaaagccggacaagccgtctttcaaaaccgcctcaaaaccgtaagatagctatgaaaaacggtcccgctcgggactacttacatacgaaagagagatttgaaatggcagaaaacgaagaagttctcgaaacggcggagtccgatggggatgcggcgcgcggaggcacgccggaggcaccgtctccggaatcgcgctccggaagacgccgtccgacggagaacgagcgcggagggatacttatgaaatacaaccgtcagagcgagataatcgctctcataaacgagaacgagatagagaagcaggatgagctctcggagcgcctgagagaaaagggctacatggtgacccaggcgacgatctcccgcgatatacgcgagctcgggctgatcaaggtcacgggctcgacaggaaaatacaagtacgcgctcccgcgccgcgagcaggtgccgatcaactcgaagttccgcaatctgctgatcgagacggtgaccggacttgacagcgcgaacaacatagcggtcgtgaagacctgctccggaatggcgtccggagccgcggcggcgatagactcgatgagccacaacgacatcgtcggcagcgtcgcgggcgacgatacgataataattgtgatgcgcacgaacgaggcggcgtcgacgcttatcgcggagctgcgctcgataatcgataaataaccgcgggattctccgcggaggtgaaaggcggcggtatggatgctgatttcgctccacattgaaaatatagcggtgatcaagaccgcggacatagacttcaccgccggtttcacggtgctgacaggcgagaccggagccggaaagtcgataataatagattcgatagctctgatactcggcgcgaagcagtctaaagagctgatacgcagcggtgaggagaccgcgatggtctccgcgctgttcggagacatgaatatacgggcgctgaacgagctttcggcgttaggtctcgctccggacgaggacgggatgattctgctctcgaggacgatcagcacttcgggaaaatcgacggcgagaatgaacggtcgcgcgataccgatgtcgcttctgaaagacgtggcgaagcatcttatcgcgatacacggtcagcatgacaacatgacgcttctcgacccggagaagcatataaattaccttgacagcttcgcgtcgctcggcacgcttccggaagagtattcggagtgctacaacaggtaccgcgagctcgagagaaagatcgcggagatgacgtcgaacgagcgcgagaaggcgcgccgtctcgagttcctgaaatttcagatagacgagatagccgcggcgaagctgaagcccggagaagaggaagcgctcgagaaaaagcgcgcgaagctccagaacagcgagaacataaaccgtctctcacatcaggtctacgcgtcgctctatcagaacgagaagggaacctcggctctcgaccgtttgagaaggtcggtgaaggcgctcgatactctatccgccgtgataccggaggcgggggaactgtcagggcgcctcgagcaggcgggttatgagatcgaggatatcgcgctgacggctgaggctttcgcggacgactcggacggcgacccgaccgccgggctcgacagaatagagtcgcggctcgacgagatatcgaagctcgagcgcaagtacggcgacacgataccggatatcctcgcgttcctcgagaagtcgaaaaaggagctcgagtcgatcgagctgtcggaggagcgccttaacgaatgcgtcgccgagaagaagaagctgcttccggtgctcgagaagaaggcggcggagatgacccgtctgcgcaccgacgccgcggcggggcttgaggagaggataatctccgagctcgcgtaccttgacatgaagggcgtcacgttctcggtcgagatacttcccgttcagggcggcttcactccgcgcggcgcggaccgggtggagtttcttatctcgacgaacaagggcgagccgctgaagccgctcgcgaagatcgcatcgggcggcgagctgtcgcgtataatgctcgcaataaagagcgtcctcgccgagaaggatttcccggacacgatgatcttcgacgaggtcgacacgggagtctccggaaaaacctcgcagaagataggaataaagctgcgcgcgctcgcgatgagcataccggacgacagaatggctcaggtcatctgtatcacgcactcggcgcagatagcggcgctcgccgacaatcactacctgatctcgaagaaggagactgacggaagggtccgcacgagcgtgacaccgcttgacaaagaggggcgggtagacgagatcgcgaggatcatgggcggcataaacataaccgaccgcctgcgcgagaccgcgcgggaaatgatagacgagaagatatgatcatggaaaacaagaaatatacgaccctgctcttcgacgcggacatgaccctgttcgatttcacgcgggcggaaaaggacgcgttcggaatagtgatgcgcaggcacggcatagaatttgacgcggcggattttgaaagatataaaaattacaacgaaagtctctgggcgagctacgggcgcggggagataacgaaggagtttcttcagagggagcgtttcgcggcgtttctcccgaccgtcgggggaggagaggagcttgacggcggcgaggtgaaccgggaatacctcgagtcgctcgccgactgctcggtgctgcttgacggcgcggaggacgcctgccggatactttccagggtgtatgacatgtatatcgtgacgaacggcgtcgagaggacgcagaagaagcggcttgcgaattccgctgtaaagccgtatataaaggacatcttcgtctccgaggaggtcggcgttccgaagccgatgaaggaatatttcgattatgtcttcgctcatatcggcgaagagagacgggagagctcggttatcatcggcgattcgctgacctcggacatcgagggcggtcggcgcgccgggatagacacgatacttttctgcccgtccggaaagccgtcaggcgagactccggtgccggaccatatcgtccgcgaccacgcggagcttgtgcggcttctcatgccgacagagtgatcatgcgggagattgtctatgattgatcagaacaaccttttgacattattatcgcgccttggcgtgaggtatgaggagagctgtccgctttcgcgcctcacgagcttccggataggcggaccggcgcgtattgccgttttcccggagagcccggaacgggcggtcggggctatggacgcgctgaaagagagcggagttccgttcacggtgatagggaacggaacgaatctgctggctccggacggcgggtatgacggcgctgttgtagtgatgaccgggattgccggtttttccgcgtctgaccctgacaatgccggcgggagaacattgactgtcggcgcaggaatgccggtgaccttgctcgcgtcgagggcggcgaagctgtcactgaccggacttgagttcgcttacggaattcccggaacggtcggcggcggaatctatatgaatgccggggcttacggcggagaaatcaaagacattttagtgcgtgca

SEQ ID NO: 3854 - DNA, 3672 bp, Unknown
  16S sequences of unknown bacteria
gaaacggtgtttcgccgctgacagttaagactcgcgccccgcataactccccctatctccccgccccgtatatctccccctatctccccgcatgggcgcacaaacggcggcttttcgcccttttacgatctttttccttttcctttcccgattcccattctctgttgccgccgcgccccgccgccctcctgctccggggcgtttttctttatcgcaaaattccttctcttttccgacggacgaagccacgacttttttcggaaagcattttttccgcgctcccttttgtcttttttactttcgggaaacagaacgcctccgtccgtgatcgcatacctgtcccctcctttttgcatgaaaaaagacgcaaggaagcccctgcgcctttctccataatctttcaataagaggaaatgtggtgtaagcgatgttaaattgccgcgattttcaggcgcggtagacgatctttccgtcccgaacggtatacaagacgtcgaacttatcgtcgagcacgacgaaatccgcccgtttgccgacgcggatactgcccgcctccccgtcgatgcccagcgatctcgcgggattgatggcggcgcaatccaccgcctgcaacagaggcacgcccgccttttcgacgagattctgcacggcgcggttcatgcgcaggacgctccccgccaaagtgccgtctttcagcctcgcctcgccgtttttgacgatgacgacctgaccgccgagctcgctttcgccgtccgcaagccctttcgcgcgtatggcgtccgtgatcagcgtcagcttctccttgggtttgcatttgacgagcagctgaatggcgggcacggaaacgtgaatggtgtccgcgatgagttccgcgttgagttcgtcgtacaagagcgcgctcccgacggtgccgatctcccgatggtgcagagggctttgcgcgttgtaggcgtgcgtgacgttttcagcgcccgctttcacggcgttttgtatatcggcgcatttcgcgcccgtatgcccgatcgacggcacgacgccgagctcctttaaatgcgcgacgagctgccgcgcgccctcttcctcgggagcgagcgtcacgatcttaatcgcgttgccgcttgcggcgttatattcgtcgaatacgtctatattcggcttcacgatgtattcgagcggctgcgcgcccttgtgagcggcggcgataaagggaccttccaaatggacgccgagaagcctcgcgcccgtttcaggagccgcttcgcggtactccttcaccgccttcatcgcggcgaggatattttcccggctctgcgtcatcgtcgtggcgaggaacgtcgtcgtgccctcgcccgcgatggtatccgcgatcgttttgagcgcggacagggtgccgtccatggcgtccgcgccgcccgcgccgtggatatgttcgtcgatgaatccgggaaagaccgtcgcgttttcgggaagcgaaatgacgtccgcgctttccgcgttgccgccgatactttggatcttcccgtcgaagataagattacacctttttattccctcgccctcgacgtatacgagggcgtttttaaaagccttcatttttgcctccccagggcgcctccgcccctcgataaaaaaactttttaagcagcgcccgccttttttacctcctaaaaggcgcttatagcaaactcgccgccgcctcgtcgcagacgagcgtacagtcaggatgcagctgcaaaacgctggcgggcacgttttccgtcacttcgcccttaacgagtccgtaaacggctttcgccttgttcgcgccgttcgccaaaatcagaatctttttcgcgttcatgatatttttcagtcccatcgtaaacgcctgacggggcacttcgtcgatgctcctgaacattctcgaattgtccctgatggtgctctccgcgagatccacgatatgcgtgacgctcccgaacggcgtccccggctcgttgaaggcgatgtgcccgttagagccgatgccgagcacctgaatgtcctgctgcgtcttttcgaggagcttattatagcgctcgcactccgcctgccggtccgccgccttgccgttttcgatattcgtgttttcgaggtcgatatcgagatgatcgaaaaggttgcggcgcatgaaatagacgtaactttgatcgctggaaacgtccagccccgcgtattcgtcgagattgacggtatggatttgccgataactcgtaccgtttttctcgtgatcctcgatcatgtttttataaagtccgaggggcgtcgaccccgttgccagccccagaacggcgcggggattggttttcaccacttccgccatcacctcgaaggcctttttgctcatttcctcatagtcttttgcgataattactttcatatcttccgatttacctcctgccttataaaccaaatttttcaaatctgttccgccgttccgcgttcccaaaagacgttgcgcctcagggcgttcaggaaaaagcgaagcgagagcgcccgagaactttcttttccgtccgcgcttttaagaacacccgcgaaaaaacaccgctcgcccttcctcctcgtctatacttttttgcgcacgccgatgagcgggcggcgctcacacgttcgcgggcaacgacgccgccgcgatgctctgccctacccgcctgttcttttcgtcggggagggaaatatcgaggtccttgaattggggatattcttccgcgagcactttcttgcaggtatcgagaaggatattgcctcccttgccgcccgtcacgcgccctaaaagaagcacgtgcttgatgtcgtagaatttcgcgtagaagggaagggcgtaggcgagatagacgccgatatcctcgtagatctgccgagctaacggattatccttttccatcagcgcctgtatctctttgagcttctccgcgggcgtcgcgccctctttaaaggaatatccgcccgcatccgccagtttgatgacggcgtcctgcgagaaatatttgcagcccacgcccgtatccccgctccattcgtccgccatggcgttctcgttgaaatccacgggcacgaaggcaagttcggagagccagccgttgatgccgccgtccctgtttatgtagccgaccgcctcgctcgttcccatggcgatgccgagaacgcgggtgtcgtttaaatcgatgctacccgcaagcgcggtgacgtcgccgtcgttagcgacttcgaggggcacgttccccatttctttggcgatgtcgatatacatatttttgacgaaatcgccgtactttttcttgtccaccttgatgaaaagggaggcgaccatgatcttgttgtccacatacacgcccgcggacgacacgccgatggcgtccacgcggggcatcttggacgccgccgtcttcatcgccgtcagaatctcgttgtagtgatagtgcggatcctcggtggtcttaggatgccagacgacttcctcgctgtacaccacttcgccgtcgatgaccgcgctcaccttcctgtcgctcccgcccgcgtcgaaaccgatgcggcagcccttcaaatagccgcccaccttcacggaacagttcttttgttcggggacctgccccgcttccagccattccacctcaaagggcttttcatagacgccgctcatgaaatcggcgt

SEQ ID NO: 3855 - DNA, 10055 bp, Unknown
  16S sequences of unknown bacteria
tcgaaccctggaccttgggattaaaagtcccctgctctgccagctgagctaacggtccacgtcagcggtgaagattctagcagaaaagcacgatacaatgttgcgcagtgtccgcacaaaaggagattacttttgctgagcagtatattcttcgccttcgccctcgcctggattgtcgccgtgctcatctgggtcatcgtcactgcacggggcatccgcaaggcaatctacggcaaccgcaagggccatgcgggcgacgtgctcaaagcggtcgtccctggaatcgtcgcgctcgtcatcggcgcggtcgtgctctttggcgtgagcttcctgctccgctagcgccacgacgcgcacgcgttcccgatctgcaccaggaatacaacaggggcggaaaagctctcgcctccccgcccctgatcgtcgcctctcgcaaacgcgagactcaagctcgtccctcagacgcgcacgtcctgctcgccctcgccgagctttttctgctcggtcggcagcgcctcctggtcgcgcaggccgatgatcggcgcgccttcgccacggatgaagtcgcccgtgaccgtcacgtgcccgatcgtctggtccttgggcacctcgtacatgatgttgagcatgaacttctcgatgatggcgcgcagcgcacgggcgccggtatcctgctccagcgcctgcttggcaatctcgcgcagcgccgaatcgtcaaagtcgagcgtgacgccgtcgtatgccatgagcgcctggtactgcttgatgagcgcgttgtgcggcttgacgaggatgtcgtagagcatgtcctcgtcgagcgcttccatcgtgcacaggatgggcaggcgtcccaagaactccggaatcaggccgtattccttgaggtcctcgaccttgacgtgctcgaggatatcgcggtcgtcgtcgtagttctcgcgcacggcagcgccaaaaccgatgcccgcgctcttgttgaggcgcttcttgatgatcgtgtcgagccccgggaacgcaccgccgcagatgaacaggatgttgctcgtgtcgatggtcgcgttgcgggagaacggcgtcttcatgccgccagacagcggaacctccatcgtcgtgccctcgagcaccttgagcaggccctgctgcaccgactcgccaccgatgtcgcgcccgccgctcgtgccctccgggccgccgttgcgcttggcgatcttgtcgatctcgtcgatgtagacgatgccatgctccgcgcgctcgatgtcgccatcggccgcggtgatgagcttggtgatgatggactcgatgtcatcgcccacatagcccgcctgcgtgagcgtcgtggcatcggagatggccagcggcacgtcgagcagctgcgcgagcgtcttgatcaggtaggtcttgccggtgccggtcgggccgagcatcaagatgttgctcttgtcgatctgcacgtcggtgttcttctgcgcctcgtagcgcttgtagtggttgtacgtcgccacagcgatgatcttcttggcaagctcctggcccacgacgtaatcgtcgatctgccccttgaggatatgcggaagcggaacgggcgccatgatgggctcgttggggtcgcgcttcttctcgggctcgccgccgcccatgccaaacggccccgacccggaaccggtgaagaacccgatgttgccccaggggctccagcctccctggtttccgccggcgttgttgcccgacgcggaaccgtcgtcgttgacggcctcgcccgtgacctcctcgatggggttgccgttttcgtcggtcgtggtcttgggcttgtcgtttgaaccctgcggctgtccaggcatcgtgaagccgaacatctgggacatctggttgacttccttttcgaggcaggaagggcagatgagcatgttgggcggtagctggatgagcgtgccgacctcgctttcggtcttgccgcagcgcatgcagcgtcgctcgttgcggttgttgttctctgtggtgtccgccatgcgattaacctctcgtcaaatagctacaggccgcgacaagaatcgcggcctgtacatgattgcctattacgctgttgctcgtgcacatggatgatgaaccgttacccgcgtgcatcgaaccgtcatcgagcggcgctactcgtcagaagagcgcgagctcctgctggagccggaactggagctagagctggaactggagctgaagttggaactcgaccccgagctatagcccgagccggagctggactccaaggagtaataatcatcatcgtcgtcgtagctcgagcccttcgagctggagctcgacccggtcgagatggtcccgttctgctcgtttttcagcagcgtctggtagttggtgtagctgtagaccggcccatcggtgtagttgccggtaccgcactcgtcgccgatatgctcgatgtcgaagctgctggggaagccgtcgtacgggtctttgccggcaatgaagttcttctgcagggtcgggaagagatcctggaagatgacgccgtaccaggctccgtcgatggtggcgccagcttcgggaatggcgcgcgacacgaggtcactttcgaggtccatgccgcgcatgttggaggcaagctgaatgatgcgcgagatgtccatgttggtctcgacgcattcggaaaggcccgtgatgaggtcgggcatcttggtcgcgtccgactcgagaatcttcttgccgattgccttgatgaggttgcgctggttgagcgtgcgctggtactcgcccatggcgtaggcgccctgatctgccggcacgccgtggcggcagcgcgcgaggacgagcgcctcctggccgttgatggtgaccgcatcacccgcaggcacccgcaccccagcatactccgtgccctccgggacctcgacggtgacgccgccgagtttgtccaccaggtcctcgaagccgctgaagtagatgaaggcgtagtagttgatcttgatgccgagcagctcgttgacctctttgatggccaggtcgtacccgccaaactcgatggcggagttgatcttttgatgcccgtgcccctcgatgtagacgcgcgtgtcgcgcggaaccgagagcaggtcgaccttcttgttcttctcgtcgacacgcgcaaccatcatcgagtcggtgcggttgccctcgtcggcttcggtcttgacgtcgccctcgcgggagtcgccgcccaaaagcagcacgtagtacggctcatctgccgtggcagccgtcgtggcggtgatgttgttgtttcccttgagattagaggcgatgttgttgtaccagagcgcgccagcgactccgacgccggcaaggatcgcgacgagcgcaatcacgacgatgagggcgatgcgcttcttcttcgagccgcgtccggcgttgcttctgcggccgacgtagttgtttgccgagtacatggcggccgaatcggccctgctgcggttgcgcgaatcgcgcacttgctgctgcccgccacgtgactggcgccgggagtttcgtgtggagcttcccctcgtggcatgcatgtgcgggtcggtctgtatgcgggaagacgccgcgtgcatgcgcgggtcggtctgtgcgggagcggtttgcgcctgatagccgcgcgaattggcgctatgtcggccgcggctgtgcgcgccgttgcgagaagaagacgtgcgctggtgcgacgaggacgccgcgcgtgtccggctttcgtccgaacgggcgcgcgagggacgcgcgttccttctgggtgctcggtcgtagtcgttgcgaccatcgccgcggctacgaccggacattcggctgtttcgtgccataacccctcgtttaatcggttacagaatgctcctgggagcaggcatggctatcggaccggcgtcgtctcaggcgcgttccttgcgaagatagacatactggaaaatcataccagccgaaaaacaatgagtcacttccaccgcaaaatgcgcacaattggcacgtggccgcaaaagtggcaagaaatgacacgatacccacggcccctcgtgtcatccttcgagctgttccgcgatctccaaccaggaatcctcgagctcctcgagctcggcctcgagccccgagatcttctcctgctgctgccccaaggcgacgaagtcggtcccgtcgatcttgagcagctcgcctttggccttgtcgagcttgctgcgcagcgtgcccatcttgcgctccagcgacgtgcgctgcttcttgagctcgcgcagctccttctgcgaaagcccgccttcatcgcctccgccctgcttggcatccgatgccgtgctgcgcgcgacgaacgagccttggtgcgccctgcggtcaagttcctcgaggtactggtccacgccacgcggcatgtggatgacctcgccgtcgatgagcgcgtactggtcgtcggtgacgcgctcgaccaggtagcggtcgtggctcacgagtatgagcgtgccgggccacgtgtcgagcaggctctcgagctgggcgagcatgtcggtgtcgaggtcgttgccgggctcgtcgaggatcaagacgttgggacggtcgagcaggatgagcatgagctgcaggcggcgtttctgaccgcccgagagatccttgaccgggcagctcatctgtgccgcctcgaacccgagctcctcgagcagctgcatcggccccatgctggtgccgtcggccagctcgtagcgcgtcttgtagtgggcgcacacctcgcgcacgcgcaggtcctgaagctcggtgagctcggagagctgctgcgagagcacggcgaacttgaccgtctggccgatctcgacccttccgccggtcggcttgagcttgccctggatgaggttgagcagcgtcgtcttgcccgcgccgttggaaccgagcagggcgatgcggtcgcccgcgccgatgttccagtcgatgggcttgatgaagggcttgccatcccagtcgaacgacgcgtgcttgaggttgatgaccttcttgcccaggcgcgacatggcgctgcggcgcagctcgatcgtgttgcgcagcggcggttcgtccgcgatgagctcttgggccgcctcgaccctgaagcgcggcttgctcgagcgtgcctttgccccgcgcgcgagccacgcgagctcgcgacgcaggatgttctgccgttttgcctcggcgacggccgcctgacgcgcgcgctcgacgcgctgctggatataggcggagtagccgccctcgaacggcgtgatgatacggtcgtgcacctcccacatgttgaggcacacctcgtcgagaaaccagcggtcgtgcgtcacgaccaaaagcgcgccctcgccatcgcgccagcggtgcttgaggtgctcggcgagccagtggatgcccccgatgtcgaggtggttggtgggctcgtccatcatgagtacatcccacctgccaatcagcacacgcgcgaggtcgacgcggcggcgctgcccgcctgacaggctgccgacgggtgcttcgtggtcgaggtcgcccacgagctcgtccaggatgccgcggatgcgcgcatctcccgcccactcgtattcggggaggtcccccacgatggcgtggatgaccgtgtccgcgtcgtccagatggtcgttctgtcccagcatgccgacggtgaccgagcccgtcttgactacacggccggcatcgggctcgagctcgcccgagagcacggcgagcagcgaggacttgccatcgccgttgcgcccgacgatgccgatgcggtcgcccgcgttcacgcccaggctgagcgcatcgaagatacgcgccgtcggaaactcgagctcgatgttttcgcatccaagaagaaacgccatgacccaccctcacgtacagattgcaatcggctgctattgtagaagactttcgcgcggctgcacgcgggcctgtccatctgtacccatcgaagcgccctgaacgtgatattccatgtgagccactggcccaagtacgctaagatggggcaaaacgtaggaaggtcacgcaatggcagatccgctgtttagcatgcaagcgccgcccatagcggtcgacaagagttccgacacccccatctaccagcagatatacgaatcggtgcgcacgagcatcgaggcaggcgtgctccgccccggagacaagctcccctccatcaggacgctttcggccggcctcaagatcgcccgcaacaccgtcgacaacgcctacaagcagctcatcgtcgagggctacgtcgccagccggcagggctcgggcttcatcgtgcaggaaatctcgcgtgacgcgctcgccgagcttcccacccccaaggcgcgggtgcagctccccaagcgcagggtggaaccggtgcgaaactaccgcttcgacctttcctacggcaacctcaccaccgatgcgtttcccatgagcacctggcggcgcatcgccgccgacgtgttttccgacgcgaacgccgagaagatggcatcgtacggcgatcccttcggagaacgccagctcaggctccagatcgcacgccatgtcgcgctcacccgctcggtgcagtgcacgcccgagcagatcctgatcacgagcggcacggagcaatcgctcaacgtcgtgctgggcatgtttgacgccgagcgcgatgcggtggcgatcgaagacccgggctatgcgggcgtgcgcgccgcactgcagcatacgaacttcgacgtgcggcgcgtgcggacacacgaaggcgaagacgcctacctcgccgacgtcaaggcaagcggcgcccgcctcgtctacaccacgccctcgcaccagttccccctggggtggtgcatgagccagcgggtccgttccgtcttgctcgagcacgccgtgaagcacgacgcctacctcatcgaagacgactacgacagcgcgtaccgctacacgacgcagccggtcccctcgctgcgctccaaggaccgctggggacgcgtcatctacctgggcacgttctcgaagattctctcgcccgccctgcgcatcggctacatcgtgctgcccgtcgagctgctcgaccgctacgagcagcgctacaagggaacccaccccaccgtctcgtgggccgaccagaccatcgtcgcgaccttcatggagcaggggcactgggacaagcacctgcgccgcatcgtcaacctgtaccgcaagcgccacgaagcgctgacgtgcgccctcgcgcgcacgtttggcagctacatcgccatgcacgacggggcggcgggactgttcacggcattcgacatcgacaacgggatgacgcaggaggagctggtctcgtctgcacgcagcgccggcgtgtgcatcgcaaattccaaggagctctggctcgagaaatcagatgcgccggaaaaccttgtcgtgctcggcttttccgccgtggatgaggcaggggccgagcaggcggtggagctgcttggagacgcctggctgcaagattagagcttagcgctcggcgccttcggtgcctttttcgccgggctcctcttgagcggcgcgttgcgccttctcctcgtcgctttggatcttctcgaaggtcttgagcaggtcctcgtcctcgatgagcttctgctcgaggcgctcttgctcgcgctcctcgaactcctcttcgacctcgtcttcgtactcgtcctcgtactcgtcttcccagttctcctcgacgagcttctgacgcagcaccgacctcatggactccgcctcgatgaagacggaatgcgcctgcggccagcgcgcgtgcaggcgccgttcgaggtcgtcgacggtgagcagcacctcgtgcgccgaaagctcggtcttgaacgtcgcgtcgatggcgatgaggaggtcttcggggcccatgtacatggtgaggatgcggccgcagctgatgacgcggtcgtccgcctcgacgatgtcgcgcagctcgtcgagcgactggtgcttcatgccctcgcccacgagcagccccttggtctcgcgcagcaagatgatcgccacgaagcacagcaggatgccgatgaggatggaggcgacgccgtcgaagtagagattgccggtcacgtcgcagacgatcgtcgagacgagcgcgaagcacaggccgagctcggcggccgagtcctccaagacgacggtgtagagcgacgggtccttggcgtcgcggatgaacttgaccgggcccacgtcgccgcgtgcagcgttgaactgcctgatgccgatgccgagcgtgatgccctcgatgaccatgcccgccacgatgacgatgaagttgagcgtcgtgtcgccgagcacgtgggtgcccgccatggtctcctggatggactgcacgcccttgaccagcgacatcccaccgcccatgaagaacacgagcagcgcgacgaccatggtccagaagtagagctccttgccgtatccaaacgggtgcaggtagtcgggcttgcggtttgcccggtgcaggccgagcagcataaacacgccgtcgcaggaatcgacgacggagtggatcgcttcggagagcattgccgacgatcctgagatgaacgccgccacgaacttgacgatgcagacggcgatgttgccgatcatgcccgccacgacggcgatctttccgcgtttgcgcgtcgagaccgagtactcctcgctcgcgcgacctctcagctcctcaattgacggacctgaatacatatgtgctattcaccacgtttcgagccccagtagaacaaggcgacggtgccggggccggtatggctgccgatcgtcgttccgatgctgttgatgaggacctcgccgttcatgtcggggcagttcttcttgacaagagccgccaccgcctgggcgtcgtccatgcacgcgctttcgctgatgaacaccttgccggtgtatgccgcgccgccgtctgcctgcgcgagcatcttttccgcgatgcgcttgatgacgcgcttcttggtgcggattttctcgcgtgggatcaggtgcccggcagcgtccatgtcgagcagcgggcagatcttgagcaggttgcccacgaaccccgcggccggcttcacgcggccgcccttgacgtagaaggtgaggtcggtggagaagaagtcgtggcgcagctcgagtttgtgctcctcgatccagtcgtgcacctcgtcgatgcccttgcccgcggcgcgcatgtcagacagcgtgtccatgatcaggccgtagccgctcgaagcgccgagcgagtcgacgatgtagagcgtgcgctcgggaaattcggcgcgaagcgatgccgcggcgatgcgggcggactcgacggtggacgaaagcccgctcgaaagcgacacgtgcaagacatctttgccctgctcgaggaacctgcggaagtacttctcgtactcgcccgagccgatggcggcggtcttggtctccgccccgtctgccatgctctggtagaacttgtcgaagggcacgctttggcccaggtcgtccgggtactccacgccgtcgatgaagaagtggaagcagatgtactcgacgtcgatctgcttgagcttgtcggcggagaggtcggcagtggattcacagctcaaaatgtactcgggcatacgtcacctttcggaatgcgccaggggataaggtcgaaatctgggcaccagtgtaaaccattctcgtaaaaagcgcggtcatcgcattgcgcctatttaatctgagatagaattacgattcgcgaaacaaatcgccaccattggcaccagggcatagattgggatgtgcatggatctgacacttggcgtgttctttgcctcgatgggcgcccaccccgcgctcatcgtcattctcatcctcgtgataggcgtcaccatcatctcgggcgccaccgatgcgccaaacgccatcgcaactgccgtgtcgacccgctgcctcaagcccggcgccgccctcgcgctcgccgccgttttcaacttcgtcggcctcgtgggcatgacctacgtctccaccgccgtcgcccacaccatgttcaacatggtcgacttctccggcgagacgcaccacgccctcatggcgctgatcgcggccatgatcgggtcgatcggctgggg

SEQ ID NO: 3856 - DNA, 16285 bp, Unknown
  16S sequences of unknown bacteria
gcctgtgaggactgcggcatctccatcgaggagctgaccccccgtctgttctccttcaacaatccctacggcgcctgcccggaatgcaccggcctgggaatgaaactggaactggacccccagcggatcattcccaatcggaatctgtccatcaacgaaggggccatcaaagcctccggctggaactccctggacgatggcagcatcgcccggatgtatttcaatgccctgtcccaaaaatacgatttttccctggacaccccggtgaaagatctgcccaaaaaggctctggacgccattctctacggcaccaagggggaaaaactggagctgcactggaagcgttccggcggcagcggccactacacccaggcttttgaaggggtgctgcggaatctggagcggcggtaccgggaaagcgccagcgaaagtgtgcgggaagagatcgaagagtgcatgagccccatcccctgccaggcctgccacggcaaacggctgaaacccgaggctctggcggtgacggtgggcggcatcaacatcaccgatttcaccgacttttccgtgacaaaggccctggaatttctggaagggctgaccctcaccgaccgggaagccatgatcgcccagcggattctaaaagagatcaaagagcggctgggctttctccgcagcgtgggcctggaatacctgaccctgtcccgggccagcggcactctgtccggcggcgaggcccagcgtatccgcctggccacccagatcggctcctccctgatgggcgtgctctacatcctggacgagccctccatcggcctgcaccagcgggacaatgacaaattgctgagcaccctgaaacggctgcgggatctgggcaacaccctgattgtggtggagcatgacgaagagaccatgcgggaagccgattatatcatcgatgtgggaccgggagccggcgtccacggcggtgagatcctctgcgccggagactgccaggccattatggactgcccggaatccctcaccggtcaatacctcagcggcaaaaagagcatcccggtgccccaggagcgccggaagggaaatggccattttctcaagatccggggcgcccgggaaaacaatctgcaaaagctgaatgtggacatccccctgggcacgctgacggtggtcaccggcgtctccggctcggggaaaagctccctgatcaacgaggtgctctataagcatctggccgccgagctcaacggggcccgcacccgccccggcgcttttgacaaaatcgacggcctccagtatctagacaaggtgatcaacatcgaccaatcccccattggccgcacgccccgctccaacccggccacttacaccgggctgttcggggacatccgggagatcttcgccaaaacccaggacgccaaagcccgtggttatggccccggccggttctccttcaatgtgcggggcggccggtgcgaagcctgcggcggcggaggcctggtgaagatcgaaatgcactttctccccgacatctatgtgccctgtgatgtgtgcggcggcaagcggtacaaccgggaaaccctggaagtacactacaagggaaagaacatcaacgaagtgctggatatgacggtggaagaagccctccccttctttgaaagcatccccaaggtgcaaaagaagatccagaccctgtacgatgtgggcctggggtatatcaagctgggccagccctccaccaccctgtcgggcggtgaagcccagcgggtcaagctggccaccgagctgagcaagcggcacaccggcaaaacggtgtatatcctggacgaacccaccactggactgcacattgccgacgtgcacaaactgacccaggtgctggatgcgctggtgcaggcgggcaacaccgtcatcgtcattgagcacaacctggatgtgatcaaaattgccgaccacatcatcgacctggggcccgaaggcggcagcggcggcggtactctggtggcccagggcaccccggaagaggtggcccagaaccccgcttcctataccggtcaatatctgaaaccctacctggaaaaaggcaaataaatagtctgaaagcccttgacggtttcgccaagggctttcttttttgctattctcccacttttccaccggcccgggagatccactcttccacttcttccagctcggcccggtgctttccgctaaactccagacggcagctgcctgcatcactccacaggatcagtgccttgaccatgccggccgaacggctcacctccacccgtcgggtgcgggtgaccttttccagagggatcagccgcagccggccgccgacccggcaaagaaggcagttttccagcagatgcccttctccgctccacagccggcattggggatggggctgctgaaaagcacggagtaaccgctctcggcggaacggatccagggaggccatctcccgggaaaaagcccgggtgccgcccagcagcatccttcctaccgccagcaacagcaccagcggcggcaccagaaagagcagtgggctctgctttgccacaaacaccaaatagcctaaaagggccgtcaatcccaggctgcacaacaccatccgcttcagttcacggcgataaaaatggcctgtgacggtcatattttcccaaaagggatcaaattctgcctgacgctctctatcccagctcatgtttcatcactgacgcagctcatagagcttgtcgttctgcatgacttccggccggttcagacggctgatcatcttttcaaaggcccgggcggcatcttccagcaccttttcttccgaaatctgagtgagggttctcccctccatggcgatctggccgtccacgatcaccagatccacatcctggcccatggcatggtaaaccagccgctgcaccggcatgacgaagggagccagatggggctgcatcacattgacggcgatgatatcggcccgcttgcccacttccagggaaccgatgagatgatccagccccagtgcccgggccggctcgatggtcaccagctccagcaccttgccgcagggcagaagggtgccgtcccgtttccggaagcgctggaacagctgcacattcttcatatcccgccacagatcaaagctccggtcgccagcggtgccgtcggtgaccaccgccagatgaatgcccatttccagcatctcctgcaccgggcaatggcccactgcgttggcatgggtggtggggccatggaacacataggggccggtgcgggccaggatctccaattcctgctggctatatccagtgctgtgggtcaggctgagccggggggtgagcacctccggggtgtgatccatcataaactgcacatcgccgccataggcgtgggtgtgcagcggcacatcataggtttctgcaatgcggtgcatctcccggttgtgacggatattggcttcgtcgctttcatcggggcggcggcccatgcgcccaggggccacaatgcacatcatccgcttgtgacggccgttgagcgtgcgcaccgcttcttcggtggtttgataagccatttccggcgtgaccacggtatcctcaaagctgccgtcctcccgataggtgcgggccaccttggggaatgcgccgtaggggctgccgatgccggacagctgccggatgccggtggccaccgatccttccaggttggcctgcaccggcagaatgctgtccactctgggcgtgctgcccaccatggacacggcggtggtggtgccgaacttcagccgctctgcggcggccagcgcaccctcggcccgccagaactccggatcggtgcaccggtaatagatggtctcggccatctcctcccagccatcatccagatgctctcccagggtgcggatcaggcaatggccgccgtggccgtgaccgtccaccaatccgggaagaatggcatggcctttgcagtcgatgactcgggcggccgtgcgttctcccagctcctccatagggccgatggcggcgatggtgtccccttccaccccgatataccccttgtcatagagatggtgctctccatccactgtgatgatgacaccgtttgtcaaaagcagatcccacataatttacggctcctttcccttttccatgatcacagatttttcttgctctgcaaaaggcggaaaaccggcttcctgcaacggctgcgccgcccgctctgggatcagtatatcatatccgcctgccgccgcctaccccggccggagagaaaaaatcgccggaatgcaaagcactccggcgacttttattcccgcaattacatattgctgagcatattcatcagattgtctgtggagaagaattcccgcagagaagaggggacatagctgggcagcagctttgttcccaggaagaggaagatcaaagtgaagaccacggtgacgatcagattcagatagaccttccggtcgggggtgaggtttgcgatgccgttgctcccggccaccaggaaaatgacgcccgccagagcgccggcgaaataatagaacacgataccggcggagatgttcagcaggaacaccaggcagctgaccagaatcacaggaaccaggatcaccgaacgcatggacacgatggacagcgcttcctggaaccgaagctgtccgcccagcagtttgcccacgccgaaataaagcccggccagaaccgcttcaaaaatcactgtatacagcagtgtgaggaagaaggcgcccacaccggagaacttgatgttctgggtcatgcttccgcccagagcgatcaggctgttgatctttccaatgcagaacagggcaaagatcgccgaacagatcccctggagcagcaggaagatcaccgacactgtcacatcgccccggcgcacatagccaggagctgtggtggccggcgccttcaccagacccaccagatccttcagcaaagcgtccatcacctgcttgccctgggccgaaaccgcgggagcggctcccggctgaggcgcagcctgctgaggtgcctgatactgtacattctgctggggtgccgcctgctgctgggcctgcgcctggttctgctgggcctgctgacaggtgcagacctcgccatcctccagtttccgtccacaatacctacaaaatgccatagaaatccctcactttctcgtttctctcttattgctctgcggtgctggtttcggatgtataccgatccacattcaccgttacacactgacgataggccgcatccaggttttcatagccggggaagtaatagctgtggccattgaactcggtgcggaaacggtcgttctgggtcacataatcccccagttccacctgaaccttgccgtcgggcgtggcgatcaggttgtcaaagcgcacagtgtaatagaaggtgacgctgccctgatagccctcctcggggaagctggccgtgctctgcacctgatagaccagatagagcatattcttccgggaattggtttcctgatccttggccaccagcagatagttgcccacataggtggcgctgtccagggaaatggcctcatcccagtcctgggcggcttcggccttgatggcgtccgcgccccgggacttcatctcttccaaggtggcgctgtccacctgctccagcttggtgagataggaacccagaccgtccacggtgtattccttctcggtggctgtgaacttgacaccgtaattttgtaggaatatcttttcccattcttcacccacatcgtcctgggcgatggacaccgtcacggtatccccattgtccagatcccgggagggagccacaaaatactccagcgcctgggcccaatcctcggtggaatcgcacaccacattcacccggccattgggagcggtgccggtgtattccagcttcacattctcaaaggggtccacttcccggatttcttccaggccttccacggtgaatttgatgtcctcataggacagcttcacatcgtatttttccaaggcggccttgtcgtcacacttccattcgtagacgacttcatccccgttggtcagctcctggtttttgttcaggctgccgctgacacattcctgcaggagcatctggcagatggactgatcgtccatgttctcccccagggccggggtctggtactcgatctttccggcgtattccttgcagaaagcctcggtatcaaaagtataggtggcattgcccatggtgtcgtagccggaaaactccacgctgacataatcccccagcttcaccttctgagggcgggtggcgataaagaccaccaccgcaatgaggagcaccagcacaccggcgccgatgcccaggatcttcttatttttcttgacaaactcggtcaaggggctgggctgaaccggtccgctgggaaccggggcctgcgccgaaggctgcaccggattctgtacaggagcgctgggagccgcaccgggctgctccggctcgatctttacaccgcaatgctcgcagaatgtggagtcatcgggaagcggctttccgcagttgggacaaaacatattttttcctctctttcactgttttctctgaaaaggtcttttcatccggccatttccgccccaccggcctatggcctttgcctatctcctcccatccgcctctctccattcccaaaacaaggacggtgcagtggtgttttccgaaaacttcgtcctgcgagtaaacatccgccttgttgcagattttctcgccgctgtgcgagaatgtaaatttttcggaaacttattatgaataattggatggtttcagtatagcacagttctgccgtgatttccatatcctttccagtaaaacctccataaagaagcttcctttccctcccattcagtaaaacaaaaaaatcccggacaaaccgtaaatggtctgtccgggatttccgtacatacaaattttattcagcctatgccgctgaccgattagtacatatccatgccgccggcagcgggagcgggaggagtgggctccttcttctcggccacgatggcttcggtggtcagcaccagagcagccacggaagcggcgttctggagagcagagcggttgaccttggtgggatcgacgataccagccttgatcatgtcgcaatagacctcgttgtaagcgtcgaagccatagcccacacgcttggcattcttcaccttctcgatgacaacggagccgtccacgccagcgttgacagcgatctgcttcatgggctcttccagagtcttcatgacgatgcgcacgccggtcttctcgtcgccttccaccttggtgaccagcttggccacagcggggatggcgttgacataagcagtgccgccgccggcaacgatgccttcttccacagcggcgcgagtggcgttgagggcgtcctcgatgcgcagcttcttttccttcatttcggtctcggtagcagcgcccaccttgatgatggcaacaccgccggccagcttggccagacgctcctgaagcttctcacggtcgaagtcggaggtggtattctccagctcgttgcggatcatatccacacgggccttgatggcttcggcatcgcccaggccgcccacgatgatggtgttctccttggtgacccgcacagtggtggcatggcccagctgatccagggtggtatccttcagatccagacccagttcgctggagatcacttcgccgccggtgagggtagcgatatccttcagcatttcctttcttctgtcgccgaaaccaggagccttgacggccacgcagctgaaggtgccgcgcagtttgttcaggatcagggtggacagggcctcgccctccacatcctcagcgatgatcagcagcttgcggccggcctgaaccacctgctccagcagaggcagcagctcctggatgttgctgatcttcttgtcggtgatgagcagataggcatcgtccagcaccgcttccatcttctcggtgtcggtggccatgtagggggtgatgtagccccggtcaaactgcatgccttccacaacttcgctgtaagtctcagctgtcttggactcttccacggtgataacgccgtcggcggtgaccttctccatggcctcagcaatcagcttgccgatggactcatccccggaggaaacagaggcaacgcgggcgatgtcctcggtgccgctgacagcctgggagttgaggcggatggcttcgatagcggtatccacagccttctggatgcccttcttcaccacgatggggttggcgcctgcggccacattcttcatgccctcacggacaaaagcctgggccagcagggtggcggtggtggtgccgtcgccggccacatcgttggtctttgtggcaacttccttcaccagctgagcgccctggttctcgaagatgtcctccagctccacttcgcgggcgatggtcacgccgtcattggtgatctggggtgtgccgtacttccggtccagcaccacattgcggcccttggggcccatggtcactttcactgtattggccagctgattgatgccccgctccagggcccgtctggcgtcttcaccataaaggatttctttggacatgatggttttcctcctctattactcaacaatggcgagaatatcgttttccttgacaatgatgtactcattgccttcgatcttcacttcggtgccggagaacttgctggtgatgactttatcgcccaccttcacctgcatcttgttgtccttgacgccagggccgacagcgatgacctcggccacctgaggcttctccttggcggagccggtcaggatgatgccgctctttgttgtttcttccgcttctaccattttaatgaccacacggtcagccagcggttgcagtttcatatgggatgacctcctcaatgataatccattcagaaatggtttagcactcattacaccggagtgctaacacaagtattataatatgccacctgcgggagtttttcaagcccccattttaaaattttttgtgaatggatggatgtggaaggaaaaaatgccatcttgtcttccttccctttccatgataagatgctctgcggaactctttgcaaaagaaaaacgccggttgggggaatggagaaccatgaatattttcattgccatcatgctgattctggcacttctgggtttgctggacaaaatggcagggggaaaaatggggctgggggccgaaatcgaccacggccttgccgccatgggcagtctggccttatccctggtgggtatctatgccctgggcatcaccgccgtacagcacagcgccggagccattgcccatctggaaaaactgctgccctttgacccttctctgctcatcggcagcctgctggctcccgacctgggcggctattccatcgccaaacagatggcagccaccccggccctggggctgttttccggtctgatcgtggcctccagcctgggctgcaccatcagctttgtgctgcccatcgccatgtcggccatcaaaaaggaagacactcccgctatgatgcggggcattgtgctgggcatcgtcacgctgcccaccggagtggtgctgggcggcctgcttctccgcctgcccctgctgaccctgctgcggaacaccgcccccatcctgctcatctgtctgcttttgtgcctggccctgtcccgtttcccccaaggcaccaccaaggccctgctctgcatcggccgcggcgtgcagatcctcagcttcaccctgtttgccctggtgatggccgggctgttcatccccgcctggcaggtggcttctctggatctggtgaacgaagcgctggtggtggtcatcaaggtcaccgtcgtcatctgcggggccatggtgctctcccatctggctctcacccgtttcagcccgcccatgcactggctggcccggaagatgcacatcagcgaaccagcggtggttggactgctgctgtgcctggccaccagtgtttccatgctgcccctctttgaccggatggacaagcggggcaaggcggtaaacgccgccttctcggtgagcggcgcctttgtattgggcggacagctggcctttgtctccagcctggagccctcccgggtggtggccatttatatgatctccaaactggtgggcggcctgtgcgccatcgttgccgctcttctcaccactcccgccgaagtggaagaataaggccttcctctcccccctttccgcaagatggatttttcagcaaagcagtgctatactgtttctgtcaccggaagggagtgaatggatatgtgcggtggtatcatctcccaaaagattgcataaacccatgtaaatagacaaaatacggaacaatatttacatgggaggaccaaaacatgaaagagaacaaatacgataacgagatctttttccagaaatacagccagatgctccgctctcaaaaaggcttgcagggtgcaggggaatggtcagaacttgaaaaaattctcccggatttctgtggaaaaaccgttctggatctgggatgcggctatggctggcactgcaaatacgccgccgagcacaaagctgcatcggtgctgggtactgacatctctcacaagatgctccaaaaggcccaagagatcaactccgcgcctcagatccaataccaatgtacagccatggaagacttgcagtttccccctgagacctttgatatcgtccttagctccttggctttccactatgtcaaagacttcgggcctttggcggaaaacattgcccgttggctgaaaaaaggcggtcacctggtcttttccgtagagcatccggttttcacttcttccggccctcaggactggtactatgatgagaagggggaaattctccacttccctgtggataactactattatgaaggcccccgcaaggccgtctttttgggagagccggttgtcaaataccaccggactttgaccacctatctgaacacattgcttcaaaatggacttaccttgcagcatatcatcgaacctcaaccgcctgctgaaatgatggacatcccgggcatgaaagatgaaatgcgccgccctatgatgctgcttgtgtctgccatcaaagactgattcttatctttgcatacaaaaatcccggaaccatcaggttccgggattttgttatcttttttaatccacaaacagttccggtgttttgggttcctggaaattggcttccagccacatcttggccttgtccaatccctcatcctcaaaaaacttggcccccaccgggcagttcttcacacaggcaaagcaggcaagacagccctcccccaccactttggggtcctggggatcgatgatctccatgggacaaagggaggcacacaggccgcagcctgtgcagttgtccttggtcttgggatgacgggaagcaccggcgccccgctctttgtagggatggttccccggcactttcaccagggttttctcccctttttgccatttctctgccgccttttcccccagctgccgggccaaagccaggtcgctttcatcgggacggcctccggccagggcgctggtgtaggtgtgctctgccacaaaggcccctgcggcaataggaacaaagccctgcttctcaagccgctctaccccttccagcagggcgtcctcataggcccggttgccgtaaaccgccagaaccaccgccggggtgttctcccccgccagatgggtcatggtctcctccaacaaagcgggcatccggccgccatacaccggataggccagcaccagcaggtcctccgggccgaaatggtagcgggccgcccgatcatcggggcgacccaaagacaactcgcccacagcgcaaccggccgattgggcgatctgctttcccacttccatagccgccttccggctgccgccggtggggctgaagctcatcacatgaacatttcccattgttcttccttctttctctattgatcctgtttttccacccgcaccccttggggcacgataaatttcatccctttccgcaataccgcctgcaaacgaggggtataggcgatctctccgtccagattgacgcacagatccttcccatcccggcggcggatctctatttcatgggccggtactcttttgatatactggggatattgatatcccagaccctttttataggcccctaccaccttggccgccgtcatacggcccactttgctcaccagaagcacatccagctgcccatcctgagggtccgcatcgggcacagggcagaagcctccgccataccaccggccattggcggcaaagatcatggaatagtctccatcgtagctcttgccatcgatgatgacctgatagccttctcccaggccccggacaatgttttccgccgccgagaacacatagggccactgtccccggcacaagggcagacgcttgtatttccgcattccggccgccacccgggcgtcgatgcccaccgacagcacattcactgcaccgccgcagttggtttccacataatccaccggcagttcttctccttttgtcagctccggcagctggaaaaaccggttcatctgccttccgaacaccttgatgaaatcgttgccggtaccggcgggaaaatggcccactgccacattccacatcccaaaggccccccgggccgcttcgttcagggtaccatcgccgccgcaggcataaaaccgcaggtgctgtccgcctccttgcaggcaggccttccgcaccagttccaccccgtggcccgggtgctcggtgaccaggatctcatattccagattctgctccagggcagctttccggcacaccccggccagttcggcctgacggccccggctccccgccgctggattgatcaaaaagatgtgtttcatcttctcttttcccgcccctcttccacagcctgtttataatacataaacagctggcatttgagcattccgttgtaaagcttccgccgcttgtccgccttggccccaaaataagtctcaaactccggatcggaagtgatgatgtattttttcagtcccggcgtctggtgcagcgcccggcccagcccgtcataaagagcccgggcttcctcctgggtggacagccgctgcccataaggaggattggtgagcagcacccctttccggccggtatagggcaggcccagggcatcggccctgcgaatggtaatcaggtcttccaccccggcccggcgggcattctcccgggccagttccaccgcttcccccgaaatatcgctggcggtgatgggcagtttctcccgcacttcttcccccaaggcccgctgacgctcttcctcccaacaggcgttgtcctcaaagagccagtcttctccttcaaaactccggcgtgctcccggggcgatacggcagcacaccatggccgcctcgatggccaaagtgccggaaccgcagaaaggatcgatcagctcttcccggccacggtaccgggtgatcttcaccaggctggccgccagagtctcccgcagaggagcctgctgggtggccaggcgatatccccgcttatagaggggtgcgccggtggtgtccagatagatctccgcctgatcctccagcagcgcaaagcggatctggtatttgaccccggtctcggggaaccaggacagattgtagctctccttcagacattccaccactgcctttttgatgatccgctggcaatcgggaacgctgtgcagctgggagcctacgcaatagcccaccaccggaaaaatgctgtcgctttgcagatagtcggcccaggagatgcttttgaccccctggaacagatcttcaaaggtgtaggccggaaaggaggccaggcgcaaaagcacccgttctccgcagcgcagacgcagattggcccgggcgcactccgccatagggccttcaaaatagacccggccgttttccgtccggaccccctcaaaatgctggtagcgcagctcgtcagccaccaagccctccactcccaacagacagggaacacaaaaggtatagttcatggtttctctctttctcctcttccctgcggcctgtgccgcatctattctttattatcgcagattttttccctcccggcaatggctccgcagcttttggaaaaactttttgcggcgagccgctgctcccattcttttctttgttccggcgggctgcatccgcccaggaaagaatatttgcttgcggcctcccgccattggaaagcgcaaaaagcggcgggctctcgcccgccgcttttatgttcggtttgatttatttgctgatgatcaggccatagccgccgttctgacgcttatagaccacgctgtaccggtcatcttcctcattgttgcggaagaagaagaactggtggtccaacaggttcatctgcaaaatggcctcctggacggtcatgggtttgacttcaaattccttcacccggatcacatcatagatgtcctcgggagcctgatcctcggccagcatctgcagttccgccggtttgtcaaaagcaccctggcgcagccgcttctccaaacgggtcttgtttttcaggatctgccgctcgatgctgtccacggcgccatcgatggaaccatacatatcatggctctgttccgaagcccggaagagcatcccagcatgggccacggtgatctcggcgatgtaccggccccgctccatggaaaaagtcactttggcgctgttgtctctatcaaagtaccgctcgagcttttcacattttttggtggcatattccttcagctcgtcggaaatggaaacctttctctctgtaaaggtcatcttcatagtcagcactcctttgttttttgatgcgctacgctctattcagttttcttggtaatattatagcacatatccaggcaaaagcgagacctttttgtgaattttttcaaaataaaaatccccgcccgaagcattgcttccaggcggggaactaagtttattccagacagatcaaagagtaaactcctggtgacgggtcacatggcagccgatgttgacggcgcagggcaggccggcgatatgggtgccaaaggccatgacccgcactttcagcgcggtcacagtgccgccccagccctgagggccgatgcccagcttgttggccttttcggtgatctccttctctaggtcggcataaaactcgtcctgagcaggagcgtccagcggtgtgcacaccgcttttttggccagataggcagccttttcaaaggtgccgcccagacccacacccacgatcatgggagggcagggattggagccggccttggacatggtgtccacgataaagcccaccacatcatcccgtgtagcggcgggagtaaacatcttgatggcgctcatattttcgctgccaaagcccttgggggccacggtgatgtggatctgatccccgggaacgatgctggtatggatgatggcaggggtgttgtcattggtgttcacccggcgcatgggatcggagaccacgctcagacggagataaccgtccacataaccccgacggacgccttcgttgatggcggtttcaaagtcaccgtccacaatgtggcagtcctggccgatctcggcgaagatcaccgccataccggtatcctggcagacgggaacttcctttttggcggccaaggcggcgttgtccagcatcttatcgaagatctgacggcccaggggggatttctcctcctccttgccctttttgaaagactcgatcacatcatccggcaggcggcagttggccgcgatgcaggcttccttcaccttttctgtgatcagcttggcagaaatctcacgcataactcacaatcgtcctttccagccggcaaagccgggttttacatgacaaaatatgacaaaacttcctatggacaacaagggtctcccatggtaagataaggctgtgagaaggagttctcacacaccgttcatatctttatccccacaaccctattcggcgcgcttttctctggaaagcgcgccccttttttgcccttttggggctcatgggctattataccatagcggcaagtccatgcagacttgcacgccgccaatgcggtgtaaaatcggctttgccgattttggctatggtgtaacatcaacagcagtcgttttgtgagcaaaacgactgaatacacagtatcctgccgcacatgtgcggcaactgttgatattataccatgaagcgaagcaacatggtatattggccgtgttttcggttgtcccgcttgcgggacgagaaaacggc

SEQ ID NO: 3857 - DNA, 32759 bp, Unknown
  16S sequences of unknown bacteria
cataatcttctgcccacatccatctcaaactctgcggatttttcgatggggacgggggatgcaacgcgtctcctttccgaagtgaaagttgtcaaattggcgactttcactttcgcaacgatagcaacgatagcgacgattgcaacggtgactttagtggtatcattttaactgttgcgaccgttgcacttcggtttaatttgttgtacagatcagctgtacacgtggctttgttctcgtatctgatgccgtattcgtctgccagtctgccgcatttgacgttcaagtactttgtcaatgcatttgccgccattccgatattgagcttttcagcaagctccgagggagagcctgtccattccggttgttccggtgtgactagctttgccaccgcttccaatacaggatcaggtggttctctgtgaagctcggtttcagttttgtccagattccatatctgcgtgttcgggtctttactcagatagagaatctggtcctgctgatcgcgtccgaccacatcaacggttgcctctaatgctgtacgctttttcttctgcatgagcagggacccgtccgcgcatccgagcaatcctgtcgtgccggagatcatctcaaagctgtcaccgacaggttgttttcttgtatgatggacgatcaaaacacagatgcaatgcctgtcagcaaattgtttgagtctgccgatgatttcgtaatcgctggcgtagctgtatgcctcaccgccaacctcgcgaattttctgcatggtatctatgatgacgagtttggtatcggggtgttcgtttataaagaaatcaagctgttcgtcaagcccgtttccgattttgcccgcagcagttgcgaagtagagactaccgctgtcttccacgccgtacatcatgaacattcgactctggatgcgctgataatcgtcctccaacgcaagatacagcaccgttccctgatgcacttcgtaatcccacagcttttttcctatgctgatgtgatatgcaatctgcgccaccaggaatgatttgccgatcttcggagcaccggcgagaatgtacgcgcccgcatagagcaagccgtcgataaccggcagtctgctttgatatgtggtttggtacagctcgctcatggaaaccgtgtgcagatagtacgggtttgccatgcggcgcatctgacgataaatttcttcaagactttcagaagaattttcgtacgactgattgatttcttcatcaaaaacgggtatactgttctcggttgaattgtaaagcggctgcccatcatctgcgtcaacagatatgtccggggcggtcgttttcttctccataggcattttcctccttcatgccgtccataatggctgcaatcatttcaatcacatccatcagctcgtcgtttacgctgcctcccgcttcaatgcgccgcagttcgtccagcacggcgacaagctggtcacgcagcgctttgtaaacccttggattgccctgtaagcgccagaagttctccttcgcggataccgcaccagtagagcatttcaaaagcgtaaaaggatagcggcttgtccatcatcacctctgcgaatttcaaatattcctctttcgtccagaacagcatttcacggttcttctttttacccatgctgcctgctttcttacaagggttctcccgtagattataatatttaaccgcatgattgaagatggcgctgagctgattgttaatagttttaagatacacaggcgagagcgattttccgttttcgtccttgtaattcatcagctcgttttgccaagtgatgatttgctgtgccgtaatactgctcattttctgcttgccaaagtacgggatgatcttggtacggatgatgtgctctttggttgcccatgtattttctttgatacgtgtctgcatatccgccgtgtactgcttcacgaagctgtcgaacgtcatatccagatcagcagtggctttgttgagttgctcacgctcccatatctgcgcttctcgctttgttttgaagccgcgcttttgtgactgcttgcgctcacctgtccagtctgtataacggtagattacacgccacgtgttcgttttatcttctttatatatagccattatgagtctctcctttccagcctatcgtagcaggctttttcctgaaaatacttacggtttactcgtcctgaaatggtcaggtatcccttttctttgagctcctgattaagcttctgcacaattttgtaagcataggatttggatacacccagctcctgcgccacttcttcaactctcataaacgattgttctgccataggttaaataccttcctttcctgattcgtggttgatttcttcatcgttgtcttttctctccggcacgctcatggcattgcctgattcaccagagaaagaatcatttagacggtcattcgattttgtgattgctttttgcctccttcaacttacaacggacattttttcggcttttgttgggggtgttgtgctgtaaactttttgtgaactaagcttatttgcttgtgttgcttctattatactatacaatttagtttaagtcaagtggtttcaagaaaaatattaaacttttttgctttatatcagcttgacaactctaaacatatatgctatactgattgtcaaagataaccgacacaggagatggctattatggcgattggagaacgcattcactttttccgcatattgcggggcatgacacagaaatatctcggtatggcgctgggctttccggagaaatccgcagatgtacgccttgcgcagtatgagaacggttccagaaccccgaaagcggatgtaaccgccgcgctggcagaggtgctggacgtttcgcccaaggcgctggacgtaccggatattgattcttacaccgggctgatgcatacgctttttaccttagaggacagatacggacttgaggtctgcgaaagtgacggcgaggtgcatctgcgcgttcatatccagaaaggacgcgatgcagcagagcttcacaggatgcttgccgcatggggtgctgttgccgcaaaactgaaagcaggtgagatcacgcaggaggaatacgaccgctggcgctattactatccgaaatacgacacctccggtcagtggcataagattacgccgtcgcaagaactgagcgatatgctcgtttcagaactcaaagaacacactgagaaataaagtaaaaagagctaactgacttaatctaaatcagttagctctttacttacgaataatgaaattttgttgccaaatcgttgccacgacttcgcaaaagcaaaacttttacggctctacagccgggaaagtgaccttacgaaatcattcccactccacagtagccggcggctttgacgtcacgtcatagaccacgcggttgatgtgcttgacctcgttcgttatcctgttcgagactgtcgcgaggatgtcgtaggggatgcgcgcccagtcggctgtcatgaagtcatcggtcgttaccgcacggatcgcgagaagatgatcgtacgttctgtggtcgcccattacgcctacggtgctgacgccggggagcacgcagaagaactgtgccatctcgcgctcgtagccgtttttcttcatctcgtcgcggagcacccagtctgcctcctggagtatctttaccttttcagcggtgatttcgcctatgattctcactccgagtccgggtcccgggaacggctgacgccatacaagctcatccggtatgccgagctgctttcctactctgcgtacctcgtccttgaaaaggcttgcgagaggctctataagtccgacaaactttacgtcgtcaggcatttttaccttgttgtggtgggtctttatcttgtcggcgttgcccttgccggattctatgcagtcggggtagattgttccctgtgcgaagaacgcgtcgttgccgccctgctttctaacttcgtcccagaacaccttgtagaattccgttccgatgatttttctcttctgctcggggtcggttactcccttgagacagtcaagaaaatgctgctggcagttcacgcggacaaagtgcatatcaaacaggctcgtgaacgtcttttcgacaaaatcgccctcgtccttgcgcatgagtccctggtctacgaacacgcacgtcagctgatctcccaccgcacggctgataagtcccgcagcaaccgatgagtcaacgccgccggaaagtccgagtattaccttcttgtctccaatctgctctctcagcgccgcgacagtgtcctcgatgaaggagtccatctgccagtcgcctgcgcattcacatacgttgtagaggaagtttttcagcatcgcgttgccgtacctgctgtgtgtaacctccggatggaactgaacggcgtacagctttttctccgcgttttccatagccgcaacagggcagttgtcggtggaagccgtaacctcaaagccttcgggaaggtcgcttattctgtccgtgtggctcatccatactacgctgtccgccggaacgtccgtgaaaatgagcgacgagttctttttaacgtgcagctctatcttgccgtattcggaggtctccgccgtaactactgaaccgcccgccatccagcttgtgagctgcgcgccgtagcagattccgagcaccggtatgccaagctccagtaccttcgggtcgtagtgaggggattcggggtcgtaaacgctgttgggtccgcccgtgaatatgatacccttgtatccgcggcggcttatttcttcgggggtaatggcgtcgaactgctcaatttcggcatatacgtgaaggtcgcgtactctgcgtgctatgagctggttgtactgaccgccaaagtccaaaaccagaattttctgcataaaaacattcccttgttaatttataatctatagcctatattatatcacacaaaacggcggattgcaattgttttacgcagaaatagcaaaaggtaatcccgagttgaatatttcgacagtctccctcgccgtgtctaaaaaataaccttttgttaaaatctcactgtagaaaagaaaatgggcgcgatggtataataataaagtaaattatttaactaattcagaggcttaattaatgctgaatctttcaaaaatcaagaaggtgtacccgtcgggcaacgtcactgcgcttcatgaagtctcgctggcgttccgtccgaatgagtttgtttcgatactcggtccctccggctgcggcaagactacgcttctcaatatcatcggcggacttgaccgttacacctccggcgagctatacgtcagacacaaaccgacggcttcgttcaccgaccgcgactgggatacgtaccgcaaccactcgataggctttgttttccagagctacaacctcatccctcaccagaccgtactcgcgaacgtggagcttgcgctgactctctcgggcgtatcgaaagccgaaagaagaagacgtgccgaggaagctctccgtgcagtgggtcttggcgaccagatgaagaaaaagccgtcgcagatgtcgggcggtcagatgcagagagttgcaatagcgcgcgcacttgtgaacgaccccgatattctcctcgcggatgaaccgacgggcgcacttgattccgaaacttcggtgcagataatggacatactgcgcgaggtggcgaagaaaaagctcatcataatggtaacgcacaacccggagcttgccgagagatattccaccagaatcataaagctcctcgacggcagagttatctccgactccgacccgtactccgaggaagaggaaaaagcggaaaaatattccgaaagcggcgcatatttatccggagacgaaactcacgaggaaatctccgcggagaaggcaaagaaaaagcgtacgtctatgtcgttcggaacggctctcgggcttagtctcaataacctcatgacaaagaaagcgcgcaccattctcacagcctttgccggaagcatcggtattatcggaatcgcgctgatactttcgctttcgaacggaatcaacgtgtatatagataaggttcaggaagacactttgtcggcatatccgcttgaagtaacgcgggaaacggtcgatatgacctccatgataagcgcgttcaccgaagcgagagagtccgctgacgaaaagccggtcgacggagttatcaagtcaaacaccatgatgtacgacctgatggacaccatgacgagcattgacgtgcagaaaaacaacctctccgacttcatcgactacattgacgcgcacgggggagatctcgacggctacgcttccgctgtgacatacggatacgacgtgccgctgtatatttattcgaccgacgaaaaagacgacagcggacttcccgtgaagctcaacccctcggatatgttcggcgcgatgaattccgcaatggcgtcgcggtcgaattacgcatccatgatgaccgtcaacgtgtgggacgagatgccgtctaacatggatctcatccgcggacagtacgacgttatcgccggcaggcttcccgacaaatacaacgaggtagtcctcatcgtcgacgagcacaacaaaataaacgacgtgtacctatacgccctcggattcaagccgcaggatgagctgaaagagattatgactgccgctcagaagggcgaggagatgaacgttcaggcagaggaattcacctacgacgacttcataggacatgagttctcgctcctcaccgcgtccgatatgtacagaaagaacggcgacacatgggaatacgccggagacaacgaagtctacatgaacgcaaaggtagctgacagcgaaaagctcaccatagtaggcataatccgcccgaatcccgaagctgtagcaacctcgttaaacggcgcgataggctacctcccgtcactcaccgagcacatcatgaacgcggcggacagctccgacatagtaaaggcgcagaaggctgacgagggcacggatattctcacctctctcccgttcctcacggatgaaaacgaccccgcaaacatgaccgtcgcagaaaaagccgaagccatccgcggcaacatcgacagcatgaacgacgcggaagcagcagtggtgtataccgactacatggctggactttctgacgaggacgcggcaaacatggcacagtcacagctctcgtcgatgacaaaggacgaggtgaacgcgcttgttgtgtccgctatgatgcaaagtcccgaggcgcatggcatggacgagaacaccatcgcgatgtatctctccaccatgtcagaggaagacataaactcgatagctttgcaggctttgacggcggcaattcaggctcaggcgaaggagagcgcggaatcctcactttcgtcctccacctcggaagagcttgccgcatcccttgacgcagtgctttcctccatgacggacgaggatgtagtgaagaccttcgccgactatatgccagagacggtatcggacagcacgcttaaggataatttaaagctgttcggacaggcggaccgcgacgacccgtcatatgtcctcatctacgccgacacatttgcgtcaaaggacgagatatcctcaatgatatccgactacaacgcgcagaagacaagcgaaggcagggaagaggatgttatccactacaccgactacgttgcgctgatgatgtcgtccatttccaccataatcaacgtgatttcgtatgtgcttatcgcattcgtttcgatatcccttgtggtgtcctccattatgataggcattataacatacatttcagtgcttgagagaaccaaggaaatcggtattctccgtgcggtcggtgcgtcaaagaaggatatttcccgtgtattcaacgcggagactctaatcataggcttcacggcgggtgcaatcggcatcggaataacgctcctgctctgtattcccgcgaacattataataaagagccttacggatatatcgaacctcgcacgtcttcccgcggtcggaggagttgcgcttgtgctgatatcaatgcttctcacgacgatatcgggacttatcccctcccacctcgccgcaaagaaagaccccgtagaagctctcagaaacgaataaaaatatacccgaagcggcaatccttcattggaaaagtcacttcgggtattttttacagaattttttccatgccgattttctgcactctcagtcctatcttctcgtaaaaaccgaccgcgctgacgttatccgcccagacattcagcgtgacgttgtagcagccgttctttttggcgaagtcgaggacgtactcgtacagctttgtgccgatatgtccgccgcgagcattttcgtccacgcataggtcgtcgatgtagagggattttatatcggtcatgctgctctccggcgggaactgtttgaagatgcagaaggcataaccgacgacctcaccgtcacggacagccgcgaaaacaggctttgtatcatcgtggagtatctccttcagctcggcggcggtatatttttttactcctgccttaaataaatccgggcgcacatcgctgtgaaccttgtgtacctgaaaaagcagcttttcaagagcgggaatatcgtcctccgccgcacgtcttatcgtaatatcactcattattttttccttatctgtattaaagctataacctctattatgccgaaaaaggcttgccgtccgataattaaccatggacaacaagcctttgtttttatttcagcgtcagttcgggttcgccatcccccgtgatgcagccctcggttatcgtaaccttcgctacatcatccctcgagggaagagcgtacatcaggttcgtcatcgtctcttcgaggatggaacgcaacccgcgcgcaccggtgtttctctcaatcgcacggttcgctacagctttcagcgcttccggcgtgaactcaagctccacgttgtccatctcaaacagcttcttgtactgctttacgagacagttcttcggctcttcgagaatgcgcacaagggcatccgcgtcaaggttttcaagtcctacgataacgggaagtcgtcctacaagctcgggaataagtccgaactttacgatatcgtgcgcggaaacttccttgaatatgttctccttgcgcttttcttccttcttctttatctcgccgccgaagcccattacggactgacccttgcgctgttctataatctggtcaagtgtgtcgaacgcgccgccgcagatgaagagaatgttctccgtgtttatctggatgaattcctggttcggatgctttctgccgccctggggaggtacgtttgctaccgttccttcgagtatcttgagaagcgcctgctgaacaccctcgccggaaacgtcccttgtaatcgagcggttttcgctgcgtctggatatcttgtctatctcgtcaatgtatatgattccgcgctccgcaagctctacgtcgtagtcggcagcctgaatgagcctgagaagaatgttctcaacgtcttcgccgacatatccggcttcggtaagcgtcgttgcgtcggctatagcgaacggtactttcagggtctttgcgagagtctgcgcgaggaatgtcttgcctacacccgtcggaccgatgagcagaacgttgctcttctgtatctcaacaccgtcgtcagcgacagcttctgcggagtccttcttgttcttcgcggcgttttccagcttctgctttgcgtccttctggatgagcctcttgtagtgattgtaaaccgctacggaaagcgcgatttttgctctgtcctgtccgatgatgtactcgtcgagagtcgcttttatctccatcggcttcgggagagactgctctgcgagggatgcgtgcgcgccgccttcgttttcggctgaaaaatggtcgaaaatgatgtcgttgcacgcgtctatgcacttgtcgcagatatataatcccgtaggagagggaatgaggaattcgacttgatcttcactcctgccgcagaatgagcatccgcgttcaaccctcatacgtccgttgttctttgttgttgccatgtagggagtccctttcagttaatggattcagggtctgcgctcgataaccttgtcaataagtccgtagttcatcgcttcctcggcggacatgaagttgtcgcggtcggtatctttagcgattacgtcaatgggcttgccggtgttcttcgcgaggatggagttgagggtgtctctggtgcggaggatgtggtcggcgtgaatcttgatgtcggtagcctgaccctgcataccgccgagaggctgatgaatcataatctcactgttcgggagagcgaatctcttgcccttagctccggatgagagaaggaacgcacccatagacgccgccatgcctatgcagatagtggagacgtcgcatttgatgtagttcatcgtgtcgtatattgccatgcccgcggtgacggagcctccgggagagttgatgtagagcgcgatgtccttgtcggggtcttccacttcaagataaagcatctgagcgactacaagggaagcggtaacatcgtttacttcatccgcgaggaagattattctgtcgttgagaagacgtgagtatatgtcgtatgagcgttcgccgcggcttgtctgttctactaccattggtacaagtgccattttaatacctcctttgtacctgttatcaaaaattgcataaaacgtttactgtatattatactgcgggaatatagcggtatatgcggaaatagccaaaaccgccgcgtgagaaagatatcccggcagcggcggcgtttaagcattaggtgtaattattcggcgtcgtgagtgtgttcgtcgtgttctacttctgtaacgactgccttttcacgaacgagctcgatggctttctttaccttgaggtcttcagcaacagcttcggcgtcaacaacttccttaaccttgccttcttccatgccgtaaagctcagcgagacgcttgtattcgtctgcgatttcttcttcggaaacctggagattttcgagagccgcgatcttttcaagtgcgagacgtgtctttacctgacgttccgcatcgggtctcatctgtgctctgagcttgtcgagatccatgccggtgtactggaagtatgtcttaaggtcgagaccgttcattctcagtctgttgtcgtagtcgcgaacgaggttttctgtctcgtttacgtacatgcattccggaatgtcgccctggagcttttcgatgagagccttaacgagagcttcgtcaacatgggagtcggcgtgcttttcgtgagcttcttcagccttcttctttatgtcggccttgtactcgtcaagtgtgtcgaattcggatacatcctttgcgaaatcgtcgtcgagagccggaagctcggtgtacttgatatcgtggagcttgcacttgaatacggcttccttgcctgcgagttccttagcgtggtaatctttggggaaggttacgttaacgtcgaattcgtcgcctacggagtgaccgcaaacctgatcttcaaatcctgggatgaactgaccggagccgagcttgagctggtgtccctcagccttgccgccttcaaagggaacgccgtcaacaaagccttcaaagtcgattgtaacgaggtcgtccttctgtgcgggacggtcgcttacttcgatcatacgggagttacgggtctgtactctcttgagttcttcttcaacttcctcgtcggtagcgtgggaaacgggacgttctactgcgattccgagatagtcggaaatttcaacttcgggctttgtgaagtatgttgcggaaagaacaacgccgctttcatcaatggaaacaacgtcgaattcgggacggcttacgataactctcttttcgtcagcgacagcggaggtgtaagcgtcgggaataacttcgttgatagcgtcttcgtagaatacttccttgccgtacatcttttcgatgatagcgcggggagccttgcctttacggaatccggggatagtgatgttctgggatgatttcttgtataccttgtttatcgctttttcgaaagtgtcatgatcgacgtcgaacgtgattttctgctggttcggagcgatagtttcctgtgatttcaggctcatgtttctgtatctccttcaaatttatgtaacttaataattttttttgatattttcgggtcaaaacagccgtgcggacacaaaaaaacaaagttataccgcatagctttctatattttacaattatttaatacaaatgtcaatgatatttatggggaaagtatttgaattttctgtgaatgagcggctaaaacactcttttcgggtaaaaatcgaggtagtcggaggatattatttccatttttatcccctcgtattcaaaacaaggcggcgcggagcagtttccgtggatgtgtccgaaaaatacccgctctataccgtactcatgaagaacgtccactatgggtctgcacacaaaatccccgaaaaccggcggaaaatgcaggaaaacatatatcatgcagtcgtgctcttcgcgtatcttctttcccatgtcgagcgagcatttcagccgtccgcactcacgggagactatcttctcgtagtccgtgtcgaatatcttcccttgcagcttcggctcgacgtaccacccgcgcgatgagcagattattttgtcctcgacgagatacgcgttgttgtgcatgacggatatgctctttatcccccagttttcaaacgcggcgagcatctttttttcgcttgcccaccagaagtcgtggtttcccttgccgatgagctttctgccgcgaagtttgtcgagaaacagcatatcgctccttgcctcgtccagttttaatgcccacgaaatatcccccggaaccacaacggtgtcgccgtcctcgatgagggaattccatcttttctcgattttttcgatgtagccctgccatcttgagccgaaaacgtccatcggtttgttcgtctcggtcgagaggtgcaggtcagccataacgtacagcgccattataccctgaaaacaaggtcagccatctcgtccttgcgaatgacctcggtgaatctcacgtcgagcttttcggcggaagacagcggagtgggtatctcggtttttgttttctcggagagagcggagagcgttttaaaaatgctgtcgtcggtcgggcatcctatagcgtcgcatactgccggagcgaacttgtacggacttgcggtggaggcgagaattgttttcttcacgtcccctgtgtcgagtcggaattttctcacgcatccgagacctacggcagtgtgcgggtcgatgagatatccgtccttttcccatgtgtggcgtatctcttccttcgtctcgtcctcgtcaagggagtaggcggagaagtattttctaatctcgaacatgagactgtcgggagcggtgtattttccctttcgcgagagctgttccatgaggtctttcgtcatttccgcgccgccgagggtgtagatgagacgctcaaggttggaggagacaagaatgtccatcgacgggcttatggttttgtagaactcgcgggttctgtcgtaaactccggtgttgatgaagtcggtcagcacgttgtttgagtttgacgcgcagatgaagcggttcacgggaagtcccattctcatggcgaggtatgcggcgaagatgttaccgaagttgcccgtgggtaccgcgatgttcaccttgtcgccaagctcgatctctccggacgcgcacaggtcgcagtaggatgagatgtagtaaacaatctgcggaacgagtctgccccagttgatggagttcgcgctgccgaagatgaagccgttttccgccgccttttctttcagcctctcatctgaaaaaatgcgctttacgcctgtctgagcatcgtcaaagtttccctcgaccgccgctacatatacgttgtcgccgagtgtcgtctgcatctgtctcttctgcatctcgctaacgccgtctacgggatagaatacggtaatcttaactccgtcaacgtcactgtagccctcgagagccgcctttcccgtgtctccgctcgtcgcgacaaggatgtgtatcgttttgtcttctcccgtcattttcagcgcgcgtgagagaagtctcggcatgagctggagagccatatccttgaatgcagacgtcggaccgtgccacagctcgagcgaatatacgtcgtccgacagcttgtgcatgggcgcgggacctccggggaaccttgcctcggaataagcctccgcgcagtcctcgtaaagctcgtcaaggtcgtagtcgtcaaggaagcgtgagagaacaagcgcggctctctccgggtagttcatgtgaatgagcgcgtcaaaatcccctgcggaaatgcgcgggaagacgagcggtatgtaaagtcctccgtcgggtgcaagcccttcttttatcgcctcggcagacgtaacggagcgcgggtacaaatcggtgtctcttgtgctgatatatttcatcataatttataaatcctctttatttgctcggcagatttttcttcatgaattcgtatgcggtgtcaaaggttatctcgtcaagctgtctctcgctcattccggcgccgcggagaaggttgacagctttctgtatctcgtcaagaccgcttattccctcgggaaggctcgtgccgtccatgtctccgccgaagcatacatgagaggggaagagctcctcgtactttttgaaatggggaactatcacgtccagcgcggctttgtcccctcttttaaatcctgcgacaagatggggcgggcagagcgatactccggcaacaccgccgagctttgtcagacgcatgaatctctcgtccgtgaggttacgtgaatgggggcatacggtgtaggaattcatgtgggtggcaatgggagacacgccgcatttttcgcatatgtccattatgtcgtcggctgacttgaacgaggcgtgggaaatgtccgggataatgccgacctttgccatctcctccaccgcagccttgccgaagtctgtcagaccgttgtccgtgtcgtgagagccgccgatagaggtgtccccgccccagagaagcgtcattacccttactccgaggtcgtacagctcgcgcactctttcgatttttccgtcaagtatgcgtgagtcctcgacagtgagaaccgcgccgattttcttgtcggaattataaaacctctcaaggtcggcggaggaataaatcatctccacaccgtatttttcgcattccgagaggaagttttcgcgtatcttcaaaaactgctcgtagcctgcgttgtcgtcaaggtctgggtaggtgaaaaccgcgaacagctgaacatacttgtcaaatccctcggcttttttcagcgaaacgtgacagtcgctgtcgtataagctcttctttccgaggaaaatttcgtccgccgtgtcgcagtgcagatcgaaaaatttcattatatcatgcctttcaaattaatatctgttcttcttcattgaaaacttgccttgttttctgaccgagttttcagtgtgtacgatgtcgagcgtgcggtaggcgtcgcttttcgggtcggcgtagacttcgataacgtctatcctgactgtttcatcggggtttgagcgcatatattcctctgccgcacgaacgagatacgcctgcttcttttcgtcaacggcagaacccgcggtagagtaaaagcctgcgccagacggattcatacgccttgtctttacctcgacgaaaaccacagtcccgtctcttgtgtcgcgcgctgtaatgtctatttccgagtgacctatccttgtgcggcgtgagataatctcgtacccgtgctttgcgaggtatattgccgccgattcttcacccgcgatgccgaggtcatagcttttcatttttttccttttctctcagagcgcgctccagcttttccctgtccttttcgagaaagccgaggaagctctttcggtgaatttcgcacggtccgtattcgtataccgccagcttgtgctcgggagtgggatatcccttgtgctttttgaagttgtaacatggatatttcccgtcaagctccgtcatgatcctgtcacgcgtgacctttgcaagcaccgaggcggcggctatcgactgtgaaagcgcgtctccgtgaaccacaggcagggaatatactccgaaatccgtatttctgttgccgtcgacgaggattatgccggggtttaccgtttttcgtaccgtgtcgaccgcgcgtctcattgcgcaaagggaagcggcgagtatgttcatctcgtcaatttcctccggcgagcacagcgcgataccgtaagccacagccttttcgcatatctccgcgtacagcttttctcttttcttttcggtgagcttttttgagtcgtcaagtccctcgataacgcatccctcgggcaatactacagccgccgccgcaacgggtcccgcgagaggtcctcttcccgcttcatccgtgccgcatacaggacagtattcaagtgagaattttctgtcaaactccgcgtcaagcattgtctccctccgactgctttgtgctttcctttttcgggggcagctcaagcgttatcctgcctatcttagcctcgcggaattcgtcaaggactatgcccgccgctctttccgtgttgagttcaccgcccgagagcaggaaaccgcgttttttcgcaacggcacagagaaggtcgtagtcgctcagtccctcaagggaggaggggtcgagcttgtatctcgtgcagaaatccgcctgcgctatggtgtacagcttcccgcacagctttgccgcaagctcttccgtgtcgagtatggcgtcccgtatagcgccggtgaaagcgagattttctcccgtggttctgtcgtcaaacttcggccagagaacgcccggcatatcgagcagctcaattccgatgtttgtcgtgacccattgcttcgtcagcgtaacgccgggtctgtcctctaccttggctttctttccgccgccgagcttgttcacgagggacgattttcccacgttcggtatgcctactatcatcgcgcgtatgtgcctaccgctcattcccttgtccgcgtatctcttgagcttttccgagaggatgtcgcgcactgcgggggatatgctctttacgccctcgcctgttatggtgtcaatggcaagcgcgcgacggtctgtctctgtggaataataccttacccatgcgctcgttgcggcgggatttgcgagggatgactttgtcagcagagtaaggcgcggctttgttctcgtgaggcggtctatctcggggtttttggagcttttcggtatgcgcgcgtcaagaagctctattacaatgtcgacctgcgagaggttttccgagatgagacggcgggttttcgccatgtgcccggggaaccactgtataggctttgatgtgttctgttccattatatttcctttatatcttctttataaatattatttccgcactctctccggggagaaaaagcgcgcctgaatcggtgtatccgagccgcctgtagaaaaactgcccctcttcatcggcgagagtggacgtcatgaccgtatcatatccgagagcgcgcatttcactctcccagaacgataccagccttgttccgtttcctttccgtctcgctccgtcgaggaagtacagcatattcataaacggcgtgttgtcccagaataaaccgtagcgaagccatcctatgatgctctcccccgccgtcatgactattatccgccgccgctcgattatgtactcaagctcctcgtgggatatgtggtcgagggttttcagtatttcaaggtcgcttttgcgtgcgtatcttatttcactcataagtcaattacaatgccgtcgagagagcagatgtatctcccgggcagtctttttttgatgaagtcgagcgcacctctgtcgttttcggtttcacgcccgacgagaactcccgcgataaggcatgacggaagcccgaatattacagctgattcacggtcggtcgtcgcggcgtttcgattgtaccgcagtgtcagaaacttctcgtaaaatctctcgtcgaggaaatatttcagcacttccggcgagagtgaggtgtcccatacgtcgtgcgacgccatttctttcgcttcgggtgaggtcacgtcaaggatgaagcctatctgcaccttcggggagacaaggctcggcatgaagcgtacttcctttgtgcattctgcccggtacgtccatatcctctcgtcgctcatgagcccttccgttacctcgtcgaatttgcggtacggcacgagtactgtacagtcggtgcatcccggtccgcgtccgatggaataggtcagtgtaactccgctgtattgcagtacgtattcgccgagagtgcagtcttttcggaggttccatactcccacgctgttttttatcttgtgcgtggtggtttttctcgtcatgtcaacgggagtgaagccgttttccactacccagtcgaatgcggaaaagtctccgtgcataccgggaatgccgtgcagaaacgtacctcggctcagctttaccgtgtccccgacggaatacgagtgagacgctttcacgttgcaggagtaaaaccgctcgatttgagcaagcatcagcttccgcgcctctccgtcaaagctttcccttgcgtgagcggtgaattcttctttctttcccatatcagttgtcaaaaggattctttaagagtccgaactttgacagagggtatattctcgcgacggcatgacctacaatgcatctttcgtcaacggtctgaatctcttcctgacggctgtctgcggagtggttgcggttgtctcccattacgaaaatttctccctcgggtacggttatcgggaaggggtattcggcggtgagcagggatgaggtggggtcgacgtatctgtaaggctcttccactacctctccgtcaactctgagcgtccatgtggcaaagtcgatgtcaacagtctgtccgccgaccgcgataactctctttacaatgggttcgttgtagggagcggcgtttattttgtgaaccactacgatgtctccggctttcggcgtgtagcaaaggtcggatactatgaggtactccttgttgtggagagtgttcagcatggagttgccgtccactatgttcagtcttacgagaaacgcgaacattagcattacaaatatagtagtcgcgcctatcatctccgctacgtcgtaaatcgtgccgaggactgtggttttttctttcggtttggtgttttcttttgccattttacgctccttttattatgaaagttcggctgagagctttgcggcttcctttgcggagtcgtcggcggtcagtatctgcatgaggtcgtgtccgcgcgggatgtaaagtccggtcttgcggcattcttcctcggtgtagctttcgatgttgttatgcttctcgctcctgctgtcgtagatgaagaacggaaccggctccattgagtgagtgcgaagctctatcggggtgggatggtcggggagaaccataatcttgtagtcctcaccgctctgtgagagatatttgtgtacaacggagagtatttcatggtctattcgctcgattgcggcggtctttacgtcggcttctccgcggtgtccgcattcatcgggagcttcaacgtgaacataaacgaggtcgtggtccttcagcgcatcaattgccgcctgtgccttgccccggtagtttgtgtcaaagttgcccgtcgcgccctcaacttcgataacgtcgcagcccgcgcagattccgatacccttgataaggtcgactgcggagatgatggcgcatttcagtccccatttttcactgaaagaggggagagcgggcttctttccgggactccagagccagggggagtttgcgggacgctttcctctgcgcactctctcaaggttcacgggatgacggtcgagtatttccgcgccgcgcttcatgtattcgagaaattcttttccgccgtcgtcttccttcgggagataatctccgataacacggtcgagaatgtcgtgcgggcgtgcgaagttgtatttgtcggcggcgtttttccagataaggcagtggcggtagcttaccccggtgtaaaggtgacggccttccatcggcatagcttcgttcagtgctttgacaagctcgtcggcttcttccgtcgttatctcgtccgccgagtggtcaagcatcacgcgcgtctcgtaagggtcgtcggaagtgccggagagcgtgacaacgttgcatcttattgccgtgtcgtcgggcgccatttctatgccgagactcattgcctcgagaggggagcgtccgtttgagtatattttcgggtcgtaggagagtatggcgaggtttgcggtgtcgctctcgggtaccatgcctgcggggacgtttgatacaactccggtgagactgctgtgcgcgagagagtccatctcaggcttgtcggctttttccatgggagtgtgtcctccgagcgcggggtgctttctgtcagccattccgtccgggataagtataaggtatttcataggtatgtcctgcctttctgatgcagttggaactgccgtttaaaaccgcggctaaagcgaaatgcaataacacgctaaaggaatatgttatatcaagattaaattataatacgacattataataatgatattatatcacgataaagtgcgcggcgcaataacaaaacgaaaaaatacgggagtaaatacggcgaaatcacagcgcggcgggaatatatttttgggaatattttttgaatgaatttcgccgaaaggtattgcaatcggggagaaaacgtgataaaatcttagagtgtatgatattgtccctctgcgtaccctctcaggcgcgaaggactttgatatacgaaatttcagtcgtataaattttatagggagacaaaaaaatgccgaacattaaatccgctaaaaagcgcgttaaggttatttccgtaaagacactcaagaacaagatggcgaagaccgccctcaagacaacaatcaagaagttcaaggctgctgttgaaagcggtgacaaggaagctgcaaaggtagcttacgccgcagtagttaagagcgttgaccaggctgttggtaagggacttctccacaagaacaacgccgctcacaagaagagccagtacacactgatgctcaacaagatggcgtaagtcttttaaaaagcaaaaaacaaagagctttgatgataacccacatcaaggctctttttgtgtttgtatttacttaagtacggttaaaatttctttatccagcggtagcggtttacctttaccacggcgacaaggcattttataatctggtcggatttcagcacgatgaatataagcaccggggacagctttaatacaaacgccgcgatgaacgagcaggggagaactatgcaccacatgaatattatatcgttgtagaaaacaaagtttgtgtctccaccgccgcgcactataccagtgagacaggtcatttgatacgccgtgccgacgactgtcaccgagagaaccgccatgaactgcatagcaagctcctttgtctcggcggaaatgtcgtacaggcttatgatgaatccgcgggaaaagaatatcgccagacccgtgaccgctcccattgctatgtagatgagctgcatacggctgacgcggtgctttatctccgttttaagggcagagaacgcgtcctcttcgctcatttcctcggtcattgtccgcgcttctccaatcgtcttgcctatcatgacggaggaagcggtagccgcgccgtagatgaacacggacattatctggaataccgtagacgcgatggagtttgccgagatgacggggtcggtaagccttccgagaatggcagtctggagtgacattgcaattccccacgatgctcccgaaaaaacaacgggcaggctgaccttgaagaactttttcgatatctcgcggtcggtctttatgaagtcggaaagcttcagcttcagctttttgtcgaagaatgcgatgtacaccacgattatgacaaactcaactactcgtgaagcaagtgtggctatggcggctccgcggattcccattgcaggcgcgccgaagtgaccgaagatgagtatgtagttgagcacaaggttgacgacaaacgccgcgcatgagtttatgaatccgatgaacgccgtctcaacgcttcgcagaatgccgaggagcacctgtgtcgccgcgaagaacatataggtgaacgctacaataaagaggtatttttctccctccgcgataacgtgaggcttgtcggtaagaagtccgagcacctgcgtcgggaagaagagcaccgcgagcatcataacgcccgagacgataagcccgaactgcatcgaggtagctcccgcgcgctttatcttgtccgtgtcgccttccccccagtagcgagagcagatgacgaccgttccgtcggatatgcttccgcagatggattggagaaggaactgtatctggttcactatgaaaacgccggatatggcaagctcagccgccgccccgagttttcctatcataatattgtcaagcaggtttacgccgtatacgatgatgttctgcgcggctatggtgacaagaagtcttacccatctgtgccagaactcacgccggcttgcgtctgttgacagctctattgttttttccattactgtacttccttatctgaaagcgttctcacgcgagctttttatacgggatatgtttatcgcgccctcgggtatggaggagaggttgtcaaggctctttcccgtgccgattgctacacaggataccgccttgtccgctactctcgtcttgattcccgtggcatatgctataagtctgtcaagtccgtagagcagacttcctccgccggtcatgacgattccgtttgagaggatatctccgataagctcgggaggtgtgcgctcaactacggagcatacggcttcgattatcgcggtgatcggctcttcaagcgcgtccggtatctcgtcggagtttatccttaccactctcggcagtccctgtatgaggcatcttcccttgacctcgagtgtgcgcggttcttttctcggccatgcgcatccgatttttatcttgatagcctccgctgtcctctcgccgatgagtacgttgtgcttccgtctgacgtagcgtattatagcctcgtcgaacttgtctcccgcgacctttatcgactccgagaccacaactccgccgagggagagcaccgcaatgtccgtagttccgccgccgatatcgaccaccatatgaccgttcggagcagcgatgtttattcccgcaccgatagcggcaggcacaggctcttctatgaggtacgtcctcttagctcccgcctgagttgccgcgtcgactaccgctctctcctccacttccgttatgccggagggaacgcagattattacgcgcggcttgaaaatcatcgtaccgcacgctttttttatgaagtactgtatcattttcagagttatctcgtactgacttatcacgccgtccctcagcggtcttatggcggtgatgtttccgggcgtccgtccgagcattctctgagcctcgcgtccgacctttatgatcctgtcggtgtttttgtctatcgcgactaccgacggctcttttatgacgattccgctgcccttgacgtaaacaagcaccgtagcagtaccgaggtctattccgatatccttgcccatctatataaattcctgaccttgttctatacaaaataataataacttatcattctacattatactacaaggatatctcttttgcaaggaaattttatattaattttaggaagccttttctatcgtcagcgagtcgaggacgggcaggcagtagttttcgtagtaattcggctcgtcgtcgtcatacacaaggaatgtcataaacagcttgttttccgtgtgggggacgttcacaaaaatgtagtaccatgttacgccgagagttttctcaccctccgatactccgcgtgaagtgtaccatgtgtagtcgtagctctgcgctgttgttccgatacctttgtttgtcgtgttcattccgtcggagcttacgtcaaatccgcggtatatctcaaatctctttgtggcatatcttgaatcgagtgtgcgcggtatgtcggaggctatggtgtagtccatctcccatgtgtcgggcagagttacgcttgcatcgtacaccggagcgtcgtcggagtcgtattttcccacctctatcgtgtattcgagcgcgctgtcgtcggaggagaggtatattctcgcggagtcaagcatcggcttaaaggcttctttccatacgtcggtttcgtttccgtcgtcgtccgttattttcacgccgttgtcggagaacaccatagccgccatcttgtcctcacttaccgcgacaaatccgcagtacagtgtgaagcggtgcgacgactcgtagacctgtgagtaaacgtcggcttcggtcttgtagaaggtgtagtccgtgctgtccgctgtcttgcccttcataatttccgcggagctgaggtcgaacgagccttttttcgtgacaaaggagagcgcgtcgccggcaatgcacttttccgatatgccgtacatacatccgtcaaaccagccgtagagcgagccttgcattgccatggggtcgacgtaatcggtgttctgcactatcgtcatgtaggtgggaacattgtcgaatatgacagcgccgagaatttcgtttgccttttcgggttttattccggcttctccgtagtccttgccggtggaggaggtgagatagtatacctcgcttttctgactgcaaaggtttacgtttgtcttgtttatcggcggcgtcggcttgctttcttcttctgtttcagtctcggtttccgtgctttcctctacctcaaagacatggctttcgctctcgtcctcggagggaacagagaacgtctcgtcgggtttttcgagcggcggagtttcatcctgcaatgttactttttcctttgcgcaggcggagaggagcaggagtgagagtacaaggagagctgttattttcgttttcatcgtaaagtcacctcgctttttttcatttagacgagattttttccgcgcgtgttccgataacgtgaagattttttcatgatttttccgtgaaaattcaccattccgtcacgcagaggtgctataatgtatctgaaatattatagaatcttcaaacggaggacacggaattgatagaggtaaaaaatctcgtgaagcggtacggcgattttgaagcggttcgcggcgtcagctttgagataaaaaagggaatgatctacggctttctcggaccgaacggcgcgggaaaatcgactacgatgaacataataacgggatgtctcgccgcgaccgagggggaagtcaccgtaaacggctgcgacatatacgaggaccccatcggtgcgaaatccgcaataggatatctgcccgaaatgccgccgctctacacggacatgacgccggaggaatatctttcctttgttggcgaggctaagggactgcacggggacgaactttaccgtgaggtcgacagagttatagaaaaaacaggactcggcgcgtactcgacaaggcttataaaaaacctctcgaagggctacaagcagagggtcggcatagctcaggctattatcggaaatcccgagatagtaatacttgacgagccgactgtcggacttgacccgagacagataatcgagatacgcgagctgataaaggaacttggacgtgaaagcactgtcattctctccagccacatactgacggagatagccgaggtgtgcgactacgttatcataatatcgcgcggtcgtgttgtggcttccgatacgcttgagaacctgacgaagaagtatgagggcaagaactacgttgacattacggtgcgcggggacgaggacagggtgagaaagctcgtgtcgtccattgacggcgtgctgagcgtagagtgcgatacctcgcgcggatatgtccacgcgaagatcggaaccgacagctcacgggatatcagagaagagctgttcttccgttttgccgacgcgaagctgcccattctctcgatgaactacgaggaagtaacgcttgagaaggtgttccttgagctgacgggagaaacaaacatcacagccggcacaaacaattctgcggagaaaaaatcgcttgaagaggaatttgccgaaaaagccgtcgataacatgaaaaattctgccgaagcatctgctgaaaccgagccggcagaaccggaagaagctcccgcgcccgcaaaggaagagaaaaagtcaaagaaacgggacgacgactacaaggcgctgttcggaggtaactgaaaatgaacgcagtatacaaaaaagaactgaaaagctacttcacgggaatgacgggggcgatttttgtcggattcatcctgctcattgccggaatctacacggtagtatataacctgagggggctttacccgaattttgagtacgtcctctccggagtatcgtttatctatcttctgaccgtacccgtgctgaccatgcgctctttcgccgaggaaaagcactcgaaaaccgaccagctgctgtattctctcccgataagcgtgacctccgttgttatggcaaagtaccttgcaatgctgaccgtgcttcttattccgtgcgctgtcatggcgttctacccgctcatcctctgtatgttcggcacggtgcatctcacgggagcatacgcagctcttcttgccttcttcctgctcggcgcgtctcttatctcaatcggaatgtttgtctcctccctcaccgagagccaggttatctccgcagtcataagccttcttgcaatgattctcatcaacttcatgtccggactgtccggtatgtatccgacctcatccgccgcatctctcgcgggtcttgtcgttctctcaatagccgtcggaatgatagtacaggtgcttataaagaattccgttgtgtccgcctgcacatcagtggtgctcatagcggcgtcggttctcgtttatcttgtggattcatcacttcttgaaggacttatgccgcgcctgctgtcctccctcgcgctgttcgaccgcattacctcattccagagcggtatattcgatatgacggctgtggtgttctacatctccgtctgcgcgctgttcgtgtatcttacggtgcagtcgatggaaaagaagagatggaactgacgacggtaaacccgaacttgagtaatgaaaggtaacacaaatgaataatgcttcatctcccgcgaagaagaacgggataaataaaaaataccttaagataggcacgttttcgataacgatgactgtcgttgtgatagctgttgttgtcgtcgtgaacctgcttgtgggtgagcttccctcgacctacacaaaatacgatatgtccgcgctgaacctctactcaatcggagacgagacgaaagccgttattgactccgttgaagacgacgttgtgttctacattgcagctcagcgcggtagcgaggactccaccatagaagagcttctcgacagatacgccgcgatgaactcccacataagcgtgaagatagtcgaccccgtcacaaatcccacgtttatcgagcagtatacatcgaagcagctctcgcagaactccgtcatagcagtcagcggaaagagaagctacgccgtcgactacaacgagatttatactacgacctacagtgacgaggagctttactactacctctactacggtcagcagcccacgggaactccgtactttaacggcgagctttgcttcactaccgcgctcgactatgttacgagaaacgacctgccgaaggcgtatatgctcacgggtcacggagagactgcgctcagcgaaacctacctcgaatacttcaccgcggagaacatcgagacggcagagctttcgatactcacacttgattcactgcccgacgacgctaccgctgtaataatcaacaatcccacgtctgacatttccgcagccgaggaagaaaagctctccgcttaccttgacgagggcggaaacatcatactcatcaccggcgcgctcacctataactcaaaatccatgccgaatctctctgccctcgcgaagaaggtaggtcttgagtcggtggacggtcttgttatggagacttcgcagaacaactacacaatgtacccgcactacctgctcccgaatattggctccacctcaaccgaacccctgtcgctcatgtcaaactcaaaggtctacgtactcgcaaacgccgcgcacggtatcatctccgacggcacgcacaacgtaaatccgcttctctccactacctccggcgcatatgtgaagtccgaccttacctcgacctcatacgaaaaggctgacggggatatctccggcatggtctacatcggagcttccgttacggattccgctgacggcacgagaggggacagctacaagttcgtgtggttctcatccccggctctggttgacgcgtcaacggattcatgggtgtccggcggcgactcgagcatgtttatggcagtgtccggctggatgtgcgagaacaagataaacctctccatcatggcaaagcagctgcaggttgaatcccttaccgtcaccgcggcgcagtcttcgatttggtctatcatcgtcgtgttcatcattccgctgacggtgtttgcattgggcttcgctgtatggtggaagagaagaaaagcgtaaggtgaaaaaatgacagcaaaaaccaaaaagaaaaacaaatatcttccgcttgtcgtacttctcgttgtgctcgtcgcgctgtttgcggtctataaagctctctccgcgtcaaacgagagaaaagccgccgaggatgaagccgcaaaagccgcagagaacgcggacatcatgatagcacaatacgactacaccacaatgaccgctctctcgtaccagaagaagggcggggaaaagctcgatttcgcggtgtcgggttcatcatggatatacctccccgacgagcacttcccgcttgacaacacaactgtcgcgaaaatggcggcggctatagctcagattgccgtagaatgcaccgttgacgagggaagcgcatccgactacggacttgacgaccctgaatacacgataagcgtgaaatactcgggcggcggcagtcacgaatacaagataggaaactacaactcgttcaattcctcatactacttcatggcggacgggcagatgtacatgatagcgtcgggacttctttcctactttaactacacgcttgacgaactcatgacgcttgacacaattcccgcctccgactggagcgatatcgcgtatgtgaactttgtcgcggtaaagagcggcgagaacgagaacaaaatcgaggatgagagcggaaagagcgcgatgcttgacgtgataaactcgataagcctttccgactgcgccgactactacaccgaagagggcgaaaaatcaaactacggtcttgacggcagctttggcgttacggtgaactacaagaaggcgaaaacctcgacggattccgacggcaacgaaaccacgacttaccttgacacaagctatgtcctcttgataggctttgcgggcggagaatactatgtaatgccctccggctcgagcatcacctacagacttccggcagaaaaggcggtcgagcttctgtccttcctcggatatgttcccgaagagacggagatgtaagcaaacaaaaaaatcccccgaaaggcggtacaacttagggattttataatccccgaaaaaaacggcatagtcgtattatgcggctatgccgtttttctgcccatttagggctggggtggcgtgaattcaccgatgcagttccagacgattcgcagtcgctgaacctttctgccgccgactcgcgcaggctgaaacacctcaacacgttccacagattctcggatgacttctgcattcaactcttgtatgtccgtgtgcttacgcacaaaagcaacaaagctgtttacattcatactgctctctttctgtgcggcaattctgctgcgaagttctatggtgcgtctttccagcgatttctgttccgactcatagttttcggacatcttggcaaaacgctcatcagatatcttgccctcgacattatcctcgtaaagccgttgaatgatggtgtcgagtttgtgtacccgtgactctgcctgctccagctcccgtttttcatcccggagtgccttttcggtttccgctttggataactttgtgaccatctctacgaattcgtcctcatgctcacgcacataagcggtcatgctgcggatgccatctaacaggaattcttcaatgacggaattgcgtatctggtgtgaggtgcattggtctttgccctttttgcgataggtggcgcacaccatgtattcctgccccggacgaaattttgtggagcgtacctgatacagctttgctccgcagtcggcgcagaataccatacccgaaagcagcggcatctcgcccatgggagtacgcctgcgcctgccgttgcggatacgctgcacgatgtcgtaggtctcacggtcaacgatggcttcgtgggtgttctcaaaaatctgccattccgaagggtctcgcttcaactgctttttctgcttataggacttgcgataggtcttgaagttgaccgtgtgtccgagatactccgggcgggaaagcatatgggaaatcgtgctgtctcgccatatatagccggtatcatcactccgattgtccgggattgttcgaccgttggctttggcatacgcagtcggattcaagatatgctgctttgtgatctcctttgcgatctccgatacgccatagccttggatgcacagccgaaatatctctcgaaccacctctgcggcttcttcgtccacgagccagtgcgttttgtcttccgggtctttcacatatccgtatggcggattcgtactcagtggcttgccggactgcccctttgccttaaacactgcgcgtatcttgcggcttgtgtctttggcataaaattcgttaaaaatattgatgaacggggtcatgtcgttttccgactgattggcactgtctacactgttgttgatagcaatgaaacgaatgtcggcattgggaaacaccatttccgtgtacataccgaccttcagataatcacgtcccagacggctcatatcctttacaataatcgtaccgactctgccctcatctaccaatcccatgagccgattccaatccggtctgtcaaaggtagtaccgctgtaaccatcgtccacgaacagggatgtgttgcggaaaccgttgtcatctgcgtacttctgtagtatagccttttggttaataatgctgttggagtcgccctgtaattcatcgtctcttgagagacggcagtacagagcggttattttctccccagcgttgtaagactgtctgttgttgttcatatgctcctccttcccgacagtcttcaagcggtactgtattatggctctgaactgcggatacatcaagcgtttatgcggattttacaagataactttttgtgtcctccagaatgagccgcttgaccttctcgtatacggactccctggcactgctaccggtggcgtactccacaatgtatatggtatcgttgcgctctccggctgtgattctcactggatgctgttccattttctcctcctattccctcaaaaacttatgcgaaaatttgcgcaagaccctgcgccgctgtccgcctgataaatccacggagatacatggccccataggggcggtcacatctccgggtctttccgtttcgggcaacggcccggggttgcgtgtgcaaaaaaggcgaaatcaaaagggtaattagcctgcaaagcggcaaataacctctatgaaaaacacataattcggtgtaataccttctttgaaaagggtgcggcagagcaattctaccgcaccctttttcaaattcagccgtttggctcggcttcggagattttcaatgccttgagcgcatcacggcggatgagcttgccgtcaagaaactccgtagccagatagccgatctggtcgagcgtaacaaaatgctccttcagcgcctggacactgacagggctacggtcaatgatccagtaatagctgaaatcgccgaacaccacaggctttgcgccgtccttcacggacggcatatcgtaggagataactacggacttgccgagaatggtgttgtcggacggattccacaggtaatttccggcggagtccttgagtgtacgcagcgtcagtgccgtttcgtcgttcatcagccatacggcgtttttacgatacttcgcatcgagcgaatggtacagccggagaacatcgtcaaaggaaagcacggaagtggtgatccccgtctctgcacctgcagtatcgtccagaatgccggtcggcatatgttcgcccgtaccgagtacaaaacctttgtcctcggctttagcgaaattctccgcaagacggtcagtcagatagtcttcaaggctgaatgcagcgtcatgtacaaaatcatcgtccagtttaacgaacactgccagcttgtgggaatccacggcatggcgggtaaagtcattcacaccgtcctgaagcggaatactgccg

SEQ ID NO: 3858 - DNA, 6193 bp, Unknown
  16S sequences of unknown bacteria
ctcctgtagcgtaccactgggtgatttttgctccgcccagtgtacttactccgtacacttccaggttctttccgcttactgcagaacgtatctcgtaatagccgtccgggatgacagattgagcaacagacttttctgtaactgttaccatgcatgtactctttaagccattactggtagttgcagttatggttgctgttcccacatttttggcagttacctgtccatttacatccacatctgccaccgcttcattatcgctgctccatacaattgttttactatctgttgtatctgcaggcgtaatccttgctgttaatatagaaatgtttcccttttccaactgcaatgtgttgggcgttactgatacacttgtaatgggatttgtgggagtgcccgtattggtcacctgaacttgtgtagtcaaaggcatttgattcgtaccaatgataacatcgacatataacgttgtatttccttcacttaccccatagagtttctgggtcgcatgattaaaatttgcaattgctgtactgcctagcctaatatttgaatttatagattgcaacattggttttgtaacaacatcaatatcagtctcattgattcctccaatatctaaagtaatcgtttcaggtgactgatatcctgtaatacctgcaatatcaccttgattgtcagctgtattctgtcctgttgctctcatatcatatgcacaatcagtaaatgttggggcaggacttccaacaaataatgaaccataaaaaccacctgagttactgttttcagttttttgtacttgtccatttgcaaaactgttttccactttgccacccgtagtcaaaccaataaatccaccaacgttttgtccacgggagactgtcagactggaaaaactatttttaatagacgcgccttctgccaaatagcctacaaatccaccaacaccgttggctccgtttcctcctgtcactgttcctgatgtcagtacgacattttcaatgtttccgcctgagattactcctgcaaaaccaccggcgtgtcctctctcagagccggttacatttacattcgctaaggtcatatttttaacggagccgcctgaaatactttcaaatattccggaaccgtttacagtcatattggacaatgtttttccattgccgtcaatgtgtcctgaaaaattatcaatcggtgtgatagctgtatgattaaaatctatatccttcataattttaatatatttgttatcacgtaccaacaagttccaatcatctacagaagaaaccaaaaatggatcatcttttgttccgcttccctgcacttgaggaacagtaacatttaatgtaatcgagtccgcatcagatgcggttacttccagtttaataccactattcttcccattgctgtaatacagcgtatctttatcccaggtatctccggtttcatctattgttttaccatatgtattgcctactgttggcagtattactgcatcctttaaattaccggctgctgcgcccagggaagtttcttccggacggaaaacatagagaaaatctccaagaccatcggttgttcctcccatattggtatacaatgtactgttaacacgataaacgatgagtccattatcacgtcctgtattgtgggttgcatcttgtttttgatagtattctactacaaaatattccttatcatggaatggagaatatattttataggatattacttcatttgaatcctgatattttggtctttgaatggtaatttgtcggtcatccgttatttctgataatttactgccccatcccaaccaatcgtgagataaaacactaagcattgcctgaggattttggctgttattggacgccataatatcataaaaaccaacaggttctcctatgctggtacctctgtataaatccggcaatcccaatgtatgtaaaaactcatggtgaataacagaatagcctgcacgatttaattttaatgtatccagcggcgctgcctgtgtcttgtccacacgataagagaaaaccccacctggactttgtgaatctcctacattattcaaattataggcacctaccgttttgccggatattgttgtagaaaaaattctatccgctttatgtgaccataataaatcgttccatccaattccgctatcactaaatttaccttctaccataaagctgactgcatcaataaagccatcattattggtatccaactgtgcgccgctcaattccttctctatggaaggttttaccgcctgcaatacttcttccaacaactcttcctctcttgaggcttgttggtcgggagtatagccgtcaggattgcttgctgttttcttcatatagtaggtacgaggtttttttgaagtataagatatggttgtgcccgcatcatttttaggataaaaagatgtatgagtacgaaatgcgccataactgtattgattcaagtaatttttcaaagatataaccggtatttctacaccaagcggttgtatattcacaccaccgctgttcattaccatgtcagctgcttttaaggtgtatgcatcgtctaaatgaatatcctgcatatctgcatccggaaattcaattagtatcgccaaatactgaacctctgttgccttcgcatcggcagagcgcgccgaccgagtacgtttgttctggattttttgcgtcaaaggttggatacccttaacttgttcccagccatacatttccgtatagctctctaaatatcccttgttttgtgtttcttgtgttgattgcaaatcttcttctgcatatgtcatgtgttgtattggtacaaacataaatgcaaaagtaagaatcagcgtaatagcaatggtatttcttgtttttgttccaaactttttcataaaatatctccttgttacaatttaaccctgggtagtgtaatcataacataatttatattaaaatccaaccaattcctatcatctttctatattttcgtatatagttataatttacatattgttcaatatattctgcgatatatttcttgacttctgacactgtgtcaaatataatgtgagaacactgacactatgtcagtcttagatatgcctaggaaaggaaaagtcccccatgccgtcaaaaacattttttaacttgtctccggaaaaacaagctaatattttatccgcggcaaaaaaagaatttgcgcgtgtaccatttgagcaaacatcttttatgaatattgcaaaggatgcaggtgtttcacgcagtaatttatacaattattttgccaataaacaagaactgctttcttatttgctggaaaactttaaattaagtattctctccgtgataaaaaatagtttaaagaaatctcaaggtaacatttttcaactgtttgatgatatcttttcatatatgctggagtatggattttctaaagaaaacttcggtcttttccgttctatactaagcaatcaacgctttaccgaccaagatgaaatgtttatgacgtttcagcaacacaatgaatgtattgcggaattgttctgttatgaatcgtttcaattgcagcatttaaatgtaaattcagaagatgacttccaaaatattttagaaattctaatgggtattacgatgaaggctgcgattgatgtatataatcatccaaaagaaaaagagcacttcatgaaacgttatcaagataaaatcaacctggtaaagtacggtattgtgaaaaaggaggttaaataaatgtctgttttatcgttaaacaatgtgaaaaaaagctataaattgggagacggctctgaatttcctgtattaaagggaatcaatgtatcctttgacaaaggtgagcttgtctccattatcggtgaatccggcagtggtaaatccaccttaatgaatatcattggaggcttagattccaaatttgaaggagaagttttggttgacggtaaaaatattggagcttttacagaaaaagaactggatatttaccgaaaaaataaaataggttttatttttcaaagctttaatttagttccccacttaaccatattggacaatgttgctttggcattaacactatccaatgtaaaacgcagcgaacaagtcgagcgcgccaaagaaatgctggaaaaagtaggtttaaaagaccatattcacaaaaaaccgaatcagctgtccggcgggcaaatgcagcgtgttgctattgcaagagcattgatcaacgaccctgaaatgattgttgccgatgaacctaccggttccctggattcccaaacaacacagcagattttggatattattacacaaatagcacaggaagggaaactggtgctgcttgttacccactccgaacatgttgcggaatgttcttcccgtgtgattcgtatcgcggacggacaaattgtagaagacagacaaggaataacactaactccgaaagaaacagctgagacagcaaagacaaaagaaatcagcaagaacttaaattttgcaggcgctatcaaactggcatttaaaaatatgaaagaaaaaaagatgcgcaatattttggtagcggtaggtgcatctatcggcattatgagtattatgctgatgctttccatcggcaacggtattaaaacgtatattcgtgatacgatggaaagccttgcaaatcctctggctgttgaagtaactatgcctgaagaggaagatacttcgaccatgggaccggaagcatttttatccaacacctattttacacaagaagatattgacaagctaaataccgtggagcatgtatccgctacagaagaacatttcagcgcctttgctatgggaactgctactgcttctatcgatgataagcaagcccctcttatgatggtttccactttgtctcaatataatgaatatgacctgtcagaaggaaccatggcaaataaaaacgaaattattattaatgaagcggtaaaagaagaactggggatggatgacattgtaggcaaaacaattacagtttctgttcaggtagacaacagacaaattgtaatagatactgtggtcagtggtgtattatcaggtgaaacgagttctatgtcaggcggcatgtctcaagtttacttatattatgatgacttaaaacaagcttgtgcagaacaagattatgaccttatgccgaccagtatgatgttgatagcagatgcggaagaaaatgtagacagcataaagtcaacggtcactgacatgggctatggcagttccatgcaagaaacaatggttgaaacatttacgactatgctggacttatttacaggtgtgttagcaggtattgcaggaatttcacttcttgtttcagctatcatgattttggttgttttatatatcagtgtagtggaacgtacccgagaaataggtgttatgaaggcaattggggcacgccgtaaggatatcagacgtatttttatttcagaatcatttatactcggtttggcaggcggtatcattgctaccgtaattacgtttattatcatgttcatcggcaatgctgttattcaaagccattttggcgtaaatatgatactgataagcccttattatgtactatttggcattggtatcagtatattaatcagcgtactttccggtacacttcctgctgcaaaagcggcaaaactggatcctgttgaatctttaagaagagattaacccgttttttgtcaaaaaattgtaaaaaatcaaggaaaggtttacaatgccttctctcccatgatatgatgatactaacgtatctatattcgatacatatactttagtttcaaagaacagggggtcatctcatgaaaaaagataaagaagcgaaaaaaaagaaaaaagaaaaatctgctcaagtatctgttccggaaactgtgaaaactgtcagccccgaaactgaagacgcgattttagaaacattattacagcatataggcggtaaatggaaaattcgtatcatttgggctttacagaatgcccaaagtaaacgttacagtactttaaaaaacgaagtatcttctatcacagatatgatgctcagccaaagcttaaaagaacttatggccagcggtattgtagagcgtcatcaataccaagaaattcctccaagagtagaatatcaaattacacaaaaagggcttgcattaattcccatattccag

SEQ ID NO: 3859 - DNA, 23938 bp, Unknown
  16S sequences of unknown bacteria
atggcgcgactgacggcaacgagcagcaggatggcaacgagtcggcaggcggcaatggcgcgactgacggcaacgagcagcaggatggcaacgagtcggcaggcggcaacgagcagcaggagggcggcgaagagccaacggttccggaaccgatgcctaccataaaaatagtcaatgcgcctgtgaatggggagctaacgtacgacgaaccttggagccccagcgtccaagacgaagctgggaatacccttacagaaaaaacggactatacagttacgcagaatgaaacgaacggggacaatgccggctcggtagttaccgtcacggtcaccggtataggcgcgtataagggcgcgagcgcgtcagcaacataccgcatcgttgcgcgtgaactgggcgctctcgcgttcgacgaggacacgttgatggtagagtacaatggcactaatgacaacgatgcctatctggcgaacgtaggatgtttgcggccggtgaacctgcttgaaggccatacgcttagcgtgcggccgagcgtgcagaataatggcacgatcaccgcgccgggcaagtatacgatcaccgcgggtgttgaggatgtgaagatcgttgatggcgcttcgaacgatgtaacaagcaactatacgtttaacgttgacgctctcaccgaagcgtcgctgaccgtgatgctgaatgtggtagttgaagtcacacaagacgagttcccttatgatggcgaggagcacgcggctgagtttgcggttgcggtaacaggcaacacgggcatgattacttacgctccttatgtagcagatgaggacgagaaagtaaccgatgtggcggatggcacagtggaggtgacatgggaaccgaaattcaagtataatggggaagatgaatatataagctctgcttatatcaccggcacatattttgcgaaggctcagctgaaaattttgccccgcgagcttgccataacggtctcgccaaccgcagcgacgaatttgacctacgatgggcagccgcaacaattggtgcatgtttcttcggcagaggttaccacggcgccggagaacattccggagaagctttctgatattgtggatgcaattgcccaaaaagtcacgctgacggctggagcggtggctgagtatacgaaggaagacgcgggcgagtatccggtaacgctggccgcggacaattttacctctactgcgcccgaaggcgtggacatggacaatttcgccattacgtataagctgagcgatgactggcaagatactacagtcaagattgcgcccctggctattaccgttgacattcaacaaatagttcctgataatcttgtctacaatgggcaagagcaggagctgaaacagtttaaagcaacggtggcggaagattcgctaaacaagctgaaggagcttggactcgaatccgactacgttgcgcaggagcaagttcagctaaaggaaggaaagggcgttttgaagaaggacgcgggcacatattccatcacgttcttggaggaggatttcaagaattcgaatccgaactacgacgtaacgttcaatgtgccaacgcctgcggaagacgtcgtaatccaaaagaagaagataacggtcgtcgccgcaagcgcggacaaggagtataacttcgaacccctgacgaacgactggtatgccgttttggatgggcatcactcggtagcgccggaaggaacggagtatgaagaaggccccatcgccattcgagacgtagcgggcgaattcatctacgcggaggttgagagcgacccgcaggtgacgccgggatcaacgacaaacttcgtcaagaattggtgggttgaaggcggcgatgaggacaattacgacattgtgaccttaaatggcacgctgaccattaagaaccgcgaggatccctatgagattgtgctcaaggtcaacagcgatgaatacacctacgatggccaggagcatacggtagaaggcttggagagcgcaacgctcgatttgggcaatggacaattcccaggcagggtggacgcggagaacaataaggtaacgttcaccgtgggcgcgggcacaacatacacggtggaactgacgcatcctgagatcagccggacggagacagacgcaggcgcgtacaagtgcccggctgacgagaaagaggaagaaaccattaaccaagacagcacagtgtctctgaatgggcaagatgtgaaggataactttaccattgaggtgatacctggcacgctgaccatcgccaagcggcccatagtgcttgtggcggcgagtgctgaacaggaatttgatggcggagagctgacgaatgccggatacgcggttttggacaaggaaaccgcaacggatgaggacatagcaactctgacctatacgacggaacccataaccctgatagatggaacagagctgaccgctactgtggaaggcggcgtgcgcttcgttgcggaggaacctgacaacatagagcccaacaacataattacgagtgttatcgtggaccatgttacgtatacccctgatgagctggatcgggtgcccaacttcgcgataacccttcgtaatggcacgttggaaatcacaaagcgcacggaaccttttgcgattaacctaacgggcaagagcgataccatcacttatgacggtcaggagcactccctgcagggctttgcagaagccgcgctggaggaagacattgtcggaacaatcgatggcggtaacgttgcggaggttgacaaagccaatggaacggtggcttttgactatcaaaccgccagcggcgagaacgtgaccttctatctgtcgttcgagggtgtggagctgaaggagacggacgccaacgaggatttggatgtgccgtatatccttgagaatgtggaagcgcttgtgaaagcgatgagggtgatcatgcgggtggatggcgaagaagaagacgtctccacgcaattctccatcgcattggagtccggcgagctgttcatccagccgcgcccggtgaacgtgcaggtgacgggcaaaaaggactttggcctggcggatcccgagtttgatgagtacgggttgcaggtggaattcctgtcgctcgagggcgaagaggaatccggcttggtggagggcgatgagctggaaatcggcatgttccagcgcgttaataaggacgagcagcccggcgattacgagattacgccaacggaggacaacgtgtacctatccgcaaaggcggatgatccgattcggcaggacaactatctcctctactttgtgccggcgcaaatggacgaggatggcacaaagaagggcagctggttcaccatcaccgatgacattacctggagcgtggcgctgggcgaaattcatagccaccaggataaaaccacgatcaccatcgcgccaccggctggcgggcaacttctgccactggacactttcttcgcgaatgtgacggtggaagtttccgtcgatagcacgggcgttgacggtaaggtgcagaactgggtgggcaccttgccgtcgctcaccgtggacacggacaagttcgcgcctggcactgctgctggcacttatgcgtatacgctggaaatccctcagcttgattatgttccgggcaatgggatcccctcgtggaagtcgtatctgcccgcgggcacggaagtcacggtcacggtctacattggcgcggatgccggggcggatagcgggaagaacgctcctttcggagacgcgaagcaaaccgttgcctccgttggcccggtgacgttcacggtggattatcgggctggctcgggcatgcagcgctacacgcagggcgaagcgagctatgtgctcgatgaaggcggcctcatccaggtgacggcaacatataacgcaccggacgaggactatgtgtccaatgacgacgtgatccagattacagcgaatggacaaaacctctatttctcctatagcgaagcgcaagctggcatcaccctcagccagctgcagggcctaggcgggaacgcgggctggtatggcaccaatcccaccgcgcagctcaacttcacggttacgctgctggacgtttgggaccacactgtggattcggtgtcgggcagcgttgccttcgatacgggcgcggagaacaccacgcaaaccgtgcccaaccgcaacgatagcgccaccatcgaactgaccattgcggacaacgtgggcggcgaacccaccgcgacgggcacgtttggcggcagcgtgctcaacctccaggcgtccacggaaaagggcgataccatcacctggaccaacgctaccgcttggaagaatacgccttccctgctgccgcattccggcgatgtaatcacggtgacctatcaggattgcgtcggccatacggtcacgcacaccatcaccgtcgagcgcagcccggccagttcgggcctgagcatcaatgtgcggcccatggagcgcgaaaccgtgcccaaccgtacgctgaccttctttggcgacgcgacttcctgggaaaagatgaccctgtccttcggcggccgctccttcgcgctggcagcgctgccgggcaatgccgtttacgatggcgccacccggcaatgggcctatgaagtgaacttcgaggatatcgatttccccgtgggcgtgccgaccaccatcagcatcgcttacgatgatctgtccggcggtgaagcttccattgtggtcacctacaaggaccatgtggaccggccggcgctgggcagcgaactggtcgatggcagcgacgcgatctggggctttgtggaacagggaacgaccgatgtgcgcatcgatatcatccgcgcgaacggcgagcgcgaaggcgtggcgctggtcgcgctggacgcgggctatttctgcagcgaaacgctggatttgccgctcgcggaaggcgatgaagtgcgcatcaccgtggaggatttctgcggcaacacgcaaaccgcaacctatcgcgtggcgcgtgaactcgcgtcgggcgctgtcgcggaagtgcttggcgccagcttcaccggcatgctggatactggcgccacggcgcaccgcttcgccacgcccattgatctggctgccctggcggcgcgggcaaatggcagcatgaccttgcccatcctcgcctacaagggcatcgaaatcggcaccatgacggttgcgctcacgccggaaggcaacctggatttctcctatgaaatcaccttccccgacgcgttggccgaaaatgcccgcgcgtgcatgagcgtgtattggcagaagccggaattcgatgcgctgctgaatgcgcacagcgttgtggccaccaacctcaacgccgccccgaccgggctgctcgatagcctcaatgtttcctcctatcgcacggaaatgggctatgagggcgttgtgtgggtctgcgcgcagttcgatatcgatatggatgaagaaacctatgccgtcaagggcggacgcggcgtgaatttctatcgctggctcagcgaaggccgccagacgatggaattgatcggcagagtgtatgatgagtccagttcctacgcaaagaacaaggagtattacgatttgtaccgcagctttgtgtatctcgccgccaattcctgatttcgtggggaatcgcggcaggcaggctgcccaatgcgtttgctggcctggcgggcggggaaccccgcccggccaggcgccgcggcgcttggctaggctttgcgcgccgcggcaaagctccctcccccgtggccagaaacggctgcgggaaccgctggttttccgcttgaggcgattgggaaaccgttttttgcacgcgcctttccgccatttcctcgctgcgaattctctcccagaacgggcggctcctgtgaaattgcggattttttctttatctcacggacgggaaacgatggaagcaaaaagggaaatctggcagagggattgcctctgctcctgccgttgagccccgggaatgcttttgcgaggctcaacggcaggaaacacagcagcgcgctttggcgcgattccagggaaaaggagtacagacgatgaaacgaatggcaattgtgggctggatcctgttgctggcgctggcgctcccggcgcaagatgggttggccgcgggcgtggcaagcgccatcacgctcaaccaggtacagcagcgaaacgcggatttgacgatgtatgtcagcctgacggatagcgcaggcagcccggttacgggggatttttccacggatcagttcgatattgccatcgatggcagaacgctggaagtggagagcgttgaggcgttcgaccccaaaaagcagggcatccactatgttttcagcgtggatgtatcccggacggtgacggcggccatgatggaggacgtgcgcgagggcttgcatgcctttgtggaggatttcggcccgcacgatacggctaccatcatcacctttggcgaagtgatgacccagcggattgtgaacagcgccagccagaccgccttgcacgaggcgattgatggcctggaggcaaatgagggaatgacggcgctgtataaaggcgtgatcgatgcggtgacgctggcggcctccacggatggacgcagcgcggtgatcatgatcaccgatggcaaaaacgatcccacggaagaaatgcaatcctacaccaaagaaggtatctttgatgaggttaccagcgcgcaggtgccgctgtattgcatcggcctcaacgataacgatggcgtggatcaggaaagcttggcggaattcgcccaggttaccggcggcggccaatatgatatccccgccgaacaaaccggccaggccttggatgccatttgcgatattatgcgcagcgccatcgtactgcgcaccacgttggtgaatacggagggccgcgcgggctttgtcgagcccagcacctttaaggttggcttccagccggaaaatggggccttcctggtgagcaatgagctgcagcaaaacatcaattggaaaaatgttcccatgcccaccatcgcccccaccgctacgcccatcccggaaatttcgctggaattggacgcggaaagcgtggagcatccgggcagcagcaggctgaccatcaccggagcgatcctcatcgagcagggcgaggtggaggaagacgacctgtccatcacggtcaatggcgagccctggcggctgaccgcgctgatgcgcaatggaacgagctatacctttgccgcagaaggcatggttcccagcggcactgtggccttggatgtgcaggcggaaatcacggatctacggatcgcctcgcgcgtgcagcgcatcaacgtgctcgcgcccacgcctggtcccaccgccacgcccgcgcccattctggcggtggaactggacgacgcgggtcgggatctgctcatccagcagggcgaattgctaaccatcaccggcgtggtcaatgtgcaaggcagcgtggatggcgaagatatgcgcgtttacatcaacgatgtattgtgcgaagacgcgacggttacgcgcctgaacgccagccaatatgaattcaccgcgcactacacggtggaggatttgagtgtggtggagctgaatgtgcaaattcagctggaggatgcgcagatttcttcccgcatgcagcggctgaaccttatcacccccgcgcccacccccgcgccggaattgcagctcacgttgacagacgcgcgcgtgacctatatcgcggaggaagaagtgctgatccgcgggcgcatcgaggtggtttcgggcgaggtagaggcagataacatcgccatgtacatcaacgcaaacaagagcgaagtgagcttggtggaggcgagcgacggaagctatactttcgaggtggaatatctgcccagcgaaggcgcgacgcaaatcgatgtgcgcgcgcgcctggcgagcgacaccagcgtgagctccaacacggaaaagctgctcgtggtcacgcccacgcctgcacccacgcccacgcccacccgccgcccggaggtgacgccgccgcccacacctacgcccacgcccgcgccggtgatcacgcccgcacccacgcccacgcccgtgcctagctttgtacagcaggtgcaaacggtggtgcgggatatggtgggaaacggcacaatctggtacgcggcggcaatcgcggcgctgctcgtggcgctcctcatctgggcaatcctccacgcgcggcgcaaccgcgggaagtcgaatatccaaagcaccaattccagcacgttcgatacccggctcggccgggaaaaggaacaggaggacaagggcaccatccgcgatggcgacgatatggataccatcgcggaagaagagattccttcctctggcggcggttcgggcaccatcatcgtcaaccaggcttcggaatcgggcggcacgctgtacatcgatgaaaagcccggcggcggtaccatgcgtttggatgaggattatggcatgtccaccggcaccgtacgcatcgaggatgaccgcggcatcgatatcaccatggaggagatttaccggcgggaaccgcgtggcgcgcgcagcgttcacgtggaagtggcccggcccgtcaccattgggcgcggggattacagcgaggatatcgtcatcagcgatagcacggtttctagcccgcacttgtctttgagctttgatggaatggacgtttatatcgaggatcttggctccaccaatggcacaaagcacaatggcgcaaagattgccgcccatgaagcgcgcaagattgttagcggcgatagcgtcgtgatcggctacactgccctcaagtttctattcaagacagggcaagaatgatttgtatcgttttctggcggggcatggatttcttgccatgcccctgggggaagagaaaaacggcgaggagaatggcgcatgaagcgattggcagtgttggcggcgtgcttggcagctttggttttcgggctgctggctctggcggaaggggaaacagtgataaagggcgggagcggattgtccgcgccttccgcctctttcgcgccttccgcggggcagacgattcccgtccatctcgtgggcgcgcaggcgaatgaacaggaagcgacggaggaattcccgttttcgctgtatgcttctggcgacgccgcaacttcggtggcgctcgatttcagcgcttttgcggacggcgacgtgctgatccagtattcttcgcaaggggatccaaacgcgtcgggctggaaagtcgccgatttgagcgacggtggaaaggcagtgtgccttcccgccggaatccgctgcatcatcatcacggaaggcaaagaaacggatggcaggctgctttggcgcggcttgttcgaaccccaaggccaaacaaatgcgccgggagcgctcgcgtttgtcctggagggagaaacggccgtgaacattgccatttcctcggtgacgggcgatgccttgctggtgcaatgcaccgggatcgccagcccggaggaatataccgtgcggattgcctttcggcagggcgagcgggaagtcctttccgcagaaattgggctggagagcgcgttttccttcgctgatgcctacagcgtgcgctatgcgcggcagaatcagcccttcccagaggaagaatgggatacgctggaagtggcgctgtgttaccatgggattgttgctgacagcgatgtgaggatcgtttcttttgcgacgtctacgcccatggcaacgcctacgcctacgcttgcccccacgcctgtggcgacgcctacgcccacgcttgtccccacgcctgtggcgacgcctacgaccacgcttgtccccacacctgtggcaacgcctacgcctacgcttgcccccacgcctgtggcaacgcctacgcctacgcttgcccccacgcctgtggcaacgcctacgcctacgcttgcccccacgcctgtggcaacgcctacccccacgcccgcgcctacgcctagtccggtggtgcagatttgcgtggaggattatgtggcggaatattcgggcggcgtgcacgtgttgcccgaaccgatgtaccggatccattcgctttggcaggtgggagaatcctttgcgcttctcccctttggacgcgaagaagagcgcgagaccatgggggatgtgcgctggtattacagggaaattgatgcggcgggggaaaacccgcaggaacccattgtttggcagcaaggcctgccgcgcatgacggatgtgggcgaaaaggtgttctacattcgcgcagaaaaagaagggtaccggtttggttattgcaatctcacgaacggttcgcagggcggcgagtatgccatcgtgcgcatgaaaatcacgcccgcgccggtgagcgtgaggctttccgttgaacaggatgcggaatatgtctatgacggcacagagcaaagcctgggatacacctgcaaggcagtttcgatcgaagcgcaaacgcaggcgcagcaagacgctgctttggccaagctcaatggcagcgccacgtggaaaaacggcgtgagcggcagggttcagggggccgaagcgggcgattactccattggggcgcgcaaggccgaactggaagaaatgctgcggatggatatgggcggcaatttcctcctttccgtggagtgggcgcgcgatacggtgagcattggcaagcgggagattgccctcgtcagcgcgtctaaagctatggtatacgatgaacagcgcatgcccttggaagcggatcccacagaatttggctgcttgcccgagaatggcctggtgagcggcgattattacagcggcaatatcacggtttcggccagccagaatgaggcgggcatcggcgagaacgcgttcgcagcgtttgaaggggctttcgccgctcagcaggacaattacgcaatttcccttcagccgggcaagctgatcgtattcccgcaagccattgcccctagtgaggatgcgccggattgggaaacggtgcgagcgaagtacgaggggaatttcaatgtggaagaagccgttctggcttttgagcagggcgcgagcttttataacggcatggccgtggaattgagcgttggcgctcagattgcggcggaggaagatgaggcggtgcaggttacttacaatgcggaatcctatgccgacgcggttggcatccgctttagagaccgggaaggaaacccgctgccgctggaagaaggcacggattattccctgcgcttttatcgcgatggcgcggaaacggacaatttgacggacgcgggggaaattgtggtcgtcattgaaggcgtggggaattacgcgggcattgcccaaaggaaattgatgattctcccccgcgcggtggtggcgcgcgtggatatggtgaacaagaccgccgttttggaagacgtcagcccggcgctggccgccagtttcgatgccggggcggttgtatatggcgcaaaaggcccggaatactttgatcccaacctgatggtgacgttcgttgcggaaacggcggaggaagcatggctgcacatagaaagctggacgtatgacgcccagggcgcaaacgcgcacatcgcttccggctatgggacaattccgggtgtttatgcctactacgatagcgaaggcaacgcgatagacgcgcccgccgatgtgggcagctatcgggtgacggccacttgggcggaatggtcgcccgcgcaggaagtgcgcttggaggcggaattcgaaattctgcctcgccaggtgatcgtgacggcggcggatgtggaaatgacctatggcgatgaggtccccacccatctttcgtggacggcggaaggccttgtggcgggaacggaggcggaagaagccatccgggtcgcaccggccctggagaaaacggcggatggaacgtattccattggtttccccgcccaggaaggggatgcgctggtgaacagcgctgagcagggcaactatgccatagaatatcggcctggcaaggtaaccattctgccgcgcgatatcggcctgggcgaaatcgtgcgcgaaggaaacgggtttgccgtgcgggacgatcttggcaacctgctggcggaaggcaaagactatatcctagcgcaggaagaaatggacgatggcgatttggttgtgtccgtggaaggacagggaaattatacaggcgagctgaccaacgcatatgccgctataccgctggagatcctcgctgtttctttcacagacgcggcgggcgcgcccctggaacgcatcaacgtttccctcagcggaaaaatcggtttttcgggaacggtggaaaccaatgcgccggtggaaacggcggatctgcgcgtttttgtgaacggcacagatgccggggcggaggtaaccgcggtttcagaggaacggtatgcgtttgccgtggaggattttgctcttgcggaaaaacgggagcaggtggatgtgcaggttgtatgcgagaatgtggaggcggagaaggtggcaatcccccttgcttggatggcgctcgccatggtttggctggggttggcaatcgcctgcgcgctcttggctgtgggcagcgcgctgctttcttgccggctgagaaagcgaatccggcgcgaacagttccggttgctggataaagtgagccgtaagagcaatcgcaccattgggggcgcggaataacttggccggcaaacggcgggaaaggagccgattatggggatcagggtggaagcagctgcgtacaatgccatcggcggccggaagaacaatgaggacaatttttacctcaatggcatattcctcaagcgcgaacagatggatcgcgggggcaaggtgagcgtgcaaaatgcgcaaccggtgcaggtgtacgcggtttttgatggcatgggcggcggcgaatttggcgagcaggcctctttctgtgccgcgcaaaagctctgcgaatatcagctgagcagcgaacacatcgacaacgcggaaaacattcgcaattttttgacggaaacctcaaaggagatcgacaaaatttccaccgataacaacttgcgcagcggcgcttgcggcagcacggcggcaatgctggtggttggcgattggtggtatcgcaccgcgcatgtgggcgatagccgcgtgtatcttttgcgggatggcaaactttgccccattacaaaggaccaatccgaggtacagcgcctggtggatgccgggcgcatcacgccggaagaggcctggtcgcacgcgcgcaaaaacgtgatcacgcaccatttgggcatgcccatgcgcaccgagcagctgcaatcggtcatcagtgagcgcttgccgctccaggtgggcgattgctttatgatatgcagcgatggcgtaaatgatagcttgaaggatgcggaaatccaggagctgatggatccgggccgcagcgccgaagccaacgcggccgccattgtgaaagaggctgtgcgccacgcgggcgcgcaccatgtggagtccgataatgtaacctgtgtgatcgtgaagattatgcgggtggcggatacgagcgaagcggatcggcgcgtacaccgcctgaaaatccggcaaaaattggccgcggcctgtgcggcgctcttttcggcaggcgctttggggtgcgcgtatctgtttgtacagacgctgggaaaatagcacccgggccgcaaacgggctggagacgatggttggcggaaacctagggaggaaacgggaggattgccgtgcgcagttttgaggaacgtcttaaggaatacgataagcagggtattttgggaaagtggcatctggatggcgcgactttggaggaggcgtaccttggccgcggcagctttggccgcgtttataaaatttattgcgaagaaagagactccagaggcgggcgggaacgctattataatgcgctcaaatttcttgcgatcgatgcggcaaatagccaagatcccaacgatcccgatttgcagaaaaagctcaaccgtcggctggcaaaggcggatcatgagatcaaaatcatgaagcagctcgaaggcgaaagcaacattgcctatttccagagcagccagattatagagcgcaaggatacctatgaaaagagctgggacgtgctcatttgcatggaacggctgacgttgctgaaggactatttgcgcgaaagcaacctggtgccgggttcttatgcctatctgaaaaaggttctttatatctgggaagaactggcgaccgccttgcgcgtgtgcgaaaagaatggcatcatccatcgggacataaagccgggcaacgttttttattcttccaatacggatcactttaaattgagcgattttggcgaagcggctcggggaaaagtgcgcccgggcgatcccatgcgcggcaccaaggcatacatatcgccagaaatctataaggctgccggcgcggataaccgcgcggatatttattctctcgcggtgatgatttatgaattgctcaacaacggctatcgcccttttgagcaagaactgcggcaagaacggggctcttccataggcacggaaagcgcttttgaagataaggcgaattccatgcgcttggagcagcaaaagcccatcccgcccattaagggaatcgcggcggatatcaacgcggtgctcctaaagtgcctgcaggcggatccagagaaacggtttgagaattgcacagaattgcgcgatgccgtcagcgtgttgcgcctcaaatatagcaaagtcacgagcatccagcacaaccgccggttccttccggcgttggcgggcgtgcttgccgtgggggtgctgggcgcggcggtgtatttcttgctgaaatcctcaacccgcacaacggatcttccctcgcccacagagctgagaacgcctgccgcggatttttctatgctttcgccttcttttgcggaagaatcgccggaaggtaccttcgcggcaacgcccgcgcccgcccccacccctacagcagcgcccacgctcgtggcaacacccgtgcccactcctatacctacagcaacgcccacgcccgcggcaacgcccacggcggagaccatgcccagcgccgcgccgcgcatttccatgcacctggatgacggtggcgcaagcgtggccacagcgggccagcaaatcgcgatcagcggtggctttgctgtggagcagggggcagtggacgcggaggacttggtgttggccgtggatgggaaaccggtggaagcggaaatatgggaagaggaagcggggtcctttgctttccgggcctctgtggaagcgccggatgcccgggatttcctgcgcctcgcactgcagagccgggatggcgaagtggtgtacgcctcggaggaatggacgattgttgcgcccgccccagtcttgcagctttcgctggaatcgccggtggagcgcacggaaacgggcatcatcttgcggggcaccattgcggccaatcgggaaatcgattgggacgcggtttcgctgcgcgccaatggcgaggagtgggcgctttccctggaagagacggaaaatgcgcttttgcgcgagtttgctgcggaaggaacccctgaagaggggacggaaagcattcgcgtggtggtggactacgcggaagcaaacggcgatagcgcacgggcgaccggaatggcgcccatcgccacgccggaaccgccgccatccctggcgcttgtactggaggaggagaatgtcgcttctggcgtgggcgagatcgatatcaatggccgcgtgctggtgagcggcagagtggatgctgaagaaattgagctcgtggtcaatggcaatcgggtggaagccgaatggacggagatcgagggcggatatgccttcaccgtgcagctgaatatggatttgacggaaaccgacgcgctggaaatccgcgcccgggtgcggggagacgatgcggtggcgcccgtgcaggaacgcttgccggtggtagaacccacgcttgtgcccacgccggtgcggtttgcgcccattgccctgcaggcgcgggaagctttggatgcgacttggctaggcgtgggcgatgcgctcgttttaaccggttcggcagaaccggatgcagcgttggatgtgaccataaacggggaaatttccggcagttatgtggtggaagaggatggaacgttcatcatcgaaatgccggtggtcttgttcgaacagggcgccaacgcggtgacgcttgcctattcggggagcggtgcgaacgcggaagcgccggtggctctttcgattggcgtggataccatagagccgtcgctggaggttcgcccggcaacggtggatcagcatgcgcgcagcgttgaagcgcgggttttgcaggaagaagcggcctgcgaaatcgcgctttgggtggatggcgagctttggacggcgcttgaggcccaagcggattcttgggtgcgcttgccattggaaaagggcgagctttccgaggaaagcgttgtggaaatcgttgcccaagaccgcgctgggaaccaggcagtggaaacggtggcctttgcgcgcacggccgcggagatcgtggttggcaaccgcgagacgctggaaagcacgatttttggtgcagatgcacgggtttggcttgcactatcggcagagccagattccctgctgcgcgtcgcgtggggcgaatgtacttgggaagtgcccacgggcgaaacgggcgagctggaaattgccatagaacagggtgcgctcctgcgcaacactccggacggcacggcggaagccgtggcggcccagggcgagctgctgcccgcgcagggagaaaataccctggagattggctacatcacggtcggcgggtatgccatggaggatgccccgcaaacgacaatttccctgcagtatgacgggattgccccgcagatgcgctttgcccaggaacggcttcttccggggcagaacgagatagagatccaggtgcccggcgaagaaaatggctgggaagccgtggcgcgggtggacgaaagggaggttggccgcacggatggcggacaagtggcggatagcgctgtgctgcgcctggcggaaggcgagcagctttccaccggagatgtggttgtggtggatgtatacgatgcggcgggcaaccgggcgcaaggaacgctcgcggtggaggcgctgacccccatttccatcgtaaaccgcgaggaagctgcccaacccaagggagccagcgaaaccgtgcgcctggaaatcgcggcggagccgggcgctgtgctggcgctttccatcgctgcggatgaggaagagcaggcgcaggtttctgccggagcagacggaatggcctattgcgatatgggcgaatggctgcgcgaaggggaaacgacggttgtcattcaatacgcggaggaaaacagcttccccgcagcggcgctggcgggaacgcaagcggatattgtgctgtaccgggatactttgccgccggaactttccgtggagcccgcgatcatcacgcgcgataccatgcagctggaaatcgctgtgccaaatgaagaaaatggctatgcgctgcagctatggctcgatggggcgctggtttttgaaggggagaattccgcgcaagtgcccatccttgcggaatacgcactgaaggaggataccagcatccaggtggtagccgtggatcgcacgggcaatcgcgcggaaaagcaattgcactatgaaaacacgagcgcgctggccgaagcgctggtggacgccgaaatggtggaatttggcgctgtgaacgtgggggatacgctctctacggacatcttggtttgctgcagcggctacgatatgcgggatggatacgtcacaatctatttcgaaagcgaaagcgatggccacagctacagggccgtgtttgagcgggaagaagtgacggattcgcagcgcctgtcggacgtgtacgcccagggcgccctcaacttgaattatgccgattccgcctatatcattcactccatttctgttcccgactgcctcagcggcgaatatcgggtgaccatgcggattctcaccgagcacgaggagtattcctttgaactcggcacggcgaaacttggcgaaaaggaaaaagtgggcgagattggcgaaccctatgtcaatctgggtgcgcagtatgcgattggctttgatgccccggcgcagagcgctttccgcgcggacgatatcctgcttacgggctgggtatgccgccagagcggaagtacgccctattttgaacggtatgaagtgttcgacgatttgggccgcaaagtgtggacgggctattttgaaacgggaaccggggagctcacgcaatacttccgccaggatatcaacgagaaggtttccgggctggccaattgcgaaatggaagcggccgggtttgtgctcgcgctggatttgagcgaggcaggcttggcggatggcacggcttgcacgattcagctgtattcttccaacgagataggcgtgtcgtgggagacggtgcacgccaccattttgattgattccgcggcgcccactccggaacatcgcacgccgacaagcgcagcgaatgttgcgctgccggagaaggagatggagatcgaaaacacggaaatggacgatgcgcaatctgagggcgaggaacccatggatgctgaggcgatgagccgcctgggagaccgctatttctatggcgaggagatagagcaaagctatgaacaggccgaggaatggtaccggcgggccgctgaggcgggagatccggccggaatgcttgggctggggcgttgctacgaggaagggtacgacgatcaggaaaccgcggtggaatggtatcggcaggcggctgaagcaggcaatgccgaggcgcagtatgccctggggaatcgctattatttcggcgaaggcgtagagcaggattatgccctggccgtggaatggtatcaaaaggccgtcgaaggcggcaacattgatgcgatgaacaatttggcgtattgctatgagcttggccaaggggtggagcaagattatgcgcgggccatagagtggtatcaaagagcggcggacaccggacacgccgaggccatgaacaacctgggatttgcttatgaatatggcaagggcgtggagcaaaattccgcgcaggctgtggaatggtaccggcgggcggtggatgcgggtagcatcgatgccatgaacaatttgggatttgcttatgagtatggcaatggtgtggagcaggattatgagcaggccgtagaatggtaccggcgggcggcagacgcgggcagcgatagcggcatgctgaatttgggcgtgtgctatgattttggccgcggcgtggagcaagattcggcgcaggcggtggagtggtaccgcaacgccatcgatgccgggaacgatgcggccatggtgaacctggcatattgctatgaatatggccgcggcgtagagcaggattatgcgcaggctgtagactggtatcaaaaggcggcggatgccgggaatgccgatgccatgaacaacttgggatattgctatttcagcggccacggcgtggagcaggattatgcgcaggccgtggaatggtatcaaagggccgtggatgccggtagcgccgcggcaatgaccaatttgggcatcaattatattcttggcaatggcgtgcaacaggatgccacgcggggcgtggagctgctccggcaggcggcggatgcgggaagcgccgaggccatgcataacctgagcgcttgctatttcgcgggaatgggcgtggagcaggactatgtgcaggcgctggaatggagcaaacgggcggaagcaatccagcctgggattgccacggaagagattgctcagctggaagaattggctgccgaacaggccgaggaagcggcggaagcaatgaacctggaagacggggatagcggggaagctgtgctcgatttgcaaacgcgtttgattgaactgggctatttggcgcagggcgaagatgatggcgcgttcggcggcaaaacgcaggaggcgttggaacgcttccagcaggatcagggctgggagccgacgggggtcgccacggcggaagtgcaagaggcgctgttcactggcgatgtaggcggcgaagtgaacttcgaactggcggcaaagtggtatcaacgggcggcagacgcgggcgacgccgcagccatgttccgcctgggggattgttatttccatgggcagggcgtggaagcggattccgcgcaggccatggaatggtatcaaaaagcggcggatgccgggaatgccgaaggtatgactcgcctgggggattgctatttccatgggcagggcgtggaagtggactacgaacaggctgtggaatggtaccaaacggcggtggaggccggggatgccgcagccatgagtcgcctgggcgattgttatttccagggtcggggcatagcgatgaacttcgtacgggctgcggaatggtaccagagggccgctgaagcgggcaatgcggatggtatggccggtttgggccgctgctatgagggcggttatggcgtggagcagaatgaagagctggccatcgaatggtatgaaaaggcgattgaattggggaatgcgcgcgcgatggcgaatttcctggcgtattgctatgaaacggggcatggcgtagagcaggattctgcgcgggcggcggaatggcgacagagggccgcaaatacggaagacgatggtatcatgctggaattggggcgttgctatgcggaaggcgagggtgtggagcaggatgacgcacaagcggcgcagtggtatcagagggctgcggaggccgggaatgtggaagccatgtattgcctgggtgagtgctattccactggcagaggcgtggagcaggatgatgcgcaagccgcggagtggtaccagagggcggccgattccggccatgcggaagccatgagccgcttgggcaattgctatttcggcggcacgggcgtggagcaagactatgcgcaggccgtggagtggtatcggagggcggcggatgcaggagatgccggagccatgtaccgcttgggtgagtgctatttttcgggccttggcgtggagcaagactatgagcgggctgtggaatggtatcgtaaggcggcagatgcgggaagcatcgcagctatgtttcgattgggagaacgataccgggtaggccttggcgtggagcgggattatgcgcaggctgtggagtggtatcagcgggcgattaacgagaaagatgtggatgataatagttattttagtattagttatataaatgcaaaattgatagaatgttattatttcttgggcgaaagctacttcactggcgacggaatggaacaagactatgcgcaggccgtggaatggtatcaaaaggcggcggatgcggagaacgccgaagccatgagccgcatgggggattgctatttccagggcctgggcgtagagcgggattatgcgcgggcaattgaatggtatcaaaaggcggcagaattgggagacacccgcgcaatggtggctttgggaggctgttatgaagaaggtttgggcttggagcaggataatgaacaagcgatacagtggtatcagaaggctgccaaagcaggaaatccagaagcgatgatgtcgttaggaagttattatgatgcgaatgccaaggatcgtgaagatatggagctggctgcagaatggtatcagaaagccgaagaagcgggaagcttggaggctaaggccaaggtagcagaaatttgctatcaattgggctatcatggtctggagcccgagggtatagaagaagggctaatgtggtatcggaaggcggcggatgcaggaaatatcgaggcaatgagagaaataggtactttctatttttatcatggcgaaaatgacgaacaaagatctttagctgcggagtggtatctaaaagctgccgaagctggagatgatcaggctatgcactttctaggaggctgctatattggagggataggtgtagaacgggattatgaaaaggccatagaattgtatcggaaggcggctgaagcgggagatgccggagcgctgagggatttggggttttgctatgagcatggtgtgggtgtggagcaagattacgaacaagcagtggaattgtatcgaaaatctgcggaatccggttatacccttgcaatgggagacttggcatactgttaccggcagggcaatggcgtagaaaaaaacaatgaactggcgctggaatggtacaaaaaagcaacgcaatggggcaaacctcaggcgatgtacgattgcggggaatttttggagactgagataaaggactatgtgcaggcgctggagtggtatcaaaaagcagaagaaaatgaacctggaattgccacggaagccatcgcccgggtagaaaaattgattgctgaagaggcccaagaagcggcggaggcaatgaacctggaagacggggatagcggggaagccgtgctcgatttgcaaacgcggttgatagagctgggctatttggcggagggtgaggccgatggcgcattcggcggcaaaacgcaggaggcggtgcaacgcttccagcgggacttgggctgggagcagacgggcgttgccacggcggaagtgcaggaggcgctgttcactggcgatgtgggcggcgcaatgaacctcgaactggcgacaaagtggtatcaacgggcggcagacgcgggagacgccgaagccatgagccgcttgggcgattgctatttccatgggcgtggcgtggaagtagattctgcgcaggccgtggaatggtaccaaaaggcggcggaggctggcaatgccgaaggtatgactcgcctgggggattgctatttccagggacagggcgtagaagtggactatgagcaggctgtggaatggtaccaaacggcggcggaggccggggatgccgcagccatgagtcgcctgggcgattgttatttccaggggcggggcatagcgatgaacttcgtacgggctgcggaatggtaccagcgagccgccgaagcggggaattcggatggtatggtcggtttgggccgctgctatgaggatggctatggcgtggagcaggacgacgaattggccatggagtggtatcaaaaggcggcgaatgcgggaaatgccgaagccgaggaacgcttggcggagtattcttcccatgaggcggagacgcagcagaatggcgcgcaggcgctggaggagtaccggcaggcggcagaagccggggatgtggacgccatgtattccctgggcgagtgctattccacaggcagaggtgtggagcgggatgatgcgcaagccgcggagtggtaccggcaggcggctgattctggtcatgtggaagccatgagccgtctgggcaattgctatcttagcggcacgggcgtggaacaggactatgcgcaggccgtggagtggtaccggcaagcggcggatgccggagatgccgcagccatgtatcgcttgggtgagagctattttacgggccaaggtgtggagcaaaactatgcgcaggccatcgaatggtatcgcaaagcggcggacgcgggaaatgctgcggcaatgcttcgattgggagaacggtatcgggtaggcctgggcgtggagcaggattatgcacaggccatcgagtggtatgagaaagcgctggacgcggggagtgaagattctaatactgcgtttcatactggatataccagcacaaagctgatagaatgctattatttgctgggcgagagctatttcacgggcgagggtgtggagcaggattatgagcaggccgtggaatggtatcaaaaagcggcggaggccggggatgccgcagccatgagccgcctgggggattgctatttccaggggcagggcgtggaagcggactacgcgcaggccgtggaatggtaccggcaagccgctgaagcggggaattcggatggtatggtcggtttgggccgctgctatgaggatggct

SEQ ID NO: 3860 - DNA, 32759 bp, Unknown
  16S sequences of unknown bacteria
cggacagaaaagttgttgttcttcctacaagaacaatcccccaggggcttactgctatgctgaactttgacccggattcatcggaaaaggacaacgccattaacatggacgccgccgcacagggtgtacaaacaggttctatcacatttgccgcaagaaattccgactttgaaggccacaagataaagagaggcgatattctcgccatggaaaactcaaaacttgcctttgttgacaagagcgttgagaaagccgccgttaaacttgcaaagcagatgatggacaaaaactcttcatttataacggttatctacggcgagggcataacagaggaagaggcaagccgggtttgcgaacagattaagaaacacgctcctaaaggtgcggaagtaagtgttcttgaaggcaaccagccggtttactactacttgatttcagttgaataatttaggattaaattccctatttgaattgcaccccaaaagcgtttaacttttggggtgcaatttgatttatcgggggtttttatttgtatctttttccgatttgtgaaacaaaatactcgcgaaaaggcaggttgcaattccaagggtaaaaatcggtttatatgtgccgaaaatatcataaaaagcaggtatgccccggctaagtgctgctgtggaaaaattgtaatacatttggctttttgccaaaaaaggtttgtatttttcccggccgtagatttttcggaacaaaatcggcggcagagacacgctggcggcgaaacttgtgcctaaaataaaggatgcgaagtaaaaaacggcgatatttgcatctgcaaaaaagaacaaaacaagagataaaccgatggcgacacagaaaccttgggcggttttgaaaatacccgctttctttgccgccgccccacaggcaagtttgccggcaacattgcctgccatgctccggctgacggcaaagcctgccgccccactgccgaaatccaggtctttggcatacaccgccagttggtttgcaacgggggaagaggcggttaaaagcaatattcccagccgagcagtgataaattttatatttttaaattcggctttatcaggggaatactccggcttttccttttctgtttcagatggggcaaacataaataacagtgcgaaaagataaaccgacaggctgattgcggaaaatataaccgccgtttttttccggctaaaaatctttatcatatatgaacagatagggtttaccaaaatgcctgccccgccgccggaggcggtaactatacctataattccggggcttttttcggcaaatcgggagttcagcgtgacgcacagaagcatcataatactgccgctgcctatgcccataaacacacaaagaaagtaccaccgccaaagagaggaaaaaatccgccccaaagccattgaaatacagacaaagatacctaaaatcagcaggactttctttgcggttttaccgttatagattttggcgataggggaaacgctgagagcagaagatataagggtaacggtatagcaaacagccatttgcccgggcttaaaattgttttcttccgccagggcggcaaaaataaccggccttgtgttcataaccgtgccgatgctgaaagctgttatgataatacagcttatcacaagagtttttggggaattttttattttttctatttgtttttctcctttggaaaaagtgattttatttaacggcggaaagggggtttaattgctcctcacatggccgccgccgacagcggcatttaaaatatcttttatttacagcccacaaaataattgttcccggatttttgcaaaataaaacacctttgccgagataatctcaaacaaaggtgtttggcaatattaaattaaaatctttttcgggggttatttcaaactgccgtagtaagcgcacatttcctttattatcttggcaaacaattctttgtccgcttccatacccacgtaacaattaggttctttgccgcttttatcttcaaggtctatgactgtttggccgttgttggtaacatcgccatcctcaacataaacatagtgcttttcaaaccttaaaacatccgggtttataacgctggcaactgccaatgcatcgtgaataacattgttgtcctggcctttgtcaaagctgtttacctgtgaatactttgagagttcacgcacaaggtaagccttttcgccgtcgccggaaagtttaatcatatcatcaaaatcttctcttgaaagagccgcagagtgggtggagttaagacctaccatccaaacttccaacttttcaaaaacctgttttgcggcagttgggtcaatccagatgttaaactccgcagtttcaccggatttagaaacattgccgaatgttccgccgcccataataacaaattttttaagatatttaggcaaatcagggtgtttttcaagtgtgatggcgatatttgtaaggggacccacggcaaagagtacaagctcgccatttgcttttacggcctcctcataaattacatcccatgcaggtttttcgtcccgaggcaacttgctctccgggaaaacaaccgtgcctacgccggaagccccgtgtgtgccgctggcatcagttgtgtattcctttttcaaaggcctatccgcaccgaaagcaacacggcaatctatgcccaacatttcacgcaggcaaagagcgttttttcttgttttttcagcagggacattgccctcaaccggtgttattgcctttatgtcaaaaagcgggcttgagtttgccaaagcgatggcatagctgtcgtcaacgcccggatcacagtcaataacgataggtatttttttcatattcgatctccttagtgtattatttgagaacagtataacataattactatatcatttcaacggagaataatttgacgattttatatataaatttcacaaatttgaattataataagcccaaaataaagctatgggacagtgcagttgaaaatttcttctgcccaaaactttaacaggagtttgattatggattttttagacggattaaagaaagaatttcagattgccaacggtgttacactgatttttggccttattttgcttatttacccgggattttccagccgggttttgtgtaatgttgcggcggcgtttttatttatcaaaggggtgtggggcatcattgtgtctttgcgtgacaaagttgacggcatatccctgccatttgaaacaatcgcaaatattgttttggcggcggccggcgttataacttatttgagaaaagactttgtaatgtcgattataccttttgttttcggtgcgtttttgctggtagggggaatttcctcattacagagggctttccggatgaaaaagatggaatatcccggttggtcaaccggtttgatattcaccgttttgaggattatattggctgttgtgcttattttaaacccattctcttccgctatggcccttataagatttataggtatttgccttgtttacgacggtttggcaggggtttacacatcggtacagatgcttaaagccaaggcacgggttaaaaaggctcaggaagaactgcgtgatttgaacctttcaaaagacaagggcaatgttttcgaggacaatgttgaacatgttgacgcagaggttgtaggggttgttgaggacattaaagaggctgataacgaagaataaaaaagcataaaaatacggcgtgagattttcacgccgtttttattttaaattattcttatctttttgttttcaagtcttattttgtcgcttatcatggcgataaattcactgtttgtgggcttgccgcgcatattgtttattgtgtagccgaagtaatcgtttagcacatctatattgcccctgtcccatgccacttcgatggcgtgtcttattgctctttcaactctcgatgctgttgtgccgttcatttttgcaatgtccgggtaaagtcttttggttataaggccgataacctccggatcttccacagacattataatagattgccttaaaaagttatatcccttaatatgtgccggcacacccatttcatgtaatattgcggtaacacgttcttcaagctcattgttagggcgcttgtcatttacctttaacatggataccgcacggtcataggcgatttcaaccgaaaaaggtttgacataatagtagttgaaacctgctttcataatctgccttacggtgtcgtcattgtcaaatgggctggtggcaaaaaacaatttaggatgatcttgaagtttgtctgctttttcctttacggtaattgcgtccatcttaggtaaaaacacttccgtaataacaagatccgggtgatactcgccgatttttctcagcagagcttctccgtccttgggacaaatggcgtagtcaatttttttactgtcaaaaaagtttctacattcttctataaaatttgcatttccatcacataataaaattttaatactgttcattttaaaactcctatgtgtaaatttgttgtggcttcggcggggccggtgccgttaccatgtttgtttggttttgacaattgtctgtattaaccaaccaaatactaccatttcacagttttgtgaacaaggggaagcttgtcgaaacaattacttaaaaaataatatttttacaaaaacattttacaacaatttgcgacttaattttatattaaaaaacaaaagcgacgaaaaccgtcgctttaaatataattttagtatttttaaccgaaaaacttaccggttattttttctgcacgccgcaggtaccccataggtacggtcataccggatattaccgggaaaaacgccacaaagaacaatgccgccaaggcaacatatacgccgccgattattaaaacttttttaccgtgtttgtcataaagtttttttaccatataggagattgacgccaagccgaacacaactgccgggtaatagtgatagatgaaagtatcccttgaaataaacgcccatggcaaaagccggctgcaatagcctaaaatgataacccgggcggaataatccttttcctttgcaccctttacaacggtgtataaaagggcaggtaaagcgccaaaccacagcaccggattgccgaaaacggaaattgtgcttacattgggcccttggtaatttaccgcaagccaaacaggggttttgtcaacaagccatgtgtaccattttgaggcgcagggatgtgccgaaacaagctgtgaatgatacctgaacatattttgctgtgtttgtataaacaggcttattcccgcccctttggtgctgcctatggcaaatgcgccgtaataaacaaggaaaggaaccgccacaaaggccgcaaaacaaaatgcgattgtttttaaaatatagctctttctaaggtctttattttcgatttttttagcctttgcaaacagagtaataaagaaaaccgcagccaagcctaaaaccccataaagggcgctccattttgtgcctgccgcaaggcccataaacaaaccgcttaaaagaagataaattttttcttttttatcaccgatttgtgtgtctgcgtattttaccataaacagatacatcaaagtcataaacagcaccagaaagctgtcaacggttgccattctgcccatggtatagcgcataaaatcaagagctgttaaaatccgtccaaacagggcaaatctttcatcctttaacagtgacaacaacagcaggtacacaacaaatataaggatgccggaagccacgcagcctaaaattcttgcgccgaagggtgaattgccgaatacagtcatgcccaaacctattaaaattttgcccacatgtggatgagtggtttcgtacattgggtagccctgtataaattcgtaacctgagcgaaggaaatatatctcgtcaaaatatgtggaataataatattttgaatattcgtccacatttatgagaggaaaagtttctatttcgtcaagtgtatttgtgggggaatgttccccgaagtcgccggttatttcggttatattgccgtgtatggcgacgccgttttcccgacttacaataagttcgttaagtacgctgtcggctttatcggatgttattttaatctttttggcggtaacggggaacacttcacactgccaagagaacacattgccgtttgtaagtcgaattgaatttatgatattatcccggctatcgtatgcggttacggttaagtcgtagcctattttataagagccgtcatattcgccctctccggcataggcagtgagattgtatatgctttgttcttcatcatattcgattacaaatccgtccccgggatttttaaattgacagtatgtttggggagtatcttttgtgcccaggccgcacattccgccgagagtaaaaatcacagaccctatcaccgccccgcaagtgtacttttgccttaaatttaatggcagttttcttccgcccttgctcatataaatatttattgcaatcgcccccagggaaactgcggccataagcaaacctatgtacaatgcgccggttttatcgaaagcgtcgttaaaaacttcccatatattttcataaacaccgtatgaaaccccggctgttaaaaacaaaatctcccttctggggctgtaagcgtaccaaaggagacctatgacaatcagcggcagagagtatctttcatgcatcattgtgcagaggccgaaaaaccgagccagcaaaacaaaggaacagccgaagattttttctttaccctctctcttataccaaagtatggcagttaaaaccaggagagcaaaaattactatcccgttgatattatcccctataacgtaattatccagctttttccagttaagatttagaaccgaataaatatttgaggcgtttaccgtaaagtagcggtagccgttaaatgtgcttttgtacaaatccagcaaccacagaggatttaaagattttgcaaaaggcaagctgaaaagatacattgtgccgccgcctatcgctattgccccggcgccctttttaacacttttgctttctattacataccacaaaaacacagggccgaaaagcaacgcctgaggctttgtaagtaaagccagggcgtacacaaaggccgttagatacaatttatcatttgccaagagaaccaaggaaactgcgagcaacagcataaaaaagctgtcggtttgcccccaaaaggcactgttgcagatcatggccggggaaaatgccattacaatgccaaggcacaggccggttaaatcaccggcttttttgcggccaacctcaaataccaaagcggcaatgagaatgtctgcaatcattggaaacagcttgattaaaaatatgtgccgagggctgccgtaaccgatgcccatggcatttttgataagttgagtgaaatacagaaagtacagatagaacgggggataatccaaaaagaaatccccgttgtacatatttttaaaaccaatatcaacagtcttttccgcccatgtccgataacaggtaaaatcatattggtgatataatccgtatgttgtatagtaacatcttaaagcaaatgcccctatcagaacaagagcaaaaataatatgaatattttttatctttctatctttgaatttttcgtttttgcaaatcaggcaaaaaatgacaaaaaataaaaaataccctgcaatgtaaacagaactcatatatttacctctacgtgattatttatattcttacagtatttaatcacacttttaaataaaagtaaagttttttaaagacctaaaattgtgatgatgtaacttttaaatatttctttatcaagctggcaaaaacaaggcatttatttcaccaaaagaaattttgataaaaaacaagggttagttgtgtatgttttccgcaaaaattcaggtgaaaaatccctttttaatttttattggcggcgaaaatttaacagatgaaaaaaagattttaattttccgttaaaagtaggtaaaacaggccttttatttcacaaaacgcaactttgataaaaatacaggttagttgtgtacaatttacgcaaaaagttaaggcggagaaattattccccgccttggatgtaaaacctgtttattaagttttattttgaatatttttctattgcggctttcatagcgtcaatatccgcaccgttgtccgcaaggtattttttgctttcaagttttttaacaagatccttaacatgacaaaccggcagggactttggaacagctacggagcagtaatcgtttgtgtaaacaaccattgtttctatttgaccgaacttggctttttctgttctgtaaatttctctgaaaagtctttcggcaccgttcattgcggatacagggttttgaattttgctctttttttcttcaaaaatctgcgtccatttttcttccccgtcggagccgtaaatctcgccgccgtggccgtcaacgctgaatgcgattgtgccgaagtagcaaagcaggataccgtcaaatgtgtattctttttcgccgtaagctattgttgttttgcccaaaacggtaaagcttctgatttttgcgaacctattaagagcttttataagtttttcttcgcccttaatatcgtagttgtactttttctttctgaaaaagatgatgtcctcgccgccgagaaaataaagcatcataaaaaatgctatgattataagtaccaaataaaggtactttgataaaaattctaacattttatcctccgaattttgtgattgtcaaagtatattatatcaatatattgcctaaaagacaacaaattttaaaaattattatatataaaacttgcagctgcgccaaagccgccgttgttcataataaagcctgccataatcaaagccacaaggccatagtagcagacccagcgcaaaacagggggcatcttatcgaatgcgtttgtaaggcatttgcctttaagtttaaaatagcggtacaaatccatacccacaagaataacaatgccgataaagcagaaaccgcagtaggcgtaagccaaaataggggtggaatcaaaaccagattttaccgcctgcataagctgagccgggaatgaccgcagtgtaaacatattgcggatgtagtacaccgccgaggggatatccttacagcggaagaatatttggctgaatgttgtaagtgagaaaaccccgaaaactttaagccaaaaccgcaggggcttttgcttctttttaggcttgccgaacttgcggtgaataagttcttcccctacgcggtacaacccatgcaaaagcccccaaatgacaaagttccatgtgttgccgtgccaaatgccgctggaaataaacaccaacataaccgcaattaaaaccggcggtttttcaaaaattttgccaaacttttttaggggattaagccaaacaaaaggggtgaatatatagtcctgaaaccatgatgacagggttatatgccagcgccgccaaaattgagagaaatttgtggcaagatacggtgtgttgaagttttcccgaattttaaagcccaaaaggcttgcgctgcccctggctatgtcgcagtagccggaaaaatccgcatagagctgaaaggaatacataaatgccgtgaaaataagaataaagccggagtaggagtacaaatcactgtgaacccgatttattgacattgccaaaacatctgctatggcaatttttttgaaaaagcccaaagccataagctgtaagcctttttttatcctgtcatagtcaaaagtgtgttcttctttaagctgtggcaaaaaattatttgccctgtcgataggccccataagaatgtgtgggaaaaaggatatgtaaaccgcaaaatccactaagttatcccggtgagaatatttacctaaatatatatctataaggtatgaacttatcataaatatatagaaagatatgcctgccggcagccgccaatttgaaagattaaatttgacaccccaaaaacttgttatccgcccaaggaaaaatttgtgatacttaaaaaataccaatatgcccaaatttaaaagcaacgaagccaaaaacacgggtcttttctttttgccttggcttttttcgattgcccggccacaaaagtaagccgcaaccgtcaaaaccggcataaggaggaaaaatcgcacctcgttacaaaaataaaaataataatttactgccaaaagatagatgttttttatctttttgggaacaataaaataacccaaaaccacaatcggcagaaaaatcatataatttacggaattaaaattcattttatacctctgttaaatatatcttatttattttatcagctatgtaaaggaaaatcaaggttagcgcccattgatttttgtatacaaggagaagttgacaattttacgaaagtgaagtataatcaaaatgtaaaaggtgctaccggcaaacggtcagctcccgaaaatattttggttaaaaataaccgtgcatactggggagtaggcggttatttttttgtgtttttactgttgctgccgaacatatatccaaaactgaacatagctacggcaaagctgataatagaaatcaaactttctgtcgtaagcatacaacaccaccctctttctttaaaagtcggagggcgcaaaccctccgcagagggcactaaccgcataccttttgtggtaacaccttggaagatattataacaagggtcgacatatttttcaacgatttatcggggtaatgggtgaaaacatagcgtcattcggcaaaaatctattgaaattttaaaagatatatagtataatccaatatatgcttgtgtagcacagccggtagtgcagctcattcgtaatgagcaggtcgcaggttcgaatcccgtcacaagctccaaaacctgcgtaaacacggcgttttcgcaggttttttctttttcagaaatacatttcaaaattaaattcgcaacaaaaaatctcacttctttacgaagtgagattttgtttgtttattcgttttttcgttcaagaccttatgtctattcaactatttttatgtgaattatatctttctttaatacaatatgttattatcattataacaaaataacaaacaaaaagacccgcataagcgagtcttcaataatcacacactgtgatgttggctgagcaacgatttggataaatctttatttgaacttaatagtgtaaaataaggttttaaacaagtttatagtagcatttttttgcacggttgtcaacaatggttttaagggggtaattttatggaaaaagattattatttagggcttgatataggaacagattcagtaggatgggcggtatgtaatccttattatcaaatccttaaatttaagggaaactctatgtggggaatacgactttttgacgagagctgttcagctgaaaaacggcgagaatttcgttctgctcgcagaagaaatcagagaaaacgtgaaagaattgctttgcttgaaatgctttttgataacgaaatatgcaaagtggatccggctttttttattaagctccatgaaagcaatttgtattttgatgataaatcaacaaatgttccttacagcgttttttccgatgataactatacagataaagattttcacaaagaatttcctacgatttatcatttgagaaaggaacttataaccaacaaagagcctcacgatgtaaggcttgtttaccttgccattcatcacattataaaacaccgtggacattttctttttgattattcatataaggatgatatttcgggagactttttacctgcatataacaattttaaaaattacatctttgataattatgaaattgaattggaatgtaatgatgtagagaaattctctcaaatattgaaaaataaaagcatcggaaagaaaaagaagaattcagaaattgccgcactctttggcattgataaaaaaaccgataaaagattatatagtatgctttcacttttaagcggctcaaagattgctctttttgatatttttgaggatgaatcccttaaagatgttgaaaaaaaatatgtttcattttcttctggatttgatgataatgaaagtgaatatcgttcatatctcggtgaacgatttgaacttttatgcaaattaaaagcagtgtatgattgggcgatacttgccgatattttaaacggcaaagaatatatttccttttcaaaggtagatatatacgaagagcatggcagagatttaaaaactcttaaagaatatgttataaaatatgcacctgaaaaatacaatgaaatatttaaaaaaagcatagaaaaagtaaataattatgttgcctattcaaagcatataaaaagcaataaaggcacaggcgttttaacttcaacctgttctcaagaggagttttgcgcatatttaaagaacattttaaagtcttgccaagacgatcggtacattaaaatgtttgatgagattgaaaactcgacatttatgccaaagcaggttacaaaggataacggtgttatcccaatgcaggttaatgaaaaggaacttgtagctattcttgataacgcaaaggaatatttgccgtttttgcaagaaaaagacagcaccggaaaatctgtttacgacaaaattattgcattgtttgaatatcgtattccatattatattggtccgcttaatactaattcaaaaaggagttggcttgtaagaagtgacgaaaaaatatatccgtggaatatcaacgaggttgttgactatgataaatccgcagaagaattcatcaaaaatttaacaagcaagtgttcttatttgcctgaatttgatgttgttcctaaacattcgttaatatacagcaaattctgtgtacttgatgaactaaataatcttagaattaacggtgaaaaaatcagcgttcagttaaagcaggatatttataatgatatttttaaaaaatattataaagtcactaataaaaaactttgtgattatttaaaatccagaaatattgagtttgacgaaataagtgggattgacaacgatttcaaatcatcattaaaatcctataaagatttgcttgaatatgatttaaccgatgaacaaaaggaatctgttatcaatgggattactgttttcggagaagataaaaagctcttaaaaaagaggctcaaaaacgaattaggcaattatctttcggatgatgaaattaaaaaaatttccaaactgaaatatagcggatggagcagactttcaaaagaatttttgactgaagttgaagcaacttgtaaagaatcgggcgaggttgtaaatattattacagctatgtggcaaacaaataacaatttgatgcaattactttatagcaatgatttttgttgtgatggtaaaggcaataagtcttttattgataaagttaatgagctaaattcgtttggtgctgataaaagcttaaatgatataatcgacggattatatatttcacctcttgttaaaaggcctattcatcagtcaattttaataaccaaggaaattgaaaaaataatgaagcatccgtcgaaaaagatattcgttgaggtggcaagaggtgccgaggagaagaaacccacggtttcaagaagaagtgctcttttgaatttgtataaatcctgcaaaaaagattattctgacttgtatgattatttgcttaataatacaaccgatgaggatttgagaagtgacaagttgtatttgtattttactcaatttggcaaatgtatgtacagcggagaagaaatcaaattggacgacttgttcaacaaaaatctttatgatatagaccacatatatccacaatcaaaaatcaaggatgacagtttaaataacagagttcttgttaagaaaaaaataaattccaaaaaggataatgaatatcctatttcaagccaagtaagagaaaaaatgacaccgttttggaaaatgctacttgaaaaaaaacttattgacaagaaaaaatatgaacgattggtgagaaatgacccgcttagccaagatgaactttcagaatttgtctctcgtcaacttgtagaaactcgacagtcaacaaaagcagtttcgactatccttaaacaactttatcctaatacggaaatagtttatgtcaaagctaagttaacttcggattttcgcaaggaatatgatatgctcaaatgtcgtgaggttaatgattttcatcatgcaaaggatgcatatctaaatattgttgtgggcaatgtttacaatgttaaatttactcataacaaaatcaatttcataaaacacttgcaaaataacgataagggatataccgttaatttgacttcaatgctaaagcataatattgacggagcatgggtagcggataataacgaaactttaagtaccgttatagcaacaatgaataaaaacaatattcgttatactcgttatgcttatgagaaaaaaggtggattttgggatcaaactatatccaaaaaaggcaaggcacaggttcaactaaacaatgttttaagcaacaaagaaaagtatggcggaagaacaaaagtttctgcaacatatttttcttgcgttgaacacggcgagaaaaataatcgtgttgtgtcattatttgcagttaatctttatgacaaaaagaagtacgaagaaagccctttggattatttgattgaaaattataatttgattgaccctgtgattaaggttaaaaaaattaaaattcaatcatgtatttcttttgacaatatgcgttgccaccttggcggtaaaggaagcggaggcagcataatagtttatcgcccggctgttcagttagtactgggctatcaaaatgaacgatatattagaaatataattcgctgtgccgatggtgatttgcatttacaatcatgtagtgattcaaaaaacaatataacttcagagcagaattgtcagttatatgatttgcttttggaaaaaatgtcaaataatatttatggtgttatgttctctgatttggctgaaaaacttgttttagcaaaaagcaagtttgagaaaatagaccttgttgagcagtgtaaaacaataaagaatattttgattatcctaaaaaataatgcatcaaaaggcgaccttaaaaatataggtgttaaatcaaacggagcaataagactcaacaataatatttctaaaatcaaagatgttaaatcgattaagcttataaatcaatctgttacaggactttatgaaaccgaagttgaacttgtaagcaaggaataaggagaaattaaatatgagccggcgcacagttgtggtaacaaaaccgtcaaaacccgattactcaatggggtatatgagggcaagagatgtagaaaacactgttaaaatacatttaagggaggttgcaattcaatattgatatttcgtgccgtgacttatcagaattgcttgttacatcatcaaagccggaaaacatttccgaatttgaagaaatacatataattgattatgatttgtgtgtaattgacacctgtgacaattagagatataatatactatatcttgtgaattaccctgtatataatagtggtgcagtttatttgaggtttgagaatagtgtaaattcataaggtatttaaactgtacggtgacgaacagcaggcagatttacagtttgagaatagtgtaaattcataaggtatttaaacttcggtgaagctcttgagaaatacaacggcgtttgagaatagtgtaaattcataaagtatttaaactatgattgaggctaattacactaccgcagagtttgagaatagtgtaaattcataaggtatttaaacatgctggacaacctcaaacttggctacggcgtttgagaatagtgtaaatttatatatttgttttatacacacagaaagcggttattaacagataacctatgtggaattgtgcaaatttagaaacacaatcgaagaatacaaatcaaaatgtaatgagcaggtcgcaggttaaaatcccgtcacaagctccaaaaccgccttttaaggcggttttttattttgccttttttaaattcacacaggggatttattttcaacatttcagggtttaatggtttaaaagtgcatttaattctgagtaaaaaatttaaaattaagccgtaaaaagagaaaaatgacgaaaattaaagttttcgacaaagttttcaacacagtgttgaaaactgtcaaaagccgaaaatcaagtaaaataagcaaatttcgacacaacacaaaatatgaaaggtcaaaaataaattttaggtattacaaatggtattttccctgagttttaaacatattcaacagagttttcaacattttaaccgataaattcgatttttgaccttggaaagttgaaaaatgttgaaaacttagttgaacatgtggaaaatgtggaacaatacgatgttcaaatgtggaaaatttcattatttagttgaaaaccgagtatttaataacaatatattgtggaatttcgtttattttcgctatggtaatatttggcaaaaataagatattatacacctttttatatcattttttaccattttgcctcaatttattttcaacatttcaacctctcgccggcggggtcaactttgcccttttgtaattttgctcactatatattgtgttaaaattcggtgaaaacaggtgattttacattctgtaatgtttaaaatccgaaaaagtttcaacattttgtcgaaattttcaacaatgatttaaaaatccatattaaatacggtaataaacgacagccaagtcacatatatttttatcgggtgataaagtgtacaaagttttaaacaataaaaaattcggcaaatttgttttattcgccgccgcaggtatgcttttaataataaatttttttaaaaccgtacctgtacaaagctacgaatgggggctgtattttgaaaagccccaaaccgtgccggtgccgaatttggaggacgaaaaaattaaccccttaggggcttattatcacggcaacaccgaaaaaaatatcatctatttgacatttgattccggctatgaaaacggcaacaccgaaaaaattttacgggccttaaaggcacacaatgcgcctgctatcttttttatgacaggacagaacatagaggaaaacccggagcttgttaaactgattttatcctatggacaaaaggtgggcaaccacagttatcatcatccggatatgtcgaaaaaaagccggaacgactttgaaaaagagcttgatttaacccggcaggcttacaaaaaaattaccggggaggatataccgaaattttaccgcccgccggagggtaaattttcccttgaaaatttgaaaactgcacaaagtttaggttatactaccgttttttggtcatctgcctatgttgactgggatccggcaaaacagccctcggaggaaaccgcctttgcaagaattaaagagagaacattccccggtgccgtttttcttttacattcggtttcaaaaacaaatgcggatattttagacagacagcttacattatgggaagaacagggatattctttcggagatgtggagaacttggcaaatgattacaatacataaacttgtaaccgttatcagagattgtattttctttttttgcgcaggttttatctgcgtttaaatcctcctttaattataaatgcgaaaagacgaaccttgaaaggttcgtcttttcgtttattttgtcggttttatttgataatatacataccgtcgccctgtttttctatttcacattcgtaaaatgtgttgcttgccagaataaaatcttcggtatcttttacaccggcggtttcgtatgccgagtgcattgcaagctggggcagacctatgtcaacggtgtttaaggcaacccttgtgttggagatattgcccaatgtgccgccgcctaaaatatcgctgcggttgtggaatgtttgatatttaacccctgctttatccaaaatcattttaaacagggcggcggaaacaccgtcggtggtatagcgctgattggcgttgtattttatgacgatgcccccgtttatagccggtcgatttgtagggtccgccaccgaaatattatttgggtgtacagcgtgggcgttgtctgcggaaatcataaagctgtttgacaaaaatcttatcatatcatccctgtcgccgccggcgctttttgttattcggtacagcacatcggaaaggaaagtactccgtgccccttgtttggtttcgctgccgacttcctcgttgtcgaatattgccagaaccggaagggatttttcctcttttgccgataagaagccctgcaaggcggcaaaaacacactgtaaatcatcaagtttagggcttgccacaaattccttgtctgcccctaaaatggtgcctttttgcctgttatataaaaacaggtcgtcgcttaaaatatcatctttttccacccctgccgcccgggcaatttggccgtaaaaatcaacggtctcactttccaaggcatacagcggtaaaagatccgtttgaggattcatctttttgccgtcattggctgttctgtccatgtgaatggcaaggtttggaattataagcaaatcacggtctatgtttaccagtttttgttttacgccgtttccctctttaaccataattctgcctgccacggaaaggggacggtcaagccaggtggagtaaatcataccgccgtagcgctcggtgttaaggcttatgtaggggccttgtttaagctgggggttttccttgattttaaatgtggggctgtccaaatgggcggcgattatgttaaaggcttttacatctttcggaattttaaaggctataaccgaagaataattccttaaaacatagtactttccgccggggagcaaaacccgattttcctgctcgtaaattcttgtaaaaccgttttcatcaagaatttttgacaatgtctctgcccggtgatagggtgacggacatttttctataaaatttaaaagctgattggtgtggttcatatactttgcctcttattcgttttttattatagtaacacaaagagaaaaatttttaaagcggtttattctgcggaggagacgattgtcattgaccgagctgctgcggataggtccccatctgccatgctgcccggtgcaaacaccgcaaccgcccaaactcccatacttctatcaaaaacggtagctgttgggtattcggtgaattctgcccggggagtattgcctcggtagttgtcggggtttatatatgcgtcgcttacaagggttttacttgtggcggtttgacaaaattcatcggtgtgtaccggggtgtaatcctgaagccacaaaacccgactgcttaatctaagctcccgaaaggcggctttataaatttcatcttggctaagctccggcacatcttcaaaaactccgtagcctattgtgcctatttgttcccctgccgaattgtatatcaaaaccggcgtccatggagctccgacaactttttcctccggctcctccacataccgcccccggggcagggtaatacccaatgaaaaaggtgttatatcgtaaatccggctgttgtaatcgtttttgccgtcttgatatgcgggaaattctatgacagttcccttttggttataattgacgctgttatttttcaaaacacttaccgggtgggtataaacccaaaagccgaaacacaaagccgcaaaacctgccaaaatccacactgacggttttgtttttttacagagcagaacattttttacacggccttttactgagccttctccaaagtaaagaggccgccgagctattgttcctttttcggctgacatggacagcagggcaagtgaataatttttccttgaattttcccctaaataggcaaccgatttttcgtcacatgccatttctatatccgagccgaaaagggaaaaagccatccaaacaaaagggttaaaccaatgccgaccaaggattaaaaaggaaagaaatttaaaaatatagtccttgcggcttatgtgcatagcctcgtggcaaaggacatattccgtgttttcccgccgaatgttccgtggcagataaattatcggcttcaaaattcccgccacaaagggggaggaaatattatcacttgtatatacgggtattccccttgtgaattcatattcagaggggtatgaaacagcctctttaagatttctttttaaaatcttatattttaaggaggcgtatgcgaaaaacagcaacaaacccacaagccaaattacagcggcacagtttaaaacggagagcttggcacctgaccctgataggccagacggcggcagttgaaccctgccaaccggaaagagccttgtgatattatcattaccgccggcagacacaataaagtaggaggccgaggaaatattgagaagtgcggtaaaaacgccgaatgtggcagggaaaataaggcgcagagccgctataatccataaaccggggcgcaccgaccttggggctttatacagcaatccacggagaataacaacggcgaaaattgccaacaccccatttaaacttgtgtttagaacataaataaaaatatcggatatttttgagataaataacatcattttacttttcctcgctgtataaatcaatcagctttttaatttcttccgcttgttgggcactcaatttttcgcccccgataaaagctgtgagaaaagccggcagagagccgttgaacatttcccctacaaaatttttacttctttgactgttaaattcttctttgcttaccaaagacgtaaccaccgatttttcattgcggaacagccccctgtcgcaaaggcgacgaagtaccgtgtaaaccgtggtacttttccaattaaggcagtcattgcaaatttttacaagctccccggaggtgataggctcgttatcccagatgatttcggcaaatttcatttccgttttggcaagatgacagttgaccatgattagtttctcctttctatctacaagttgtagattttactttattctacaacttgtagagttatttgtcaacatacaatgattaaaattttctgtttttggcaaaaataatgtgggggtgtgaattttgaaaaaatttaaaatatttattgcttcatttatagtcacatttgcggttatggcggtggcattgtcggcagtgtgcggacaaattttgattaaaacccaacaagcagaagtaaaaaaggagaatgtacctgtaaacataccgtctgcaagggatagagttcggctgtttttaaggcttggaaatgaggacagccgggtgtatcggataataaaattcaatgccatagaggggaaaataggaattggaattatatctccggaatttaaaataaaagacggttacaccattgacggcatttacaaacaaaagggaagtttggcctgtgttgaggaatttaaaaatgcctttggggtgaacattgacaagtatatattttgttcttatgatgagttaatggaaatttgcaaagactttaaagaaattgacatagaaccggggcagatacccggagctgcgaaaagctatcttttaaaaaatgccgataaagccgggcgggagaccataatttacgccattgaacaaggaggtaaatttttagacaacgccgtaggccttgaatttattttgtatgccgcagaaaattttataaataccaatcttggcaatttagacgacttattaaccgacggcataaaaagagaatttgaaagaataaacacggacattaacacatcttccttagaagattttacaagaattatgagctttttacatgacgggcggacatttaacacctgctttgtaaccggcgatgacagctttgaggcaggtgccgaaaaaattaaaagagttacagactgataaaaaattgcaagtccacaatttacaacagaaaacagccgtaaaaaaccctgttccgattttttcgaaacagggtttaaaattatgaattttttttccgtgaaaaagattttttattaaagttttacttatcttcatcaaatgagtgaggtttaacctgagccaagcccatggccaaaatttcaccgccgcgaattaaagccggacgaattgttttttcttcgtcgccctccaaaaattcaaagtacttttcgttgccctttgaatatttgataaccaaaatatccatttttgcaagataaagttcaacttcgtcaagctgttcaagggcaaaatccccttggccggaatatttagcctccataagataagataaaagctgaacttcctgtggatttacagccatagacaaggcttgcttttgcttttccgccgattgctgttctgcccggagaatatcgtccatttctttaaaaattgcctccaatttatcggccaaatcaccggcgtcggcagaaatttccacaacggttttgctctttaccctttttgtgtggaacaacataaaaccggaaaggagaataacaaagcagcctgtggccataaccaatatgtagccttgcatatcgtcaaattttatattgtgcagaaacatataataataaacggtaagcaataccataagtacacctacaagaagggctataaggccgggaagtgggcttttctttttaacattttttacatcttcgcttttttcccaaagtttttaaaggtttgttccgcaactttatcaagccccaagttaaaaaggttggttttaagactgcgacccatcaagaactctatgcacagatagtaaacttgtttggttccgtttccgtttgcccttgctataaaatctttctgtctgtcgcttaaaatttttctgatattcagcgcagcggctttgtaaatatcgctgtaatttgcacgctttaaatccgttgaaaattcacgtacaagtgtgtcaacaatcatattttcaaattctttggctgttatgtttacatgcataatatgctgtcctttcggtaagaaattttaaaactgtataaatctataattattatataaagaatattagcaactttcaactgaattttgaaaaattttactaaaatgttgcagaattctttttaatatagtattataataacagtaacaaatatatctttggcgccggtgcgccttatagactggagatgttgatatgccttataacaaagttaaaataaatgttgccggtacaagctatgttgtgaacacacaggacagtgaagaacaggttttgtcattggcaaaaaagcttgatgacgatatgaatgagatactggaaaaaactccgtcagcttcaatcaccgcacgggcggttttatgtgccttgacataccttgacgatttggacaaggccaacaaaggtgcggacaatatgcgtttgcaggttaagcagtatcttgaagacgcaatgagcgccaggagcgaggctgaaaaagttaaagttgagcttgaaaaattaaaagttgacattgaatatttaaaagcacaaagagagaataatggcaaataaatgtgaaattcttgctccggcaggaaatatggaaaatcttatcgccgctgtttacagcggtgcaaatgcggtgtacttaggggtgcaaagttttaatgcaagggcttcggcggcaaatttcagctttgaagagttgaaaaaagccgtcgctttttgccacggcagaaatgtcaaagtaaatgttacccttaacaccattttatatgacagagaacttgaaagttttaaagaaaccgtaaaacaggttgctgcttgcggcgtcgatgcggttatagcacaggatttggcacgggcaaaaattataaaagaagttgctccgggcattgctttgcacggctcaacccaaatggcagtgcacaatttggcaggtgccgttttgctcaaagaaatgggatattcaagagtgattttggcaagggaatgcacttttgagcaggtgcgagaaataaccgaaaaatgcggcatagaaacagaaatttttatacacggcgcattatgtatgtcgctttccggccagtgctacgccagcgcatttttagggggcagaagcggcaaccgtggcagatgccggggtacttgccgtttgcctatgtccgcaagaggcaatcttgatgacaatcatttgagccttaaagatttgtgcgccatggatatgcttaaagaaattgccgatatgggggtagcctgcgtaaaaatcgaaggcaggctcagaactccggaatatgttgcggcagcggtaaacagcgcaagaaaagccgtaaagggcgaagaatatgacaaacagcttttagccgatacattcagccgctccggctttacaaacggctatttggaaaataaaattgataaatcggttttcggcgtgcgaacaaaagaggacagcgaaaaaacaaagctcactttgccaaaacttcgtgaattataccgccgtgagggccagtatgtccctgttgaattcgagtttacaatgggcggggcaaagagtaaattgtccgtaaccgacggaaaaaatacatttacctcagaatttgaaaatacattacaagataccgataaggactttgaaaaatcggtaagaacaagtcttgtaaaattaggcggcacgcctttttatgcccaaaatgttaaatgtaatcttatcccgggtaaatatataccgctgtcccttttaaacggcgcaagacgagaggtcacggctcagcttttggcaaaaagggaagaagtaaagccccataaaattttcgattacgaaattcctgctttcccggcaagaaagcagaggaatttgcagtacatcgcaagatttgaaaagccggaacaaatcccctatgagttcacagatatatttacatatatcgttcttcctttggagtatgccgacagtgtgccggagaatataaaaaacaaaatatatcttgaattgccccgtgatattttcggcaaggaaaacaaaattcgccgggctgttgaaagggcaaaatcagcgggatacaataaattctgcgtacaaaacatcgggcatatcccccttgtaaagggatgtgaaattatctcgtcattcaccttaaatatttcaaacagcctgtctgcaacggaatataaaaatctcggtgttgagatagagacaatcagcccggaaatcacacttgaacagatagggcgcatcacaccggaagttaagacggcggttatcggttacggccatataccggttatgcttgtaaaggcctgtcctttgcaaaatgtccgcacctgcggagagtgtaacggcaagggatttttgaccgacagaaaaggcatgaagttgccggtgctgtgccatggaaaaatagcaggttacagggaaatattcaaccctgttccgctgtatttgggggataggataaaggagataaaagccgactttgtatcccttaattttaccgtggagaataaagcccgggttgctttgataatcaaaaagttcttagccggagaaaaattcggcggtgattttacaagaggtctttattacaaggcatctctttaaaaagacaggaggagtaaaaatggcaatttatttggcctcaaattccccaagaaggatagagcttttgtccagaaaagtcccgaagtttgaacatttttctcggggtaataaagaaaaagaatacccaaatttaaatccaagggaaaaggcaataagaagaagcaaggacaagtgcctgcgggccatatccaaaataaaagaggaagatatggttataatatccggcgacacggttgttgacataaacggcattgatttgggcaagccgaaagacgaggcggacgcttacagaatgataaaaatgctgtccggggaaagccattatgtgcacacggcaatgtctgtttacaaagatgggataatgtacacattttgcgatgacaccatggtgttttttgatgttgtgccggaagatgtcataagagaatacatcaaaacaaatgagccttatgacaaagccggcggctatgcaattcaggggtttatggcaaaatatatactgaatattcggggcgactacaataccgttgtcggtatgccggttgacagagtatataatttattaagatttttgaaagttatatgaataaattttaaattttgtagaaaacagtaaaaaagtcattgcaaaatgtatgcaatgtgtgataaactatttaggcaaaataaataagaaattataaaatggcataaatggcaaaaaggagagttgaaaatggcttttaataaaagcattggtatagatttgggcactgccaacacattggtatttatgaagggtaagggcgttataatgcgtgaaccttctgttgttgccgttgacacaaaaaatgacactgtaaaatatgtaggtgttgaagctaaggaagttataggtaaaacaccgggttcgatttctgttgtaagacctcttaaagacggcgttatcgcagactttgatgttacagcggcaatgttgagaatatttataaagagagcttgcggttcgtcacttttgtttaaaccgacagttatcatctgtattccgtccggtgtaaccgaagttgaaagaagagccgtaagagatgccagcacaaacgcaggtgccggcacggttatgattatcgaagaacctatggcagctgctatcggtgccggcttgcctattcaggaagcaacaggttcaatggttgtagatataggcggcggcacaagtgatgttgctgttatctctcttaacggcatagttgcgtcaaaaaatgttcgcacaggcggcgatgaatttgaccggaatattatcaactacatcaagagaaagttcaatcttctcataggtgaaagaacagccgaaaacattaaaatcgaaatcggcacagcatacaagttggatgaagaattgacacttgaagtaaagggcagaaaccttataaacggtttgcctaaaaatgcggttatttcttccgaagacatcagagaggctctttccgaaagccttgataaaattgttgaggccattaaggaaacattggagagaacacctccggaacttgccgcagatattatcgacagaggtattacccttacaggcggcggtgctttgctgagaggtatggacaaattggtaagcagtgaaacaggcattgatgttcacattgccgaaacacctcttgactgtgttgcaaatggcacaggttatgtgcttgaccatatggacgttcttaaagatgtccttgaagaaaacaacaagacattataagtacaacatttacatttgcaagctcttaacagggcttgcaaattttaattaaaatgtaattttataaaatatttacagtgaggtaggttaagtgaaccttaattctaaaattataagaatagttcttgcggttatagtggtacttgcaggtatgatggcctactatgcatctaacggcaaaactataaacggtctgcaaaatgccgccggtaccgctgcaaagccggcgcaggaggccacatcaactgtttcaggcggtatatcaaatttatttcaaaatattttcggcgaaagcgcaactcaacgggaaaacgatgaacttcgccgggagataaacgagctgagaaaaaaacaggtttcttatgacagaattttgcaggaaaacgaagaatacaaaaaaatgctcaatattaaagaccgggtggcaaactacgatattatcaacgccgtggttattggccgtgacggtgtagaaaatgcctattcatttaccatagacaagggtacgggagacggcatagaaattgatgatgtggtaatatcttcagacggcgttgtcggagtggttgtggaaacaggcgcaggcttttcaaaggtgtccacaattttaaattcttccgtaagcgcaggctgttatgtaggcgaaaacctggatgtgggtattgccggcggcagctatgatttaagtaaaagcgatatgtgcgccgtgcagtatttgcccaaaaccagccgggcaaaagaaggggatttggtaagcacatccggctatggcactgtgtttcccagcggacttataataggcaaggttaaggaagtcacggttgatgtgtccggcaactatttaaccgcctggacagagccggctgcggacatagaaaatgtaaaaatagtttttgtattgaaaaataaagtgtaaattatggataaaagaaaagtgttaattcgcaaagcggcgaaatatttaatatatgcttttgcggtgtttttgctgtatattttgcaatccgtgccgggctttttaaaaatctttggaataaagccggtatttataatacctttttgtgttgctttaagcgtttatgacgaggattggcgggcagggtttgtttatgttttcggcggtttacttgcggatctgtcatccggcagggtggccggctacataacaatcatgcttttgatatgttgtgttgtttgtgttgtggcagtaaaattcttggtaaaaccatctaatcgcaatgtttttatgctttcttttgcagtcatgttcattatttttacttatgactttttgctcacatatataatgcgtggctataaaaactttgccctgttttacattaaaaatgttttgttgttcggtttgtacagttctgtttttgcggtaccgttttatatgcttatcggtaaaatttctaactataaattcttgcgcacggagacaaggtaaaaatgaaaaaaatattggaatcaaggctgaatatactcatagctgcggtggtatgcatattcgggatttttgtgttcagacttattgatttacaaattataaacggtgacgattattattcccagtcaaatcggactaccagaataaatcagagtataactgcttcaagaggagatataagcgatgcgaacggcgttcctcttgcaagcagcaaaactgtttttaatgtcagcataaacaaggcatatatgccaaatgggaaattgaacgaaagaataatagccgtacttgatattttggatcaatacggccggcaagtaaacgatattttacctatatctacaactcagccgtacacatttgatgaaagtaaagacagcgaattaaaccgcctgcgtacaaccataaaggtggcggtttacgccacagaaaaagatgttcttgccaaattggttgacaggtactctcttgaagatgtgccggaaagctatcaacgccgtgttgccggcgttaggtacaccatggaaagacttggatattctgattctttcccgtttaacatagcggaagatgtatctgtcgaattggctactgtcatcaaagaaaaatcaagagaactcaccggtattgagataaccaccggaagtaaaaggtattatggaaacggcagtttgttgccgcatattttaggctccgtaggccctatttacgccgaagaatacgaagaacttaaatcccagggatacggtttaaatgacattttgggcaagtccggtcttgaaaaatcttacgagagctttttaaaaggtacagatggcattgtacagatagaaaaggatatttacggcggaattaccgacaccgacattattaaagaacctgtgcccggaaataccgttaagcttaccgtagacagcgatttacaggaacagtctaatgctatcttgcgggatttggtaacatttttgcaaggcagatccgccggctggggcaaagagtgtgacggtgcgtcgatggttgttttggacaccaagacaggcggtgttttggctatgagcaattatccaggttacgatttgaattcgtattcttcaaattaccaagaatattcggaaaatccaagtacgccgctgtttaaccgtgctttccaaggcttatacagaccgggttcggtatttaaattaagtgttgcggcagccgctttaagctcaggccttattgatgaaacatatacattcacctgtcacggtgtatatacctactacactcagcgggaatggggcggagctttgccgggttgtacaaacaacactgcccacggaactataaacataaagcaagccattgaagtcagctgtaactgtttcttctatgatttaggccgtcgcttgggtattgacgcaataaacgaaagcgcaaaaaaactgggattaggcgttacaaccggcttggaactttttgagcaagagggcagactttccagcccggaacttgcggaagttttaggtacagactggtatgtgggtaacgttattcaggcagctatcggtcagcttgatacagcggttacaacggttcagcttgcaacttacgccaatacaatagcaaacaagggcagaaggtatcaaactcatcttgttaaatccattgtaaactatgacggaagtgagaccgtgtacgaaacacctgtaaatgttgtatcggaatacggaaacaccaacggcacctttgatataatagagcagggtatgattatggcctctacagagggcaatgcgaaaatttatctttcaaatttaccttacacggtagcaagtaaaacaggtacgcctcaggtggccaacgatttgtacaattccaccatggtggcctatgggcctgtgggcaacccggaaattgccgttgccatagtggcagaaaaaggcggcaacggttacaaccttgcctatgcggtacaaaaagtctttgagacttattataatattaagcgggcaagggaaaacggcgttgaatacggcaagtatgcggaatatttggcaagccaaaatgcaaccgaacagccgattgacgaaaacgcccaaaaccgggaaaacaccgtaaatacggaaaataacacggttgataacaccgtgcaaaacagcactcagagcagtgaaattgcacaataaacttaataaaaaaatatataaacctacaatttttgtgtgggtttgttaggtgatgaaaaaatttaattgtgtattttgtaattttgtgttataatacatgatgtaacactattgatttggagatgtaatggctcaggtatttatgattgcctccggtaaagggggaacaggcaaaagcacggttgccgcatatatttctcttgaaatggctttaagcggcaaaaaaactttgcttatagaacttgatgccggtttgcgcagtatagacgttatcaccggggtagaaggtaaaaccgtctatgacataggtgatgttttacagggcagatgcgacgccgaaaaggcttgggtgcaaagccccaacagcaataatttatttattattgccgcaccttataaaaacaccaatgacgatttcagcggatttggcaaattggtaaactcttttgttgacgagtatgattgtattgtcattgacactgcggcaggttttccaaaggccttttatcgggcggcaaaaacagcggacacaggaattgttgtcacaacgccggatgttgtcagcgtaagggatgcaaagcttacctgcgacgagatgtacgccggcggtgtgcgaacggtcagacttataataaataaattttcaagggagaattttgcctattccggctttgaaaatgtggataaaataatcgacttcataggggcaaggcttttgggggtagtacctttttcagtggctattgctcagtgcggggcaaacggttctccgttagagggacaaagtaaagaaaaaagtatatttaatgctatttaccaaagaatttttggcgatgacattcaaataattgtttaatttcgggaggttatgtgatgaatatagcacttatagctcatgataagaaaaaagagcttatggttcaattttgtattgcttacagcggtattttgtcaaaacacaatcttgccgcaacaggcgttacgggtaaaatggtggcagaggcaacgggattgaaagtacatcgtttttatgccggagcccaaggcggtgaccagcagatagccgcaagattacagtataatgaaattgatatgctgctgttcttccgtgaccctcttgctacaaagaacggtgaaacaaatgacagaaatcttcttcgtctttgtgacgaaaacaatattccggttgcaacaaacatagcaactgcggaagttttaattcacggtcttgaacgcggggatctcgattggagaaatatagtaaatccgaaaaataatatgaagtaaatttactcattttaatattcttctttatgaacaacagccacagcgaaaatccgctgtggctgttgttttgtttatatgatattaaagaattattctataagtccgctttctttaagcaagatttccacatctgtgcccttaaccgctttcaaaacagctttcaggagccatttttccttaaatgtgagaggcacttctgagataggcttcttgtctattgcgtaatagcaagcacgcaaaagttctcttacatcatatttgctgccccaaacttccggcacgcctctgtcgatattaagcagggtgtaaacactctccatacctgttctcatagaatactctgttgtaaagatagtgtctctgggtgtctctgcaaactgaccgataaatgcaaagtttactgcgccctccggcacaactttaggtctgtcctcgttctttctcggctggaagaatgcgttaatatacgg

SEQ ID NO: 3861 - DNA, 32759 bp, Unknown
  16S sequences of unknown bacteria
cccattttgacggcggaaaaaggcgagcacgagcgcgctccaagagctggtgaaagctatccaacttcattgcgcgcgacattgcgagccccgccggcaaaatgggcaataagagcctttgtcccggcgggtgagcaaagcgaaccaaggccgaggacagcccctgagggcagtctgcccacggaacgtggtcagactgttccggcctaagggccggaattggatgccccgaataaattcggggcatccaaccgttcggctcccgcaggccgaagcccgcgacgcgcagcggggcgggccgcctctggagtgccgtgccgctggctttcttttgcacacttttctttcgccatcgaaagaaaagtgtgagcgccccattggacgacaagtcccaatccgcgccggagtcggcgcgtcagcccccgccgcggggtttccttacggcgggggcggctgccttccatgcttgcaggggactttcctctgttccaaccatcggcgcggcccgccctcccacaaagaaccccagccgttgactttcacctccgaagtgtggtaagataggagcgcggaaaggcttttaagtgtcagcctttactgtccagcactacgatgattactggcatcgtggtgctttctttttcctgcgtggttctctcgatctttaccgtcgttgttacggtggttcggatcgtgataacttccgtagtcttggactgcataggccccacctcccttccgtccatgaatggcgtttggtttcggtgccagcctatccgcgctccctgtgctcttggtttcccgggaacacgttttcatgataacatagggctggcgagcctgtcagccttttttcatcccttcctcgcccctcttgcattgaaaccttttccatgctaggataatctgggtttgaatgtttctttttcaacatacatcatccatacgaaaagagggaaacaccatggcaaatggaaaatgggatcttaccttcctttataagggctttgacgacccgcagcttgagaaggatattgaaaagctccatgcgctggcgctggaaggacggaagctccccgaaagcgaaggctccgacgtggaaaaactgaccgccgtgatgcaggcagaaacggaactgaacgatctgctgtaccagactttcggctttgtgcagctttcgctggccaccgactgcaataaccagcagggtcagcttctgctggatcggctgagcaatctgatggtggacgtgcggcttaccggcagcgcctgggttcgcttcatcggcgcggtggacgatttggaaggtgctattgctcagagcgattatttgaagagtcttgcgttccacctgcgggaatataaggaacagtccgcccatatgctggacgccgatctggaaaagtgggcgctgcgcctgtcgctggacggcggagacgctttctccaagctgcgtgaccgcctgatgggcagccatacggtggaactgaacggcgaaagcctgcctctgcccgctgtgcgcggcatggcctacgatcccgaccccaaggtgcggaaggaggcctatgaggccgaactcaagtcctatgccaaggtggaaacgcccatggccttctgcctgtcctccatcaagggtcaggccatgacgctgtgcgaagcgaggggctattccgatctgctgacccagcagttggccgaaacccgcatggagcgggaaacgttggaagccatgctgaccgccatccgggaggcactgccggatttccgccgctacctgcgccgcaaggcggaaatgctgggccattccgatggcctgcccttctatgatctgttcgcgccggtgggcgacgtgcagctccgctatacggtggacgaagcccacgatctgttgatcgacaccttctccaaggtgcatcccggcatcgccgccctgatggacgaggccttccgcaacaactggatcgacttcttccccgccgagggcaaagaaggcggcgcgttctgcgagggcttccatcagcacgaccagagccgggtgctgaccaattttgtgggcagcttctccgacgtgagcacgctggctcatgagctgggccacgcgtggcacaaccgctgcctgacctccgtgcccatgctgctgaccgacacgcccatgcctttggccgaaacggcttccatcttcaacgagaccctgctgagccagaccgtccgccgcagcgccgacgacgcgacccgtcttgtgctgctggaaaacagcctgatggaggccacccagaccgtggtggatatctacagccgctatctgttcgaatccgccgtcatcgaggcccgtaagacccatatcccctccgcgcaggaactgaacggcttcatgctggacgcgcaggagcagagctacggcgacggtctgagcaaggatgcgcgccatccctccatgtgggtgtgcaagagccattactattccaccggtctgcacttctataacttcccctatgctttcggtctgctgttcggtctgggcgtgttcgtccagttccagaaggaaggcgcggctttcgtgcccaagtacgataagctgctggcctcctgcggcagcgataccgtgcgtaatgtggccgcctccgtgggcatcgacgtgaacaacgtggactactggcgcagcgcgctggacgtggtgcgcggcgagatcaacgaattccttgccttgagcgaaaagaaatgctgagcgaagcaacatggatccatcgcgccgccgcggtgtttcagggggctgatacccccctgtacatcgtgggcggcgcggtgcgcaatcccctgatgggtctgcccatcagcgacgtggacgtgtgcggccccgcccggcccgaaaccgtgctggcgatgtgcgagggcacggaggtgcgggcccatctgcgggccgctcatttcggcactgttgaactgcacctgaccgacccggatggtacgcggcatatggccgagtacaccacctttcgggaggacagctaccgctgcggccataagccggatcaggtgcgcttcaccacggacatcgccgtggacgccctgcgccgggatttcagcgtcaacgccctgtaccggcaggttttcccggacgggctggggccggtgatcgaccccggcggcggtctggaacaccttcgccggggcgtgctgcataccgttaccgccgacccggatcaggtgctcaaggatgacggtctgcgcatcctgcgggccgctcgctttcaggcagagctggacttggagccgacggaagcactgctggaaagcctgacccgatatgcctcgctgctgcgggatatcgcccgggaacgcctgcgggaggaattgcagaagaccctgctggcggactggcgctatccgcagctgaaacgccgccgcccgggtacggagagcggtctgcgtaccattcttcatattggggcatggccggaactgctgggttccctgccctgccgggaggaaaatctgtccgccctgaaaaatcaggcccggatggaaaccctcccgccggtgagtcagcggctggcgctattgctggcaggggccgaccgggccgagaccgccgcaaggctggaagacctgcgcttttcccgccgggaagtcgaagcggcccttcgattgatggacgcgtttctgctggacgaaccaacgaaggttcagctggccagcgctgggctggaggtgctggagggcgtgtgtcagatgcgctcggccctgggacagcgggaacaggctgatggactggccggacggattcgctccctccgggaaagcggcgcgcccctgtctctgaaggcactggccgtttccggggacgacctgctgcccctgttccgcacggcgggagttccgctgagccgtatgggcggcgtgctgaacgctctgtgggaacgggcggtcagcggtcgcgttcccaaccgccgggaggaactgctgggggcggcaaagcaaatgctggaagcgctccctgaaaacgaggtttccccgtgcggaaaacgtactttttgagggaaaatggctgaaacttacggaatgaccggcccttgcccttgcatttttttcggcgctggtgtataatgtcatcgttccaaattagaaagggggacaatgcaagatgaaatccgtgaccatcaagctgagcttggctgaaaacgtgaagtctttcgtcaacatcgtgaatcgttatccttatgacgttgatctgcgtgcaggccgtcatgtggtggatgcaaagtccattctgggcatcttcagtctggatctgagcaaacccatcaccatggagatctacactgattcctgcgatgatctgctcaacgacatcaagcccttcatggcttaatgccgcccgcctgccttcgggcaggccaagctgcactcgttgaaatggtgcccgaaagggcatttggtgggtgcgccgcagctgcctgcggcgcatccttcttctttattcgccggacttgcgcggaaaaggccagagagggggaaagcaaatgccggagggattcgcaaaacgccatatctccgatgcggaaaaccgactgcggctgcttctttgcatcgacgctctgggcctttgtacccgcgaggagctctggccctttgtggcaaagctggaattgatggaatacatgcccatgtgtctgtatctggacgaactcctgagggacggttccctgatggaaggccagtatgcagtacagggcgttttgtttttaacgggcgggggacgggaggcactggaactgttccagcggcggatgccccgcagcgaccgcgaccgcattctgctggccgcgccccagtacgccgcccagttgagtgaaaaacgccagatccgcacggcctatgagctggcggatcggggccgataccggctcagctgctctgtcaccgagggtgaacacccgacgctgttcctgcgcatcgacaccgactccaaacgcctttgcgaagcggccagccggcacttccgccagtacgccgcccggctcatcacccggttgtacacgctgcctcctgcggcggaagcggtgcagccccgtcggacggacaatctggaagaagccctgaagaccgcccgccccggtgaaccgtccctgtgcctgtttggtgggcaggaggcggcgggagccgtctgcctgcacacgggaaaaacgaagctgttcctgtccctgctgctgggccgggagcaggacgcccggcaatggctggcttccgtggagcacacggaggggctggcggaagaactgaccgccatgcttcgggaaggtcaggcatgaaagaacgcctgcttgcggagctgaaacgctcgctggaggcagcgggtctgtggcagaaaaacgccctgctgctggcggcggtcagcggcggcggcgacagcatggcacttttgtacgggctgacccttcttcgggacgaaggcggctttcggctggcggcgtgccatgtgcagcacggccttcggggcgaaagcacccggttggatcaacgcctgacagaagaactctgcgtccgttggaatgtacccctcactgtccgggaggccgggcttacgggggatatgaacaccccgggcatggaaacgctggcacgggaaaagcggcgggagctatttcgccagtggatggacgagctttccgccgacgcgctgctgacggctcatcaccgggacgatcaggccgagaccgtgctgatgcacctgctgcggggcgcgggcggaaagggcctgagcgggatcgcgccgcggacggccttcggccggggagtgatgctgcgccccctgctggcattgtccaaagcagagctggaagccgtgctccggaaggaaaacattcccttccggcacgatgaaagcaacgatctgccctgtacgccccgcaatgcgcttcggctggagctgatgccccgactggaggaactctttcccggcgcggcctcccatctggcggctgcggcggagacgctgcggcaggacgaggattgtctggaagcactggcggatggcctgtaccgccgctgccattggcagggaaatggcgtgtttgctctgttgaccgaccctctccgggagggacccgacgcgctgcgtctgcgggcgctgcggcggttctaccgggaaggcgctgcgctggccgggctgcacccggaggaacgggagctgtcccgggaaaccagtggggaactcaatgcccttttgcagacggaacccggcgcgggaatgaatttgcccggcgatttgtgggcgctgcgggggcaaaagctgctgcatctgctccgtcagggtggggagccgctggttcccctgacggtttcggagccgctggaattaaagacactggcgaacggagccgacggcccggcgacgtttccgctgcccggcggtttctgggagatcaccatgaccccgccggaggttgagtcctttccgctgccgcaggacgaaaacgccgttttgctgaaacgggaagaattggagcgctgccgcttcagaaccccgctgcccggcgaccggctccgccccttcggagcgccgggggaaaagcccctgcgccgcttcctgaccgaccgcagactggacgcgccccttcggccggcgctgtggctgctggcggacgatcatcacattctgtggatccccggcatggtttcctcggaaagcctgcgccgcgcatccgcccaaggtttatggcggctctgctgccgccctgtcccctgcactggattatcatcagaccataaggagtgaccggcaatggaaaacgaacggaaaatgtatcaggacatggaacgcatcttcttcaccaaagagcagatcgccgaagcagtcaaaaaactcggtcagcgcatcaccgaggattatgccggaaaagcgcccgtgatggtgtgcatcctgaagggagccagcctgttcttcgccgacctgatccgggagatcgacctgcccctgaccatcgacttcatggtggtgtccagctacggcgccagcaccgtctcctccggcgaagttcggctcattaaggaccttgaccgcagcattatgggcaaggacgtgattttggtggaggacatcgtggataccggcatgacgctgaagtatctcaagcgccttttgtacagccggggcgccaacagcatgaagatcgccaccctgctggacaagcccgcccgccgcgtttccgaactgacggtggattactcttgcttcgtgatcccggacgctttcgtggtgggctacggtctggactacgacgaggtgtaccgcaacctgccggaggtgggcatcctgtccccctcggtgtatgagaataagtaagcagaaaaccgaacagtaaaagcggcgggaaattttcccgccgcttttgcctatccttttatagaaagttcatgctttcacttccgccgtggagctgcgcaccagcagcggcggaatgatggagaccggccccatgggcatcccgtgcagctggcagtgcatcagcgtggacgctacctgccccacacggaaaaaatcctgcgaaagggtggtcagaccgggataaatactgttgcaaacgggatcgttgtcgtaaccggtgacggaaaaatcctccgggacggacagcccggcggcttgcgcggcgtggataacgcccacggccattttgtcactggcgcagcaaatggccgtcaccccctgcgcatatagcttttcaaaggcgggcgcgccgcaggcaaaggaataatcgccctcgtagaccagcgcctcgtcataggggatcccggcacgggccagcgccagccggtagccgtccagccgctgctcgctgacatgggcgcgcagggtgccggtcaaaaacccgatgcggcggtgccccaatgaaaaaagatgctgcatggccaactcgatgccgacgacatcgtcgtaggtcacatgcccaatattgctcttttcctgcgagaaaggcagcccccagaggattatgggcacttcggcttcggccacatcctgcaggtaacgctcgtcatacagaatatcgctcatgaatacgccgtccagccgataatcggtaatcagatccggcaggggccgaagcatttgcggcatgtctcggaacaaagtcagcaggatcagttccatttcgttgccgtagtgttgctgcgaggccacctgaaacccgctgctgacggaaagctggctaatgcttgtctcgtggcttgcggtggcgtagatccagccgatccgcttttttttggcagagcggttgtcggtatcaggcagggaataccccagctcttcggcggcggccagcacccgctggcgggtctgggcgttcacctgggcatagccgttcagggccttggagaccgtggctttggacagccccagtttttcagccaattccttgataccgggcgttgtatggttggatggcatcagcgcccctccgtttcgtttcaagtttcgtcaaatacgtgtaaagtttcgggtcgtttcttattataacagctttgaagggtaggcgcaagcattaatggaaacttttcgaaacaataagaaactcaaagaaacacagtttgaagcggcaaaatgcagagattatcaatgaaaccacctaaatatataatctgtccaatatttttcctgatcagatatgcaggaatgacacgtgaatgatgcaaaaagccttattttacccatttcatctatttttcagaaaaaataaagaaatcattttcagaaaagtattgagactttgttcgacttgtgctatgctaaggccacacagagaagagacgcaatgacgcgcattcttcaccgctgaaaggagtattggaagatgaaaaacatcgttcaggctttctcctatgactatacccggatgttcgccgccctgaccatggcggtgctgcccggcattatcatctacatgctggcgcaggagcaggtgcaggcttccgtggcggcaaccggcgtaaaggggtgacgaacgaatgatgaactaccatctggggcagggccccgaccgcaactggctggtggcggaaacggaattcgacagccgctatcagggcaaatgcgaagccattttttctcagggcaacggctatctgggtcagcgggctacgctggaggaaaactatgtaggccgcacgcctgatctgctggtgacgggcaccttcgatgatttcgacggcagggaagtgacggagctgcccaacctgccggacatgacggagctgaagatccgcgtggacggccatcccttcagcatgctggagggcaaaacggaaaaatatgtgcgcacgctgaatctccacaccggcgaagtggagcgcacgctggtgtggcagagcccgctgggcaagaagctggccttccgcttcacccgcttcgtatccatggcccgcaagcatgtgctgggtctgtgcatggaggtcggagcgctgaacggcgatgtggagctttccgtggaaagcggcatcaacggtcaggtgaccaacgagggctctcagcatttccacgaaggtaccaagcgcctgtacgacctgcgcatcctgcgcatgaccagcgagaccctgcactccggcgtcacctgctgccagtttgcgggcagccgctattgggtggacggcgaagaaggaaaggaaaacggcctgcccatcatcggccgccgcaccatttccagccgcgcctccttctgcctgaagcaggggcagaccctgcggatggaaaagctctgcaccgtgtataccagccgggacgcccgctgggaaaacgaggctttctcggtggagaagctggaagaagagggcatgaacgcccttcgggaagccgaagcgctggggtatgaccatctgtttgccgaaagcgccgacgcatggaagcagctgtggcaggagatcgacatccagatcgacagcgaaaacgaattcgaccagctggccatccgtttcgctcagtaccacatgaacagcttcatcctgaagaatgacaatcgggtaggcatcggggccaagggtctcagcggcgaaggctacaagggccattccttctgggatacggaaattttcgttttcccctatttcctgctcacccagcccaaagcggcccgcactctgctggaataccgctacaacacgctggccggtgcccggaaaaaagccgccgaaaacggctgcgagggtgcgatgtatccgtgggaatccgcatggaaggacgacggcgaggtcacgccgctctggggcgcagcggacgtggtcaccggcaagcccaccaaaatttggacgggcattctggagctgcacatcacggtggatattgcctttgcggtgaagcagtacttccgggccaccggcgatcaggatttcctggatcgctatggctatgaaatcgtcatcgacgcggcccgcttctgggccagccgggcggaatggaagccggagcatgaccgctacgaatataccgacgtcatcggccccgacgaatacaaggagcatgtggacaacaacgcctacaccaactacatggccgcctacaacatgcgcacggcgctggaaatgatggctgagctggaagcccggggcgattctgtctacgagcggctgaacgggcagctggactttgccgcatctgccgacaagatccgcaaggtgctggataagctgtacctgcctcgggagagcgcggacggcattctgcctcagttcgacggctattttgacctgacccacatcgacctgaccaaatacaagcaggcttccgtggtgggcacgatcgccaacgactacaacctcgagcagatcagccggatccaggtgggcaagcaggccgacgtgctggtgctgttcttcctgctggaagagctgttcagcccggaggtcaaaaagaagaacttcttctattacgaagaacgcaccctgcacgattcctctttgagccgttccacccactccgtgctggcggctgatctggggctggacgacatggcctacaccttcttcgagggtgctgcccgaaccgaccttggcccggtgatgaccacctccgacgcgggcattcacgcggcgtccatgggcggcatctggcagtgcgtggtctacggcttcggcggcgtgcgcatcgtgggcgacaagctgcggctggaaccccatctgccgaaaaactggcgggagctgcgcttccccctgcactggcggggacaggcgttccgcgtcaccgtacggcaggacggcgtgaagctggagaccgaatcaggagagaccgctcacccggaagcctatggcatcgaagtggtgctgggctgctgagaaactgaaaaagtggaggtgcaggaagcactgctgccactcaatcgtcgcagggactactgccatagtccctgctcgtttcgtgccacacctgcgggtcgctaaccgcctacggcggttgtacctactgggtacctgctttcctacggtgcctgccgggtttttagggcggcgagaaggagcgggcatccagtggatgcaactgccgaaggcagttagcgactgacagccgtcaaccgaaacgagaatttggcacggtagtgccaaagacgacgattgaggttgtggaacggagcccctaaatcttatgatgccgcagcactttccccgcgaaccagtttaagggcgcgtagcaccgaggacgagcacgccgcgcagcgacagcgcagtccgaagcccgcgcccgtaggggagcgggccgcagagcgctgttcgcgggcgatggcggccaagcaggtttttttcgacaatgaacgcccgcacgggaaaatccgtgcgggcgttgcttttatacctttcggttcagcagcggctcaaaaaactccttcgggtcgctttcccgttccacccattggcctgtcaccgggtgcaggaagcggcagcggaagctgtgcagggcgaaacggcccggcagttcctccgattccgtcccatagagaaaatcgccgacgatggggcagcccagcgcacttaagtggacgcgaatctgatgggtgcgccctgtgtccagccgaagccgcaccagactgcggttgttttcctcccgcagtacccagtaccacgtgcgggcttccttgccgcccgggccgacttcccgcttcactgtggcgccgtcggccttgcggatgggcaggtcgatcagcccttgcttttcgggcagccttccttcagtgacggccagatattcccgctgaaaatggtcggtgtgtaaaagctgctgcatctgatcctgcgcataggcggtcttggccaccagcatgagaccgctggtgcccttgtccagccggttcacgggccggtaaacgaaatcctccggacagcccagataggcgtagacggcgttttccagcgtgggcagggcctgccggggcgaggaagccgagggcaggggcgcaggcttatccaccatcatcaggtattcgtcttcaaaggcgacccgcagccccagctccaccggcgcgggggcggtgttttccttttccggaaaggaaagcagcaggttttgtccctgccgaacggcggcgttggccagcacaggcacaccgtccagcagcacctgcccgtgaaacttggcccgtttgaacagcccgttggacatgcccagccctttcatggccgcctgacggacgctctgcccgtccaactccgctgggatcgtcagccgaagctccggcatggtctcgccccctttcttttgaaaagctgataacagtatagcacgcccggcccgccttgccaattccgcccgttcctgctaagatagaggcatctttttcgggaggcgtatttcatgtccgtattcatgcccctgtttacccgccccgccgtcgtgcgcgctttgcgggactgttacgaaattctaggtgatctgaccccgctgaagtccaactgcggcaagctctgcggcgcggcctgctgcgaaagcgacgagaccggtgaaaacgggatgctactgttcccctatgaggagtggttctaccgcaagcccattcccgattttcccttccatctgtcgccggacgattctctttacaagggcggcaagcggctggtctgcgaaggaacctgcccccggaaatatcgtccgctggcctgtcggctgttcccgctgcgcattcggctggacgcacaggaggacggacaggcggtcaaggcagtgccggagatcgacccccgggcatggtgctgctgccccctgccggaaatgggcggtttgcgggccatgagcggcgaatttgtcgaggccgtccgcaaggtaggggagcgcatgatgcgcaacaccgatctgctggaggccctatacggcgaacaacgcctgatcaacgaaatgaggcgcttctgatgaaggtgatcgtcatcggctgcggcgcggcgggcgctgctgcggccatcgccgccgcacaggccggccaccgggtcaccgtgctggatcggaaccgaaaacccctgaaaaagctgggcgtgacgggcaacggccggggcaatctgctcaaccggggagagcttcgctactacggcgatgcggattttgccctgcgggtattggagcacatgccccgtccggaggtggaggagttcctgcggaacgcgggcgtttccctgaccgaggaggacgagggccgggtctatcccgcctgttatcaggcctccgcggcggtggacgcgctgcttgcgcagatggatgcgctgggtgtggagcgccgccagaacgtgcgcgtcacggcacttcgccgggaagacagcgactttctgttggaaggcgtggaaagcgtttacggcgaggaaaaaagcaaaaagaacggcaaggtcaaaaaaggcgagttgctggaagaacggccggttcgatttcgggcggatcgggtgatcgcggcctttggcggcgcagcggccccggctcacggcaccgacggcacggcctacgggctgttgaccgagttggggcatacgctgcatacgccctgtcccgcactctgcccgctggtgacggcggctccgatcccggaaaagctggcgggccagcgcgtccgggcgaagctgactttatgggacagcgcgggcaaactactggatcagcgccgtggcgagctattatttacggcggacggggtcagcgggatcgccgccatgcagctggcgcggaacgtgcgccccggctgcgtgttatccatcgatttgacggaagcgctgaccggcgtggcggacacggatttgggtgcgtggttacaggagcgtttgaaaaaactggccggtcgcacggctgcgcaatttttcatcggcgcggcggttcctgctctggcagacgagattttccgtcaggcgggaagcccgcagggggaaacacgggtctccgaatggactgcggaggaagtgagggcgcttagccgggcgattcgggactttcgactggtactttccggggtacggggctttgaggcggcgcaggtcacggcgggcggcatttccgcctctgaatttgatcctgccacgatggagagccgtctgatccccggcttatacgcaacaggcgagcttctggacgcggacggcgactgtggcggctacaatcttctttttgcctttgccaccggccttctggcagggcagggctaaagccctgcacccatcactgcgcgcaggggcgtagagcaacatgagagttggccggggttttaccgccgtggcacgacaggtgccacggctcgccggtttggtgtggtgatatgctggttggctgagaatggccgccgctcggcgacaagccttgcggaaaacatagcctcggaggcaaacaaaaatgaaacaaaagcagcgcctatcccgatgaaaagggaagagcactgcttttttgattcatttacagctgttctaccttcacccagcgccgctccttggacgaacgcacgcaggcttccacgaaggccatgccccggaagccgtcttcgaaggaagcgtagggctgaggcgaggtgcgccagctttcgtctgcaatggagcggtaaaacgcatccacggaattgcgcagcgcatccgcccatcccatgacgtgccctatgggcagggtgatgtagggtctcgtttccgattggcaggtgcgggggttcggatagataacggaagtaccgacgcctttttcaccgatccgcaggcgatccggctcttcctgccgccattccatggaatagttttcacagtccaccgtcagacgcaggtcgtttttatggccgttagaggctttactggtcagcagctggccgggcgtaccatcggcgaagcggagcaggatcatgccggtgtcctcggttgtcatgggatgcgctgccccatccggcccccggcggacgggatagtgggtggtcagctctgccatgacctccgccactggctgccccagcacggcgcaggcggtatccacccaatgaatgccgatgtcgttgatgcaccgggcgataccggtattttccattttggggctccaatccgtttcctgcgaggcgctttcctgcaggtagcgtccccacagcatcaggggacggcccggcagaccgtgggcgaaacgcgccttcatctcctgcacggcggcgttcatacggtactgatggttcagtcccagcgccatggggtgctccccggccagaccgatcagccgtcttgcacctgcggcactttgggccagcggtttttcggcataaacgtgctttccggccaggagggcggcttcgttgatggcctcatgcagaaaatggggcgtacagttatggacgacctgaatgtccgggtcagcgatcatttgccgccagtcggtatatactttttccacatgatagcgctctgcggcggcatgggccgcgttctcatccgcgtcgcagactgcggcgagtcttgcgtccggcgcacggcagatcgcgtctatatgctggggcccgatgaagcccagtccgatgacacctgcgttgataaaattcatcctcatccctcccgattgaaaaaataaaacgaaatttatattttgattgtaacggcaactgcggcaaatgaacatataggaaaatcaaggatttctttgttttgtccgctgaaaaatcaaagcgttcctcttttcgcggcgcatcggacggaacctccaaagttgaccaaaagaaagggccaatgggaaatttttctgcaaatgcccctacacttggtttgacggactttttccctttttgtattggctgggcggcctgctgccgtaaagaggcgaaaaaggaaaatttatgattttgatatacaaatgtatggatttccactattgttcaaatcaacgaaaagccctacaataaacatatcatcccaagacaccatccaaatagataggaaagagggcttttccatgttgaattatcaggtgaagatcggtctggcacccatgcgccgcgacgtcactccccgtccgggcatctttaactgggaaaaggcggaagaacgcggccgtgcggccgtggaatacatcgagaagcactttgcttctgagaacgtcagcttcgttgacctcaagggcatcaaccccgtggacgtgatgtactgcgacgcggacgcggaaaaggtcatcgagcggttcaatcaggaaaaggtggacgcggtgttcatcatcaactccaacttcggcaacgaagagatcgccgcgcaggtggcccggggcgtgggcaagcccgtctgcatctgggcgcccatcgacaccagcttcctgccggacggcacccgctacaccgacagccagtgcggcctgttcggcgtgagccgccagctgcagcggttccacgttcccttcagctacattgagacctgcgccgtggaaagcgacaccttcgccgagggcttccgcaagtttgcttccgtcagctgcatggtgaagaacttcaccgggatgcgcatcgctcaggtgggaatgcggcccaagcccttctgttccgtcattttcaacgagggcgagctgatggaaaagttcggcctgcagatcgtcccggtcaatctggccgtcatcatcgacaagtacaacaagattctggccgagaacgacgcggagctggaagcgggcgcgaagctccttctgtcccgctatgagatggacgatctgaccccgccgctgctcaagaaggtgtacgccttcgtgctgctgtaccagtgggtctttgagacctacaacgtgcaggcggtatccgccgagtgctggacggccatgcagctgggcgtgggcgcgatgccctgcacggcttacagcgtgctggccgacatgggctatatcatctcctgcgagagcgacctgcacggcgcgatctcgatggcgcttttgtccgccgcctccatgggcaagaagatccccttcttcggcgagttcaccgtgcgtcatcccgaggatcccaacgccgagctgctctggcactgcggccccttcgcctacagcctcaagaaggacggctgcccctgcaagaacgtgaacatgcgccagtggttccaggtcaaggacggccagtacaccgtctgccgcttcgatcaggacaacggcaactacagcctgctggccggcacctgcgaaagcacggaaggcccctacacctttggcacctacctgtgggccaagttcaagaacctgagcgcctgggagcggaagctgatcgaaggcccctacatccaccatatggcggagatcgagggcgactacaccgaggaactgcgcgagttcaccaagtacgtcaagaacgtcgccctcgacaccgtggactgagtccaattcggactgcgcgctgggcgcgcaggggttgacgggtaaagctgggcgtttcagaaccgctcggcggaaggcctcacggttcctgcactttccgccaagacaccttgtcgggtcggaagggccctccaagggcgggagaggcggaacaacttgaaagaaatcatttttcccgcgcagggcgcggaaccatcggaggggcaggaggcgttccgtctgccatccccctgacattcaaaataacaaggaggaactccatccatgcttaccgatatgaagactcttttggacattgccgagaaaaaaggctgcgcgatccccgcgttcaacgtgtacaatgccgaaaccgcgctgggcgcgatcttcgctgcggaagaagccaacagctgcgtgatcctgcagatgtacagccgcctgttctccaattttgaggcccagttcatggctccctccattctggaagcggcccgcaatgccaaggtgaaggtggccttccatctggatcacggcgcgaacgacgaagtgattaccaaggcgctgcgctggggctgcaccggcgtgatgcgggacgccagcacctctccctttgaagagaacgtggccatcctgaagaacgtggtggagcgcgcccatgccgtgggtgtgagcgtggaaggcgaactgggccatatcggcgtagccaaggacggcgtcagcaccgagtacaccaaggtggacgaggccaagaagtttgtggaagaaaccggcgtggacgcgctggccatcatggtgggcaccgctcacggccactacaagcaggctcccgtgctggccattgaccgcatcgcggaaattcacgcggctaccaaggcggcgctggtgctgcacggcggcagcggcgtgccggacgatcagattcaggctgccgtgaaggccggtatccgcaagatcaacttcggcaccgacgtgtgctgcgcgttcctggacgaggttcgccgcaccagccccgatctgctggccgtggacctgttcatgaaggagcccatccagaacgtgaaacgtttctgcctgagcaagatcgagctgctgggagcggtgggctgcaatgagtaacacttatcccgaaatcatcggcattggctccacggtatacgacaccctgatggtggtggaccgctatcccaccgaggacaccaagctggaggatctggagaccaaggtgcagggcggcggcccctgcgccacggcgctggtggcggcccgaaagctgggcgtaagcgcggcttatatgggcacgatcggcgacgaccccttcggtcgcttcatgctggaggatctggaacgctggggcgtcaacaccgaatacgtgcgccgggtccccggctgcgtcagctttcacgcggtggtgttgctgaatcaggccaacgccagccgcacctgcgtctggtccaagggcaccgtgcccccgccggaagaaggcgatctggactgggaagccctgaagcatgccaaggtgctgcatctggacggccatatgctgaacgccgccatcgccgcggccaaaaagtgccgggaatacggcgtaaaggtcagccacgacgcgggcggcgcctatccgggcgtggaaaatttgatgccctatgtggattatctgattccctccgaagaattcgccctcaagatgaccggcgaaaagtccgccgaggaagcggcgcagaagctgtacatgacctatcagccggaggtgctggtgctgactcagggcagccgcggcggcattctgctggacgaaaagggaatgcggcattacgattgctataaggtggatgtgaaggactccaacggctgcggcgataccttccacggcgcgttcgtggccgccaagatcaagggaatgaccaacgatcaggcctgcaagtacgccagcgcggcggcggcgatcaaatgcacccgcttaggcgcgcgttacggcatggccaacgacgaggaatgccgcgcattccttcaggaaaggggcgttacgctgtgagcatcgttaccttgaagaatgaagaactgaccgtgaagatttccacgctgggcgcggagatccagtccattgaggacaaaaacggggtggagcgcctctggcagggcgatcccgccatctggaagggacgcgcgcccattctgttccccgtggccggaggttttaaggacgacggctacgagctggacggccagtggtacggcatgcccaagcatggctttgccaagacggaggagtgggcggtggaaagcgccgatgaggaggaagcgaccttccttctgacggcgcagaagcccggcttccccttccggtatgagttccgggccgtgttcagcctggaagcgaaccagctggaagtgaattatgtggtcaagaatctggacgaccgcaccttctacttcagcgtgggcgcgcacgaagcctatgcctgcccgggaaagatcgaggattattatctggtctttgacgagaaggaaaatctggactgctatccgctggacggcaatctgatcaagcatgagaccatcgacatgggccgggataccgacacgctggcgctgtcctacagcctgctggatcacgacgcgctggtgttccgcaacctgaactccaccggcgtggccctgtgctgccgcaacaatgagcgcaaggtgcatgtggaattcgagggcaaccccaccatcatgttctggcatcatcccgacggacagtatctgtgcatcgaaccgtggaacaacagcccggactttgtggacgcgcctcacgacatcgcgaaaaagcccaacttcatttgcctgaagccgggtcgtgaggccaaccgcagccataccatcaccattctgtaaccggcgatccgccaaggaggagagaccatggcaattttggaacagcttcggaaattgaaccccgaactgcccttttattcggtactggaccccgaatttcgcgcctatggccgggtgatcgattttgacgcggccagcctgatcgagacctgtgaaaaagccgccgtcatgccggaaagcggcagccgttatttgcccgacatgcccgaactggaggccctgcccgtctttgcggacgtgaagcacaccctgcggggcgagggcggctgccagatcggctgctgctggggctacaacaccaggctgaactgtctggaatatcaccgcgccagcgagcacaatgtggccgtcagcgatctggtattgctgctgggccgtcagcaggacatggagggcttcgacctgcccgcgggcaagatcaaagcattcttcgtgcccaaggggaccaccatcgaggtgtacgctaccactctgcatttctgcccctgccaagtctccgacgagggcttccgctgtatcgtcatcctgccccggggcaccaattatcccctgacgcaggaaaagcccaagggcggcgacggccgtcttttgtgggcgcaggacaagtggctcatcgcccatcccgacaacaaaggcgtggtggagcgcggcgcgtatccgggcctgcacggcgagaatttcgatatcaagtactgatataaaggagaatcaccatggaacgcaaagcctttatgtgcgatatgatccgcacggagctggaggacatcgtaggggtggagaacgtctccactaaggacagcgaccgcgctacctacggcgtggactatttctggatcggccgtatgtgggtggatcacggcctgaccccgcccatgcccgacatcatcgtccgcccgggctgcaccgaggaagtctccaaaattttgaagatcgccaattactataaaattcccgtgaatatctggggcggcggctccggttctcagggcggcgcgctgcccatggcgggcggcatcatgatggacatgaagcgcatgagccatctgatcgagatcgacgaggtcagccgcaccatcaccgccgaggccggcatgatctttcagcagctggaatggtatgccaacgagcggggctattcctgccagcacatcccctcctgcctgacctgcggcaccatcggcggcgcgctgggccaccggggcatcggcatcatgtccagcaaatacggcaagatcgacgacatgtgcatctccatggaagtggttctgcccaacggcgacatcatcaacaccctgcccgtgcccaagcacgcggccggccctgacctgaacgaaattttcatcggttccgagggcacgctgggcgtcatcaccaaggcgaccttcaagctcttcgagcagcccgaaagccgtcagcaccgcgcgttcctgttcccggatatgcattccggctacatggcgggccgcgacatcatgcagaaggtgaagccttccatcctgcggttcttcgacgaagccgagactgtctccatcatcaagaagattctgggctttgagaaaaaaggctgcttcatgaacgtgaccctggagggcatgaagaagatcgtggatatcgagctggagatcgtcgaagagatcgccgccaagtggggcgcgcaggatctgggcggcgagtacggcgaaaagtggtacgagaaccgcatcaccttcttctatcccggcaacatcatggatattccccagatgttcggcaccatggacaccgtggccacctatgccaacattgaaaaaatttatctggccatgaagaaggtcatcaacgaaaaattcccctatgtgaaatacatctctcattccagccactggtacgagtggggctgcatgaactacacccgtttcatcgtggatcccgcccacgtgccctccgaccccgacgaggccatccgtctgcacaaccagatctggaacgccggtgtgcgtgcggccatggaaaacggcggcgttatcaacgaccatcacggcatcggcctgaagctgtcccgcctgatgaaggagcagtacggccccgccatgcaggtcatggagagtttgaagaaggggctggaccccaacggcatcatgaacccctacaagctgggcctctaagcaggggtagtgatccgcaacctcaatcgtcgtctttgacactgccgtgtcaaatcctcgtttcggttgacggctgccggtcgctaaccgcctgcggcggttgtgtccactggacacccgcttcctctcgccgccctgcaccccacaccgcgcccatagggcgcgggacttgagtggaaaagaggggcgctttggaaacactcggcggaaggcctcgtgtttccgacgcttttgccggaaaggccgccgtggcacgaagggtgccacggctcgcgccgaagacaaacgagccaagtgaaagcagcttgattcgtagtcagacagttccgtttgccgttctattctttgcatgattctagtggcaaccgataaggagagagaaacaatgtttagcgagaaatccaagaaacacgcggacgcgtgccgcttttgctggatgtgccgccacctctgccccgtgcagctggtgaccggcaaggagaccaacacgccccgggccaagggcctgctggtgagcatgatcacccgcggcatgaagctggaagccgataccgccgagaccatgtacgaatgtatgctgtgcggagcctgcaccaacgactgcgttaccggcttcgagcccccgctgttcatccgggaaggccgcaccgagtccgtggtggcgggcgttgcccccaagtatgtgacggacttgatcgacgtgatcgagaagaccggcagcatgtacggcacttccgagagcagggtgaagaccgacgcgcccgagaccggcgagctgctggtatggctgggcgaaacggcccggtattccaccccggaggtggcgcatgcactgctgaggattctggacaaggcggacgtaaagtacgccgtgctgaagaacgaaccttcctccggctccgcgctgggcgatctgatgggctttgtggaagacgtgcgcgtgcaggccaagaaggccgctgcggccatcaaggcttccggcgcgaagaaggtcgtcgtgctggacagctatgatgcggcgctgtttcgccatgagtacaaggactggggcattgagctgcctgaaatcgttaccgctacggcttttgtggatgaactcatcaaggcaggcaagctggccccgaagaaggaagccatggtggtttcctaccacgacggcagccgtctggcccgggatctggacgagcatcagcccgctcgcgacatcctgaccgccatgggctgcgacattcatgaaatgtggcagaaccgccgtctggccaagtgctgcggcagcgccgtcgtaggccgttacctgcccgagctgcgggccaaggtggctgcgggccgctggaacgacattacccgcaccgacgcaaagatcatggtcgccgcctgcccccagtccacggaagcactcagtgctaccgtgcccgagggctatgaatacagggatctgttcgtgatgctgtccgaacgtctgtaattgattcaaggcgcggaaaggatcctttctgcgttcagaagcggagaaaagggacaagttttttcctttgcaggtctttgagtcccgcatgggcaggaaaagccgttctgtttttcgaatcttctgcacagaagggtgcacgtttccgcgcccttttcacatgacgttccttcaagaacagaacaaaaggagaggattcccatggctgccaaatacctgcactatacctatgaccagctgaacaccttctgcatggatgcgttccagaagttcggtttcagcgaaagcgaagcccggatcatcagcgacgtgctgctgctgtctgacctgtacggcatcgagagccacggcatgcagcgcttggtgcgctatcacaagggcattgaaaagggcatgatcgacgttcacgccaagccggagatcgtccacgaaacgcccgtttccgccgtgatcgacgcgcacgacgccatgggtcagctagtgagccatcaggccatggaactggccatcgcaaaggcgaaaaagaccggcatggcgatcgtgtccgttcgtaattccaatcatttcggcattgccggttactatgccaaaatggcctgcgatcagggcttggtcggcatggcgatgaccaacagcgaggccatcatggtgcccacctacgcccgtatggccatgataggctccaaccccattgcgctggcggttcctgccgagccctatcccttcttttttgacgcttccaccaccgtcgttacccgcggcaagctggaagtatacaacaaaatgggcaagccgctgcccgagggctgggcgctggacaaggacggccatccctccagcgatgccaaggacgtgctgaagaacatcgtcgccaagaacggcggcggcatcatgcctttgggcggcaacacggaaacgctgggcagccacaagggctacggctacgggatgctgtgtgaaattttctgctccgtattttctcagggtacgccttccagtcacgtaaacgtgggcagcaagagcggcacctgtcacggttttatggcggtggatcccgctgtcttcggcgatcctgcggccatcaaggagcatttctccgcctatctgcaggagctgcgcgacgcgcccaaggccgacggccagactcgcatctacacccacggcgagaaggaaatcctcgcctatgaagaccgcatgaagaacggcatcgacgtgaacatcaacacggtggccgaaatggcggacatggccaactatctgggcatggattccgaaaagtatctgggcaaggtggacgtttccggcctggagtccagctacaaataatcggcaggggtcagcgcccctcccggcctgcccgcccttttgggcgggcaggatgccccaaggcaaaacaaacgaggtgaaaccaatgaaatacctgttgggcgttgactttggcggttcgtcctccaaagccacgctgctgcgcgaggacggcgttgtcgctgccaccgccagcagggaataccccacctactacccggaaaacggctgggcggagcaggatgcggaggacagttacaacgctgcctgcgccaacatccgcgagctgctggaaaagaccggcgtcgcgcccgaggacgtggcggcgctggcgctggacgcggccacccataccgccgtgctgctgggcgaggacgacaagccggtacggcgggccatttactggacggatacccgggcttccacggaagcggctcagttaaagagcgagatgggttccgccctgatggaggaatgctacaacagcgtatccagcctgtggacgctgccccagctcatgtggctgaaaaagcatgagccggagaccctgcgccggacgcgcaaggtgctggcggtgaaggactacgttcgctaccgcatgaccggcgattatgtgaccgacaccatcgaggccatgggcttcctgctgctggatgcccggaagaatcagtggtcggaaaagctgtgccaaatggctgggctggacgtgcggctcatgccccccatcgtggagcccacgacccatttaagcccgctgacggcgcaggcgcaggcggacacggggctgacggcgaagacggcggttattgccggcgcgacggacacggtcatggaagtctatgccgcaggtgcggttcacgaggggcaggccacggtgaagctggccacggcaggccgtatctgctccattacggatcatgaggtggtggatccccggctggtgacctaccgccatgtggtcaacggcttgtggtatcccggcacggcaactaagagctgcgccgccagcaaccgctggtatcgggacaccttcggcggcagctttgacgaaatgagcaaggctgcggcggaagtggcccgcgggtgcgaagggctgttcttccacccctatctgcagggcgagatcacgccctatctggatgacaggctccgggccagcttcgtcggcgcggcgggcttccacacgaaggcccatttcaaccgggcggtgctggagggcgtggcctattccatgaaggactgcttcgccacgctggtggagctgggcattgcccccacgcaggccgtggccatcggcggcggcgcgaaaagcggtctctggcggcagattctggccgatatgctgaatatccccctgaaaacggtggagaacgtggattccagcttgggcagcgccatgttggcaggtgtggccgtgggtgtgttcgccaaccatgcggacgcggtcgagcgctgcgtcagggagcagggcgtgacgctgcccgacccggagggcgtggatttctacaacgagcactttaagctctataaggagattcaggcggcgctggcccccatttatcacaaactctaaggagaaaccatgcgaatcctgatttgcttaaagcaggtgcccgacaccacggaagtgaagctcaccgacgatctgacgctagagcgggaatttgtggcgcaggtgctcaatccggcggacgaaagcgcgctggagctggggctggaactgaaggagaagcacggcggaaccgtgaccgtcctgaccatgggccccaagcgggccgaagggatgctgcgggaggccctgtcccggggcgcggacgaagccgtgctgatgacctcgccccggttcgcgggcgcggacacgctggtgacggcccgctgtctggcggaggccgaaaaggcgctgggcgggtttgacctgatcctctgcggccgccgggccgtggacggcgagaccgggcaggtaggccccatgatggcggccatgctgaaccggccctgcgtggtgaacgccacggagggagaaatcgaagacggctgtctcagggccctgcagctgaccgaagcggggagccttcaatggaaagttccgctgcctgcggttatgaccctgtgcgaatggagtcacgcgctgcgtctcccaaccatttccggtctgcggcgggcggctcaggccaacgtgcgcatctgcgaacccgaggatttgggcattgacccggctgactgcggcctgaaagcgtcgcccaccagggtaacgcatatcagcgcccggcccgtgggcgttcggccctgcgtcaagacttcctttgcggaggtcatgaaagcgctggaagcaaagggactggcgttgggcgcgtccgggcaggatgaagcggctccggctgcttctgtttcccctgaaaatggaaattccgctgcgattaccattgccgtgctgtgcgagggcgacggaagagccgccgccgagctgctgggcaaggcgcgtcagctgaccccgtccggcagggtgctggccctgtccgagacggcggaaccgcctctttccgcttttgcctcctttggcgcggacgaagcggttccgttgggaaggctgacggacgactgcgctcaggcggagcggatcgcggacgcgctccagcagctgcagtcggacgcggccctgttcccggccaccattcgcgggcggtttatgtccgcatgggtagcggccagactgcacacgggcctgaccgccgactgtaccgccctgtctctgacggacgcggggctgctcaaacaggttcgccccgcttttggcggcaacctgacggcggaaatcctttgcaggacggcccgcccccagatggccagcgtgcgccccggcgtttttcccattcctcagccggcggacgggcgggtctgcgccctgcggccgctgaagctggcggcaagcccggaaaggctggagcggttggccttcaccccggcggaaagcggcgtttccctgcagggcgcgtccgtaatcgtcaccggcggcaagggcgtgggcggcaaaaagggcttcgaaaagctggaggagctggcggccctgctgggcggcggcgtgggagccacccgcagcgctgtggacgcgggctggatcggctatcctcatcagatcggccagaccggcgtgaccgtccgcccccggctgtatctggccttcggcgtcagcggactggtacagcacaccgtgggcatgagctcctccggcgtggtggtggcggtgaaccgggatcgaaacgcccccatcttcgcctgcgcggattacggcatcgtcgccgactgggaagaaaccatcgacgaatggatacaatacgtgaaagaaaggaagcagcaagcatgaattacaaaaagacgtatacccctaaaaacggctacacccctctgtgcgaaatcggcaagtgcagcctgaaggatctggaatttggcattctggagctttccgacgggcagagctacacctatgaaaccaaagaccgggaagtggccttcatcattctgggcggcaaggccaacttcaccgccaacggcaaggattacggcatggtgggtgcccgccgcaatgtgtttgagaatcccaaggccgagtgcttctatgcgccccgcaactgctccgtgaagatcgacagcccgtggaacatcaagatcgccgtctgctccacccccattgacgtggacagcgagcctcaggccattcatcaggcggacgtgcgcgtggtgcggctgggcgtgaagccctgggagcgggacaccagcttcatcgtggacggctccaccaacgccaaaaagctgaccatcggcgaggcctacatcacccccggcaactgggccggcttcccgccccacaagcacgatgtggacaacatgccctccgagggcgtgctggaggagatctactacttcctgttcgatccccagcagggcttcggcgtacagtgcctgtacacctccgatggcgagatcgacgaggcctaccgggtcaaaaacgacgagctggtggagttcccccggggttatcataccaccgtgggcgcgcccggctacaacacctatttcctgtggctgatggccggcaaggatcagggcttctaccgctccaacgaccccgatcacgagtgggtcagcgctgtggaaaatctggtcaagaagcagtaattttcgctttggaagggagccttccgcccgggaggctcccttttctgtttgaatggcgaaggttcaagccgaactccaaaagtttttcgtgctttttttctcttttttcgaaatttcctcttgccaaaaccccgaatcatgtgtataataacatcgttgtcgattgagacaatgcgctgatatagctcagccggtagagcgcatccttggtaaggatgaggtcgccagttcgaatctggctatcagctccaaagagaaagccttgaaacgtaacagtttcagggctttttcttattgctgggaaatatcgggctggtacgatttaccccaatttttaccccaatcagattttagaggggtttttagctgtttgaagggaataaaaagcaaattcttgtctaaaaaacactgccaaaactgccaaaagggttccaacccttatgctgcaatggtttgttcgactgtcaaaagtcaaaagtacccatgacaaaactgccaaaagggtctaaagtacctccatacgcttcatcatgtctgctttgtgggtgggatcgctgtgaacataccggcgtaatgtggtggctacgtcagcatggcccagaatctccgagagaccacgaatatcattatccagcgaaagccagcgcgtagcgaaactatgccggagaccgtgcagggtcacacgggtaacgccggaaagctccaaagttctattgtgggtgcgacgtacattccgaacctgtaggggcgtgccaacggcggaggcgaagcagtatccctgatcgtcccatgcagccccggccttcaaacgctctgcggcttgcaccctgcgctgtctggctaaaagctgctgcatatccggccctaaggggatcacccggaaaccagcgcctgtcttggtaggctgtacggcttgacgggtatgggggtctccctccgcccgttccaagttgctgacggtggcaatggtccgccggactgtgaattgttgggattctatgtcctcccaacgtaagccgatagcctccccgatgcataacccggtggccagaatgaagcgcaacaacctgccctgcgtggtgtctggcagtgcagcagtataggcgatctgttcggcttcggtcagatggtcgatctctgtttgtatcaaacggggcagttttactccaacgaagggattgctgctgatttttttcaaagtgacagcctgagatagagcggattttagtggggaaagctgtttcataatggtggctgactttgcaccggccttttgttgatggatgataaaggcttgaataggttcagccgtcagcttttgcagaggaatattcccaaaggcggggatcagatgattttcgatgctctggtgatgggtacttgctgtggttgcgcgccatgttggccacccatagatttcttcccattgccggagccattgtccggttgtctgtttgctggggtcgatatattgcccctgatcggctgatgaaagggcctctcgtttcttttgagctgcttctttctgtgtcttgccatatacgctttttcgtttgccgttgatagtgaagcgggcttcccataaaccgttttggcgctttcgggggctgctgttgccagcggaggcttttttgttaggcattagactgtctcccatcggctagttcttttaatttttgtcgatacgcttcaaacttctcgttaggggtttggctgtctatatttgttgcagagggtgggaaccgtcgttttcgccattcttcgttgctaaggcggatttcctgcttgtttaggtcacggaatcgttctacaagctcaataaaagtttctcttttttcttcagaaagatggagaatatcaggattttttttgcgttcaatgttgtatttttggtcaaaacgagcttgatgatccaaaatgagataagcgtgttcaataatggatgcgaagcgtgcagccgcagcttgagaaaccaacacacccaaaatttcatttttatattcaataccatattcagccaatccatcaacatatccaaagagttctctcatcggctgttgttcggacaatattgctcggaaagaaggactgcgaatcaaggcacttaaagtctgcagttggtaatccgttagttcattgttttcaaaataatcatttgaaatatgaactttattgccaccgttaagaaaatagtctggactacatcctgtaatttggcaaagcttttgaagaaaataaatatccggaagtcttttaccactttcataatatccaatagcagcacgggacacctcaagggcatcggcaaattcttgttgatttacaccgatttcttctcttattgttcgtagacgaaatttgaaattttcttccatatcggttttcccatcttttggcatgacaacggatttttccgttttcattgaccaccacctcctaaaaacgctaatattgtgtcattgagcgacaaacgcttgtacaccgtaatattttacgctatactcttacagtataactaagcttgttgcgacggtcaacaagtttatacattttattttgggaggttgttgatatggagagcaaaacctatactgtcatggaattggcaagtgtcttgaaaataagtcgtacaaaagcatatgagcttgtgcatcgtaagggtttcccctccttctatgtggatggcagtttaagaattgatactgctggccttactgattggatgaatcagcaaaaaaatattaaggagtctcaattatggaaaaattagcctacaaccagaaggaagcggcggcagctcttggcgtgtgcaaacagactattgaaaagctggtcaggaatggagaaatccgtgcggttcgtccttcagagaaacggatcatcattcctgtggaggcgctcaagaaatatttggcctcggcccaaaaagatgaccgctcttgagatcgctcaggcctatggcctgccactaaaacaaaagggcagtaagcattgggcctgctgcccgatccatggggag

SEQ ID NO: 3862 - DNA, 2923 bp, Unknown
  16S sequences of unknown bacteria
gacgcctcggggtggtactgcaccgagaagaccgggtagtccagaaacgccatgccctcgggcgttccgtcgttcaagttgacgtgcgtgagctggatgcggccgaactccttggactgcacgaccggggcgatctttttcccggtccagtaaaggaggctttccggatgctcggagatgccgccggacagctcgggcacgagcgcgccgatgctctcgaagacctggccgaagccgtggttttgagccgtgatctcgaccgagccggtgcgaaggttcatgaccggctgggtgccgccgtggtggccgtacttgagcttttcaatctttgcgcccgccgcgatggagagcatctggtgccccaggcagatgccgaagatgggctttttgccgatgagctttctcacctgcgtgtagaccgcgtcgaccgccagggggtcgcctggcccgttggacaggaagatgccgtcgggatccatgtcgaggacctcctgcgcaggcgtgtcccacggcacgacggtgacctcgcagccattcgtgcacaggccggacaggatgccggtcttgatgccgcagtcgtaggcgacgacgctgtgccttttctcgcagccatgcggcggcaagacgtagcgttcctgcgtcgagacctcgccgacgtagttgtggcccacgaggccgggggcggacgcgaggcggcccgcgatggcgtcgagcccgtcgtctgccgtcgagatgacggccttcatggcgccgttgtcgcgcaggtggcgcacgagcgcgcgcgtgtcgatgccctcgatggcgacgatgccgcagcccttgaggaactcgggcagcgactgcgtggaacggaagttgctgggcttatcgcacatgtcgcgcacgacgaagcccttcgcgtagatctggcgcccctgcatgtcctcggggttcacgccgtagttgccgatctgggggtaggtcatcgtgatgatctggccggcgtaggacgggtcgctgacgacctcctggtagccggtcaacgaggtgttgaacacgagctcgccgaaggtctccccttccgcgccgcacgcgtcgccatggaagacggttccgtcttcgagcagcaggaccgctggttttcctttgctgagcgacatttctagaacgtcaccttcccatcttcgagacttgcagtgccatccgtgtacacgtcggtcgcgcgcccggtgaggcacatgccgatgtaggcggagttgtttgatttggattcgaacccgtctgcggtcaccgtccattcgagggccgggtcgatgacggtgaagtccgccgccgagccctcctcgaacgagacctgctcgagtccgagcagcttgcgcggggcgattgccgtcgcctcgacgaagcgctgccagctcatcttgccgggcagcacgagcttggtgagcaaaagcccgagcgccgtctcgagccccgtgatgccgaagggcgcgaggttgaactcgaggtccttctcgtggcgggcatgcggcgcgtggtcagttgccaccatgtcgatcgtgccgtcgacgagcgcctgctggagcgcgaggttgtcttccttcgtgcgcagcggcgggttcatcttgaggttggtgttgtactcgtcggccttgatgtcgtcctcgttcaagaagaggtgatgcggcgtcacctcgcaggtgacggggatgccctcggccttggcgcgcgcgaccatctgggcaccgcgtgccgtcgagatgtgctggatgtggatatggcagccggtgaggcgcgcgagctcgatgtcgcggtcgatctgaacctcctcgcccgccgccggccagccggccatgccgagacgcgtggaggcggcgccctcgttgacgacgccgtgcccgacgatgtcttccatctggcagtggctcatgacgggcttgccgaacatcttcgcgtagtccatgacgcggcgcatcatgccgccgtcctggatgccgcgcccgtcgtcggaaaacgcgacggcgccggcacgggccatgtcgcccatctcggaaagctcggcgcccttcaggcccttcgtgcacgcgccgatcgggtagaggtgcgtgcggccgggcgcgtacgcggccttctcgagctcgtaggcgaccatggacgcgtcgtcgatggcgggcttggtgttggccatgggcgcgacgccggtaaagccgccctttgccgcggcgcgcatgccggtgacgatgtcttccttgtactcctggccggggtcgcggaagtggacgtgcacgtcgaccatgccgggcacgaggtacttgcccgagaggtccttgacctcggcgtcttgcggagcggaaaggccggcgccggcagccgccacgcggccattgcgcacgagcaggtctgcgactccgtcgattcccgtcgcggggtcgacgagatgggcattcttaagaagcaaggccactgttatcacctccaaggagcagatacattacggacatgcgcaccgccacgccggcattgacctggtcgagaatgaccgcgcgctcggaatcggccgcctcggcggacagctccacgccgcggttgatcgggccgggatgcatgatgatcgcctcgggcttcatggccgcaagccgcgcggtgtcgatgccgtagagcatggtgtactcgcgcagggacggcagcggcgcgccgtcgagacgctccatctggatgcgcagcatgtagacgacgtcgagctcgggcaggacgtcgtcgagtgtgtaggaccagtcgcagccccaccagccgggctccgagggcataagcgtcggagggccgatgacgatgggcttggcgcccatcttgacgagcagcggcacgagcgagccgacgacgcgcgagtgcgcgatgtcgccgacgatgccgatgcgcagcccctcgaggtgcccgaggcgctcgc

SEQ ID NO: 3863 - DNA, 18593 bp, Unknown
  16S sequences of unknown bacteria
gcaagcaagcaagcaagcaagcaagcaagcaagcaagcaagcaagcaagcaagcatagctctgtccttttttactgtcaagaggatttctgtacaatttacaaaatactaaaaggtgcatctcatcaagtttttcatgggagggatgcgcctttttttgtttcgcagacacaatattttgaaaaagataagtatatttttaaggagataagaatatgaaaaaacgaatcttggcaattatgttatgcctttgtatggtaatgacacttttgcctatgactgctttggcggcgaatagtgaagaaagcgctgcccaaacattgggtaaggccctgaaatcagccggtacagacattgataaagatgtcaatatggtagaagagccgcaagccgtttggggagaaacggaagaatacggaaacagcggcacattggaagaggcgtttaaagcattagaggcagacaagtcaatgtatatcaagcttcaaaagaatgtgcagcttagcgatacccttatagttgagaaggctgatgatgtaacccttgatttggctggatacactgttacggcagcagaaaataagcctattttagttataacggacaataaaacctttactttaaatgacagcgttggcacaggagagctgaccggaggcatcactgacagtcatacttatgctgctggtgttactgtgagcaacggtgcgaccttcaatttaaatggaggcgctatcacaggcaatacacataccggtgaaggttacggtacaggaggcgtttctcttggaaaaaatgcaaacttcattatgaccggcggctctattaccggcaataaatcaaatcattattacggcggcgtgaatgcaggcaatggaaccgtaacggtttctggaaatgctgtcataacaggaaataaagggaaagattttggggaagagattgacgctaacctttggctgaatacattgaacaataagcttttgaatattggagaagctgggtttggcgaaaacgccctaatcggaataacaaccaactccagaaatttcagcaatgattttgctttcacagctgcctatgatagcggcaaggcttctgcaagcaactttatctcagatatgaagaaattatctgtcaaagaaattgataaagacggacaaaagcaaatggcagtagcttatcctcctgcggcagacccgaccgcatctttggcaagcggtacttatgtgggaccgagaacggttacgctttcaactgaatcggaaggtgcttggcttgttcagcagataaacttaggcacgatagaatggtacacagatccaatcactattgataaagatacggttattgaggcttgggcgtatgccaacggaagctggggatacagtaatgtatcaaagtttgaatatacaatcatagataaaccgattgttactttaactgcttccgaaacttcttttacgggtggaaaaacaattaccttaacggtaaatacggtaggtctgacagaagacgatattgtgaattttgctctgaatggtgcggaggagcttaccgtaacagataagggcaacggtgtatttgaggtaaagataccgaataaaaccgctaagtatcaatttacggcaacggtttccggcagtatttccggtggagatgcatttgaatctggaacttcggagcctgtggctgttgatgttaaaaaatccggcggaagctcttccggtaacagcggatctacgacctattctatttctgtaccgtctgatgtgaaaaacggctctgtctctgtttctccgaaatctgccggcagcgatagcagcgtaactatcacagtaaaaccggacgaaggctatgagctttccaagctgactgcaaccgataaaaacggtaaggaaatcaagctgaccgatgaaggcgacggaaaatataccttcacaatgcctgcgtccagagtagacattgacgcttcctttgcgaagatagaaactaccttgccgtttactgatgcagcgaaaacggcatggtattacgacgctgtgaaatatgtttacgaaaacggtatgatgaacggcacggataccgaaaagtttagtcctgattttaataccagccgcggtatgatcgttaccattctctatcgtttggaaaacgagcctgctgttgcagataactgcccgtttactgatgtaaaagccgattcttattatgaagacgcaattatctgggcggcgtcaaacggtattgtaaatggatacagcgaaagtatctatggtcctgacgatgcgattactcgtgagcaattggcggctatcctctatcgttatgctgattataaaggatatgatgtaacgaagaaggctgacctttccaagtttgcagatcagaatgaaatcagcggttacgctgctgaggcacttgcttgggcaaatgcaaacggcattatgaacggaaacggtgacggaactctcaatccaaccggcacggcaacccgtgcggaagcggcacagatgctgatgaacttctgcaagaatatcttaaaataagtaactgaaaaaataaataagaccgtcaattctatacgattgacggtcttatttgcgtgcagaaaatcatgcgtttgacgcgttgctgtgttttcatctattcgataaataataatgtatgttttgccatcacaggcgcggcggtaaatgaatgccgaatgaaatgaaaaggcagatttacgcggcaaaaagtgcttttattgcaaaagatatgtattaaaggtataatatattatatgaaaataagagaaaagggcttgcatataatgaagcgaattttttacggatggtttgtagtgcttgcatgcgcgctgatgctgtttacaagtataggtatggttggaaacaatttttccatatttatgccgtttataagagaagcttacggtattacacatgcgcagacatcgtcgctggtgacgataagatgccttgtgtcatttgtgcttatgtggtttctcggtatttattatgacaaacttggaacgcgcataggcacgacgcttgcagtagcgcttgctgcggcaggttatttgatttttagctttggagatacatatgcagtattttgcgtcggcgcagctgtgatgggagcctgtaatgcgtttgcttcgatggcaccggtgtccgtacttatgaacaactggtttataaagaataaggcgcttgctgtcggcatatgcggtatgggaagtggtattgcgatgatggtgatgccgggagttactacggcgctttacgagaactttggactgtcgcaggcattcaggcttgagtgcttctttatgctgggcttggccgctgttgtttttctgctcataaaagatgagcctgcggatatcggccttaggccgcttggatacgaagagtacaaggatatactcgaaaatatgccgagtgcgcttaaaccagcagaagaaaggcctatgagcagaacgctgtgggtgacgattatcattgccagcatctgcatgggctgccttgcaaatccgggatattcgcatctttccgtcctttttacgacggcgggctttgacgctatgcaagttgcgggactaattagtgcaatagggtttatactcactttcagcaagctcgttttcggtcgcctcgtcgataaaatcggcggttttaaaagtacgatgatctacggcgcgattctcactgcgggacacatatgctgctgcttggtgtatgagcagagtacgcttatgaatattggcattgtggccggaatgggcattggatatgccattacaactctcagtgcgacgatatggtctaacgatcttgccaataaggataattatgcagtggttgtgcgcagactgcaaattgcacagtctgcgggcgcgcttttgttttcgactgtgccgggcattctggctgaccgcttcggcaactatgtgccggcatatgcgctctttaccgtgctgatggtagtgagcctgtttttagctgcgatttcgtacagacagaaagaaaaaagtatggcgctgtaaggcaccatacttttttatttgcggtcttccatttttataaaatccctgtgcggctgtatgcccatatatgcagggcgcataagcttcttgccggcgatgagttcttcaagtctgtgggcgcaccatcccgaaagccttgccgtggcaaaaagcggggttgcgatatcgggcgggatatcgagcgcgctgtaaacaaagcctgaataaaggtcgacattggcaggcataggcttgtcctctcccgtcatttcgcggtagatatcaggtactttgttttctatatattcgcaaagcgcaaaatcggcttcacggcctttgtactcggcgagtttcttggccattcctttaaggagaacggcacgcggatcggaaagtgtgtatatcgcgtgtccgagaccgtagatgagacctgaaccgtcattggcttcacctttcaatactttgcggaaatattcttcgagctgtttttcatttcctgtatctttgacatttgcttttaaatcttcaagcatatttataactttgatgttggcgccgccgtggcgaggccccttgagtgagccgactgccgcggctatcgtcgaatacgtatcagtgcccgacgatgagatgagatgagtcgtaaatgacgagttgttgccgccgccatgctctgcgtgaagaatgagagacaggtcgagcaggtgcgcttcgagctgagtaaattcacccgttggccttatcattctaagtatgttttcagcagtgccgagctccggaataggatagtgaaggtgcagactttcattgtcgtaaaagctgcgtttagcctgataggcataggctataagtgaaggaaaatatccgataagctctatagactgacgaagcacattttcaatggaagtgtcgtcgggattgtcgtcataggaatagagagcaagtacgcttcgcgccagcttgttcataagactggacgatggggctacgagaatcatatcccaggcaaaaccgcggggaagttcacgcctttccccaagcagatgctgaaagtcctccagctgttttttattcggaagctctccgaaaagcagcagatatgtgatttcttcaaaaccaaatcgcttctcttctataaagctgtttactatatcctctacattgtatccgcggtaatagagtttgcccggaactgcaattttttctttattttcgtttaccttgtagccctcaacgtgactgattttggtaagaccgacgagtacgcccgtgccgtttgcgtttctgagcccgcgctttacattgtactctgtatataaatccgctggaatttcatcgttgctgatgagcttctcggacattttttttataaataaattattgcttaattcatttggcttattataaaatgctgtcattaaaacctccttttaaattgtatacaagtatacatctgtattatttaaagtataacacaaaatgtttgaaaaagcaataaaataagagatataagaaaaataagaacatttgtttgcaaaacgctttaatgtgtgttaaaataggctggcagaaaaaattagtatttggagaactttttttattggtatataatctatataaaaggaggggattccgatagaccgttttaaactggtatcaaaatttaagatgacgggcgatcagccgcaggctgtggacaagctcgcgagcggcatcctgagcggtgaaaagcaccagacgctgatgggggtcacgggctcaggcaagacatttacgatggcgggagtaatagagcgtgtgcagaaaccgacgcttgtaatttcgcataataaaacgcttgcggcacagcttcacggtgaattcaaagaattttttccggaaaacgcggtggaatacttcgtcagttattacgattactatcagccggaggcttatgtgccttcgacggacacatatatagaaaaggattcagatatcaatgcggaaatcgaaaagctgaggcattcggcaacagcggcgcttgcggagcggcgcgatgttattatcgtagcttctgtatcatgcatctacgggctcggctcgccgttcgattacgaaaatcagatgctttcgctgaggccgggtatggaaaagccgcggaacgatatccttcgcaagctcgttgacatacagtatacgagaaacgacctcgcatttgaacgcggttgcttccgcgtacgcggagatgttatagacatatatcccgcaggtgcggaaaatgcggtgcgcgtagagctgttcggcgacgagatagaagtgataaaagaaatgaatcccgttacgggcgaaattgtcggtcttagaaatcacgtgtccatatatccggcatcgcattatgtaacttctaaagaaaatatggagcgcgctatagatacgataagcgaggagttagaggagcgcataaaatggtttaaggacaggggcaaattgctcgaagcgcagcgaatagagcagcgcacgcgctatgatatcgaaatgctgcgcgaaataggtatgtgcaagggcatcgaaaactatgcgcggcatataagcaatctggctccgggagccaaaccgtacacgcttatagactatttcccgaaagattttcttataatgatagacgaatcgcatgtaatgctgccgcagctgcatgcgatgtacgagggcaatctctcgcgtaagcgctcgcttgtggattacggttttcgtctgccgtctgcgcttgacaacaggccgctgatgtttgaggaattcgagaatatggtaaatcagatagtatatgtgagcgcaacgcccgcgaaatacgagcgtgagaagagcggcggcatttctgcggagcagataataagaccgacagggcttatagacccgccgatagatataaggaagagcgaaggtcagatagacgacctcatcggtgagataaacaaagtgacggaaaacggcgaaaaggtattcgttacaaccctcacaaaaaaaatggccgaaagactgacagactatcttaaaaatgcgggaattcgtgtgaaatatctgcattccgagatagatacgcttgaacgaatggaaattatccgcgatctcagaatggggctgttcgatgtccttgtaggtataaatctgctgcgagagggactcgatgtaccggaggtaagccttgtagctattctcgatgcggataagcaggggtttctgcgcacggaaacatcgctcatacagacgatcgggcgtgccgcgcgtaatgttaacgggcgtgtaataatgtatgcggacagcatcagccctgcgatgaagagcgccatagaagaaacagacagaagacggcaaatacaacaggaatacaacgagaaaaacggtattacgccgcagtcgataaagaaggatgtgcgcgcagttatcgaggcaacaaagcagatagagccggaggatgagttctacaaaggcagaagtccgcttgagcttacgaagaaggagcttgccgagtatctgaagaaactcgaagcagagatgaaacaggccgcgcaggatcttcagtttgagcgtgcggcggagctgcgcgaccgtatcttcgagtataaggtgcggcagtaaacagcagactaaaatactgaaatacagaggtgagaaaaaatgcctgataaaatatatataaaaggtgcaaacgagcacaatctgaaaaatgtagatcttgaaattccgcgcgataagctcgtggtattcacggggctttcaggatcgggaaaatcctcgctcgcttttgatacgatatatgccgaaggccagaggcgctatatggagagcctttcgtcgtatgcaaggcagtttctcggtcagatggaaaaacccgacgtcgaatatatagaaggtctttcgccggcgatttcgatagaccagaaaacgaccaacaaaaacccgcgctccacggtgggcacggtgacggagatacatgattatttaagacttctctatgcgagaataggtgttccgcattgccctgtctgcggacgcgagatttcgagccagagcgtggatcagatagtagacagcataatgggaatgccggagggcacgcgtgtgattgtgcttgcacccgtggtgcgtcagcgcaagggcgagcacgaaaagatcatagacaggattcgccgcgaaggctttacgagggtgcgcatagacggtgagatgtatcagcttgaggatgatgaaataaagcttgaaaagacatttaagcacacgatagaaatagtagtcgacagaattgtcgtaaaagcaggaggtgaagcgcgtattgcggaagcagtcgagcttgccatagcgcacggcgaagggcttgtgcaggtgcaagtacagtatcctgatccgggaaacggacaaaggccagagcctaaggaatttacttttagcactaagctcgcctgtccggagcatggtatttcaatggaagaaatggaaccgagaatgttctctttcaatgctccgttcggggcgtgtcctgagtgcaacggcctcggctatacgcacagaatagatccggaccttatagtaaaagaaccgcagctttccataccggagggctgcttcaagcgaatttttatgttcatagaatatcccagctactacaagcgagtggcaaaggcgctggcggacgagcataaggtggatataaacacgccttatgcgcagctgccgaaaaaatttctaaaggaatttttctacggcacagggacaagaaaactgaaatacgaatatgtggccagtaacggcaagctgcaaaagcgcgagcatatttacgagggcatactgacaaatctcgagagacggtacagagatacgggttctgaatttttcaaggaaaaaatagaagaatatatggaaatgaatgtatgcagcgagtgcggaggcaagaggctcaaaccagaggtgcttgccgtaacagttggcggtatcaatatagcggatctttcggaaatgtcggttgcagatatcattgcctttatcgacgggcttgagctgtcggaaaaggacgaaatgatagggcgtcacatattgaaggagataaaagcaaggctcaattttctgatgaatgtaggccttgactatctgacgcttgcgagggcggcggcgacgctttcgggcggagaatcgcagagaataaggctggcaacgcagataggttcaagcttgcagggtgtactatatatactcgacgagccgtcaatcggactgcatcagcgtgataatgaaaagctgctggcaacgctgcgtaatttaacagacatcggcaacacgcttattgttgtcgaacacgacgaagatacgatgtatgcagcggactatatagttgatatcggtccggaagcgggcatcaatggcggcaaggtcatagcgcaggggacggtggaagatataaaggcctgcaaggagtcgattacgggtcagtaccttacgggcacgcgcaaaatagaaataccgaaaacgcggcgtaagggcaatggcaaaaagctgaaaatcattggtgcggcggagaataacctcaaaaatatagatgtggaaataccgcttggcaagtttgtatgtgtgacgggagtatcgggctcaggaaaatcatcgcttgtaaacgaagtgctcaacaaggcgctttcagcggcgatatacaagagcaaggacaagccagggaagcataaaaaaattaccggcattgaaaatgtagataaagtaataaatatcgaccaatcgccgataggaagaacgccgcgctcaaatccggcgacatatacgggagtctttacgaatataagagatcttttcgcgtcgctgccagaggcaaagctgcgcggatttgaaaagggcagattcagttttaatgtcaagggcggcagatgtgaagcctgcagcggcgacggcattataaagatagaaatgcattttctgccggatgtttatgtgccttgcgaggtatgtcacggcaagcgttataacagagaaacgctcgaagtaaaatacaaaggcaagagtatttttgacgtgctcgatatggatgtgagtacagccgttgaattctttcaaaatatgccgtcgataagaagacatctggaaacactcgaacaggtaggacttggctacattaagctcggtcagccttcgacacagctttcgggcggagaggcgcagagaataaagcttgcctcagaattatccaaaaaaagcacgggaaaaacggtttatatactcgatgagccgacgaccggactgcactttgctgacgtcgataaattgcttcaagtacttgacaaattggtcgatgcgggtaatactgtaattgtgattgaacataatctggatgttataaaacgcgcagatcatattatcgacttagggccggagggaggatacagaggcggcactatcgtagcgacaggtacgccggaggagatagcggagtgcagtgaatcctacaccggacagttccttaggagaatgctttagaggagaaaaaatggacaacaattttaacgacggaatcaatctgactatgctgacggatttctatgaaattacgatggcaaacggatattttgaaaccggtatggcggagaaaatcgcatattttgatatgtttttcagaaaagttccggacgggggcggatttgctattatggctggtctcgaacaggtgatagattatctgtcacatcttaaatttacagaaaaagatattgcttatctgagaagcaaaaactgcttttctgagaaatttcttgattatttgaaagaatttgaatttcaatgtgatgtgtgggcagttcccgagggtacgcctatttttccgggagaaccgattgttacagtgaggggacctgtggtgcaggcgcagtttgtggaaacgatgatacttctcataataaatcatcagagcctcattgccaccaaggcaaatcgcgtagtacgggctgcgcagggaaagcctgtaatggaatttggcaccagacgttcgcatggtacggcggcggcgatgtacggcgcacgcgcttcatatataggaggatgcgtgggtacggcatgcgcgatagcagacagggaatacggggtaaaagcgcttggaactatggcgcacagctgggtgcagatgttcgcaagtgagtatgaagcctttaagaaatatacggagatatatcctgacaacgcgacgctgctcgtagatacctatgatgtattgagaagcggagtgcctgcggcgatagaggtgtttaaagagcttgatccgccgtataagggcatacgcatagattcgggcgatctcacatatcttacgaagagagcgagaaaaatgctcgatgaagccgggcttacggactgcaagatagtagtatcaaattcgctggatgagtatataataagagatctgattttccaaggagcgaaggtggattcatttggtgttggcgaaagacttattactgccaaatctgagccagtgttcggaggagtgtataagctttgcgcgcttgaacaggatgggaagatcattccgaagataaagatttcggaaaatacggagaaaattacaaatccgggctttaagtctgtatatcgactctacgataagacgacggacaaggcgatagctgatgtcattacgcttgcagaagagaagatgccggaagagggagaaagcggatacgaaatatttgacccgaacgcggtatggaagaggaaaaatattaaaaatttctatgccaaggatataagaaagcagatattcaaggcgggaaagcttgtgtatgaagctccggatatagaaacggtgagagaattctgttacgatcaggtggagacgctttgggaggaaattttaagatttgaaaatccgcagacatattatgtggatctttcgcagaggctgtggactatgaaaaatgatcttattgaggagcatatggacagagtgtaaagaatgacagatgagaatatcagggcggcggataaaaaaacaatgtctgcgctctttgtttaggaggtttgaaaatggcacttatcacgacaaaagaaatgtttgcgaaagctcttgtgagcgactatgcggtaggagcttttaatgtgaacaatatggagataattcagggcattgtggatgcggctaaggaggaaaatgcacctctgatattgcaggtgtccgcgggcgcaagaaaatatgcgagaccggcgtaccttacaaagctggtggaagccgcgattatagatactggacttgatatcgcgctgcatctcgatcatggcgaggactttgatatatgcaagaagtgtgtggatgatggcttcacatcggtaatgattgacggcagcaaacacgagtttgaagagaatataaagatgacgaaacaggtagtagaatatgcgcacgcgcacggagttgctgttgaggctgaactcggaaagcttgcgggcatagaggatgatgtaaatgtggacgcgcgctcggcgacgtttaccgtgcctgaggaagcagctgaattcgttgaaaagactggtgttgactcacttgcgattgccatcggcacaagtcacggtgcatataaatttaaaggcgagccataccttgattttgaaagattaaaggaaatacataagcttattcccgatacgccgctcgttcttcacggagcatcgacagtgctgccggaatttgtggccaagtgcaacaagtatggcggcaatattccgggagcgcagggcgtgcctgaagagatgataagagaagcggccaagtacggcatctgcaaggtgaatatagatacagacttgcgtctggcaatgacggctgaagtgagaaaattcattgcggaaaaccctgcggaatttgatccgagaaaatatcttgctccggcgcgcgacgccataaaggctatggtacagcacaaaatcagaaatgtgctcaatgcgtcgaatatgaggtaagaaagataacgctgcaaatacacggcacatttttatgaaatttttataaaacagggaagaaagtaatggctttcttccctgtgcaaaacagttagtattctatgcgctgcaatttactttcttaaaaggctttttccggctattcttcaatgagcgcgataattctgtcgaggcgggcgcgctgctccttgttcatcatcggacgcattgctttgatagcagaaatttgcttttcataagcccttctgtctttttttatcgcatctttaagcgctgcaatttctgcaagtatttcagcgtcacctttatttttaatgttttcggcttttctttgtatgccttctatttcgcgctcggaaagctgcgcgctgccttttatgccggcttcgccggccaaatccattaacattttatttgtaatatccatcagattcctctctttcacaattatgttacagtatatgcacggagagcggcaggattgcatatattaaggatagatatttttctctgcggaggtacatatatgaatccattaccgatagctgtactgcttctgatatcgcaggggcaggggggcataaacggccgcggcagacgcggcagaggcgcaggaggccttttgagcgcaggagctgattttgatgtggcgccggtgctcgatggactttacagaacggcaaacgctctcgaacgtatagataaaatgaacaaacttgcgagattaccgatgacacgtgagcgcgcgccggaattgctggaggctataggtgcgccgcctgaggtcaaaaatttgattcaggctggcagcgcgcttatggcgcgtggagcgcagggcgcaaacgggctctcaggctatggcaatgcagccggattgggggaaacagcaggatatggaaatacggactttcaggcgccgcgtgcacttccacagggaggacaatatgatatgtacgatgacagagacccatatgtgacgggtgcatacgacaatggagcgcggggctctgctcctgtatacggcgcacaaaatacgacgcagatgccggactttgcgcagctgatgcagacatttggaccgatgctcaaaacctttatgcagcagaacaacggataaatcattttctacactttttctccataatatataaaaacaaggcattgcgtttggcagtgccttgtttgcgttacaaaattattttgtttgccggtttgctgcgaatgccgcagatagcggccgtttaagtgtttgtatgattataatcccggctgcatcagatattgcacgagctcttccggcgttacatttgaaggtatgtgatgctggccggactggatactgctgccggcgcccattgcgtttactgtagatataaattcttcggtgctgccgacaaggcctgccgctacgcagttctgcgcgacaacatcgagggattcgccgtaatttatgtatatagcgcatatttttacttcgtcttcgccgccgcttgcactgtctattgcaccgccgcttgcatttccgtcaatggcgccgtctgtcgtgacaacagatggattgtcagcgctggtgtcatcggtatcattttttaacgtttcggctacaagtgtttccgggtacgccattataacgtctacgcgccaaaaaatgatgacagccgcaatcgcaagaattatgagagccacgagtatatcgtttttatcgtaaaaaatatctttgagtttgttcattttttctcctatgctttcggaatttattagtaagggcaaacgttaaagagccgcaagacaaatttatgcggatgcaacacgtctgtgtgaatttttctatatataataatgtaacaagaaataagctttttttcaatcgaagattttgtgaaatttattaagttttgtttacagtataatttttaaggggttttgcttttactaagtgcgtcttttatggtaaaattgctttatgataagaataactgttggaaaaaatgaagacaaccagagactggacaggtttctccgcaagtatttgaaaagcgcgccgctttcattcatatacaaactaatacgcaaagatgtaaaaatcaacggcaaacgtgcgagagaggattatatgctggcaggcggcgatgaaattgttatatatatgaacccggaggagcttaatgcttatcgccctgtaaaagaaacggtaagcagcagacggcagtttaagattgcatacgaggatgagaatattctcgctgcagaaaagcctttcgggttgcttactcatggcgacaaaaccgagaaaaaaaggcatcttgcgaatcaggtgatatcgtatcttacggaaaagggcgagtacaatccgcgaacggagcgaatttttacgccggcgcctgcaaacagactggacaggaatactacggggctcgtgctttttggaaaaaacagcgagtcgctgcgcgagcttaaccgtatgatccgcgaaaaaggctatgtgagcaaatactatattactattgtcaagggcaatatgaggaagccgctgattctgaaagacaagatggaaaaggacagcgcaaccaataccgttaaggtaaaaagtgcggatgaagaaagcggtaagcttatggaaacaatagcgaggccaatagctgcagtgccgggctatactcttcttgaggtagaactcataacggggcgaacacatcagataagagcacagctcgcaaaggcgggatacccgattattggcgatgcaaaatatggcagccagaatataaatagaatgatagaaagaaaatatgggctttcaactcagtttcttcacgcatataagttatattttgaaaacggaagcggtgtgctttcatatcttgcaggtacggagatacgcagcgaacttccggaaaatttaacgaaaataaaagaagatatattcaaggaataaatcaggaggttttggacgataatgaaggcatggataagagatttagtggtagcacttgctttggcatttataattctgcagtttataaagccgacgatcgtaagggaaaattcgatggagccgactttgcacgatggagattacatatttctgagcaggcagtcatatacattcggtgagccgaaaagaggggatattatcgtgtttcatacggagctcaagaccgaaacaggaagtgagaagcttcttataaagagaataatcggacttacgggtgatgtaatagatatagaagacggacttgtatatctcaatggagagctgcttgaagaggattatattcctgccggaggcactatgccgcacgatgcgggcagccattttgaagtcccggaggactctctcttctgtctgggagacaatagaggtgtgagcaaggattcacgttactcagatgtaggatatataaaaatagatgaggttgtggggaaggcggtaataaggctgtatccttttaacagtataaaggtgttctaaagcggtgcgtattctcttatcgcagcatttacatattttgcgaggggagagtgggctttgatgtttaaagtattttggggatatttacgtgcggctgtgctcgcgcttattgtgggaactgcggtggtaacggcgtctgaaattgataaaatcccggattcttcgatggcgccggtcatagacgcggacgattttgtttttataaataaggctgtgtatgtttataaagagcctgctgctggagatatagtggcgcttgaaagcagcctgcataccaaaagcggcggcggcgccctgtttgcttctcgcgtagtgggaacggcaggagatacggtgatgcttccggacggaaaaaaagaggttgtaaaagaaggatttgtatacctcgtgagtgcggaggatgaaattgcagaaactgtgggtaatttagcgcgtactgataaaattgcagatgagtttgctgatggggaagcaagcggcgatgaaaacagcggttccgcggtaattggcaggattgacagccgcaacagcgctttgggacaggtttctgtagatgatataattggccgcgttgagtttgtagtgtggccggtagaacatatgagacgaatttattaacggtattaggtattttatagaggatgcgaaaaatttttgagattatttttcgctgctaattgtatatattgaaaagggaaaaagagtgaaacagagaaaattagtcgccggtaataaaaaggcgagacacgattattttatagaagaaacatatgaagcgggtatcgtgctcacgggcacggagataaaatcagtgcgtcagggtaaggttagcattaaggaaagctatgcgcgcgtggaaaacggcgagctcattatttacggtatgaatataaatccgtatgagcagggtaaccgttttaatgtcgatccgctgcggcggcggaaactgcttttgcataagcaggagatcagaaagctcatcggctatacgacgcagaaagggcttactatagtgcctctcaatatgtacataaatgaaaagggactggcgaagctcgaaatcggtgttgcacgcggcaagaagaattacgataaaagagatgatattgcaaagcgcgatgcaggaagaagaatgcagcaggcaatgaagcgcgatgcgaggtagaaagtgaaatatttacgaaaaagataaccgtcttgtgaatttcggcatatgcggagtgacactgtggatattataggagttaagtatcaaggagggttaaaatgcagtatgtaacacttggaaaaacgggtattaccgtgaataagaacggatttggagcactgccgattcagcgtatttcgttcgatgaggcggcggctgtgctgagaagggcatacgacggcggcgtgcgctattttgatacggcgagattttacacagatagcgaagcgaaaattgcttatgcgcttggcgacgtgcgttccgatatttacatagctacaaagtcgatggcgactgcggcagctgactttaaagagcagctggaaacgagcctcaaagaactgggaacggattatgttgatgtaatgcagtttcataatctgccgttttgtccggtgccaggtcacgaaagcgggctctatgaggcaatgcttgaagcaaaagagaaagggaaagtgcgtcacatagggattacgacgcacaagatagatttggcaagagaagcgatagagtcgggtctctatgagactttgcagtatccgttttcgtatcttgcagcgcctgaagaggtggaacttgtgaagatgtgcagggaacgcaatatgggctttatttgtatgaaaggaatggcaggcggtctcataagaagcggaagagcgtcgtacgcgtacatatcgcagtttgataatgcgctgccgatttggggagtgcagaaaatggaagaaattgaggagtttctttcctgcaatactgaggattttgagcagggaatgacgccggaaattgaggagattattgccgctgataaaaaggagcttggaggcgatttctgccgcagctgcggatattgtatgccgtgtccgatgggtatttccattaaggactgcgcgcgtatgggacttatgctgagac

SEQ ID NO: 3864 - DNA, 11329 bp, Unknown
  16S sequences of unknown bacteria
aaaggatccgatcaagctcatcgggcctactgataatgaaggtaaagcggaatcggagaagtttgtaccggagcaggatagctattatctgatagagacgaaggcaccggaaggatatgtgcgttctgatgtggtacaggaagttatcattgatgacaacgtggatccatctgaatatacatttaagaactataaaaatgctacctatattgaagtgacaaaggttgacagtcaggacacaaataagaaacttgcaggtgctgtatttgagatttatacagatcaggaatgcacaggatcaccgattcaggtaatggatccgacagatgaacatggatatagtaagtcgggaagcctgccggatgatattgacgtattctatttgaaagaaataacagctccgacaggttacaagattgctcctgtacaggaagtggctgtgcttgcaggagatacaaaacccgcaactgttcaggatgatccaaatccaaaacagatagaagtaataaaacaggaccagttaactaaaagacctttgaagggagcggtatttacagcgtatgaggataaagaatgcacaaagctgttgattgagcttccgccgacgaatgaatctggttatgcaatttcagatgaattttattatgatggaaaaatatgctatctgaaggaaacaaaaggtccggatgaaggtggatatttcctgtcagatgaagtttatgaagtggaattgaagcaaggagaggatgaagttagcggtctggacgtgccaatctacaatgaaaagctgacggtagatgtaaagatcaagaagaccacttcctcaggtgaggcattggcaggagcagtgtttggtgtatatacggatccggaatgtgaagatttatggctggagcttcctgcaactgatgagaatggagagtcggtatcaaatacctttacacctgatcaggagaattactacgtaaaagagctttatgcgccacttggatataaactcagtgatgaagtggataaaataacgatcactgaagaccaaaaggaatatgtggttaccagaagtaatgaacctgtgtggacaaagatacgagtacacaagtatgatgctgaaacgaaagaggatctgtctggcgcgaaatttgcagtttactcaactgtcgattgtgagccgggtacagaactgaaagaaatcataacaggatcagatggtactggtgtgtcggataaaattttaatgacacaagatgtattttatgtgaaagagatacaagcgccgaccggttatataaaaacacagacggtatggaaagtgaccgcagtagaaaatgacgtatgtgcaatgttggaagtcccaaatgcaaaagagggagacgaagatcaactggtacaggttaaggtcgttaaatatgagagcggcactggaacaacgaaaccactgggtggtgcgtattttaccgtatacaaagacgaagaatgtacgcagccggttgtggaagttggcccgacggaagaactgtcaggaactgcaatttctaccaagtttgtaaaagagcaggatgaatattggataaaagaaagtaaggcgcctgtcggttatgagttgaatcaggatgttaatccgatcataccaggtacagatgtaaatgatcttgaagaggttgctttttacgatgaccagaaaatgatcaagattcgtgtcaacaagagcgatgcagacgattctgaaccagtggaaggcgcatatttcaaggtttataagacacaggcagatgctgaaaagcaggaaaatgaagtctgtaaaattggaccgacaaatgcggcaggtgtagcagaaaagagtatccagaaggaacaggatgtttattatctgagagaaagtcaaaaggtaatgggatatgtaagatctgaccaggtggatgaattgataattactggtgatgtaactgattattatgcagaaaatacaccagaatatacaaagattcaaatcaaaaagatagatgctggcaccaaagaaggtcttgcaaatgcagagtttaatatttatacagacagttcctgttcagatgaatcctttgttgatgtattaggaccgacagatgagaacggatatgctaccacaggttctataaagcaaggaaaaggtgttttctatctgaaggaaacaaaagcaccggatggttacttgttatcggatatgactgtagaaggaccgattcatacatctgttggagaagtggcaacctggacagttgaaaatgaaaagattccgatttcttttacaatccagaagaaggatgcttcaacaagagaactgatggatggcgcaaagtttgctttgtataaagatgaggactgtacagaatatgtactagactttacaaaaaaaggcaaaggaatatattcgtcgggatcgttttatgcgacacagagtacatattatgtgaaggaaacagtggtgccggaaggatatgaagaaccggaatacccgacaaaagtgaatgtacttgaacttgattctgaaaatgagaatgatccggtagtcaccatatggaacacgctgacaggggttgataccatcagggtttctgttaataaagtggatgctgttacaggcgacgcagttccaggggctgtctttggagtatattccaaggagacttgtgccgatgatgagttgctgacaactcttccggaaacagatgcgagcggttatgcacagtctgaaaagtttgtatatattaaaggacaagacacctattatttgaaagaaataggtacaccgaagtggtatgttgcagatgcagatgtgataccgtttaaagtggagcacagagcagttctggatgaaaatggagatccgacttcggaagttatgttgtatgtatcaccacagacgattaaaaatcagccagagcagacccagatacaggtgaaaaaggtagaaaagataaatggaaatctatctgagccactggcaggtgcttatttcaaagtctataagaggaaggaagatgcacagaaacagcaaaatgcagtttgtgatattggcccaaccggagcagatggaattgcgaaatctgaagaattccatagaacacaggaaacgccatattatgtgagagagagtcaggcaccggcaggatatattttatcttcagatatatatgaagttgagacaactgtaggcggtgtatcagagacggatgagattgtgaatgatccgaaaatcacagatgtgcagatactgaaaacgacaaaagatggaaaaacgccactggccggagctttatttgcactgtatgaatcgcctgatagcagaacacctgttacggtattcccgctaacaggggaaaatggaattgctcacagtgatcctgttaatataacgcaagagtggtattacttgaaagagttgcgtgcaccgaaaggatatgaacggatagagacagcaattccagtaagattggaaaatggcgagacaacatacgtaggaccgttaaagaatggatctgatatggatgaaattcatattctgaaattggaggacaaggatttcaccccattagcaggcgcaatatatggtatctacgaaaatgaagattgtgaagaaggaacagagatcggaagcattggtccaacagcagatgatggaagagcgacatcccggaagtttgtaagaacgcaagatgtttattatttgagagaattacaggctccggaaggatatgaacgttcggatcaaccaatagtagtcaacttggcagggggcgatggaacggaagaaaatccggttaaagtactcgacacgaagaaaatgtcacagattaagatctataaatatgatactgttttgaaagaacagattaaaggtattcagtttacagcttatctggacaaagagtgcaaaaacaaaactgatttcaaatttgctttgacagatgatgatggctatgccgtatccgacctgtttacaccaacacaagacatctactacgtgaaggagactggcgtaccggatgactatccgttccagattcctgacacggtatgggaagtatcagtgatatctggtgagaccgcaaaactggaagttgccaatggagctctggcgaagatctatatcaagaagattgctgaaaaagcctccaaagatggaacagatacacctctttccggggcagagtttgatatttacaaagatgcggcttgtaccataaaagtgggaagtgtaggacctacagatgaaaatggaacagcaagttctacaagctttacaaaagagaagtccacttattatctgaaggaaacaaaagcccccgaaggttataagctgaatccggatcccattgaagcaacggtgacagatctgccgcaggcaactacgggtgacgctacagaaggtactccagctgcgataacgccagtatggaatacggtaacaaatgcaaaactggagggcagcatcacaatcaagaaacggaatgctgatgaaacacctttatttggtgcggaattccagctggaagtttatgatgaagcaagcagtacatgggtttcttctggaattacaaatcagacaacaggagcagatggaaatgcagtatttgaacatctggttccaggcaaataccgcctgacagaggtcaaagcaccggcgggttacaatttgctgaactcatccagagagatcacgatcccctatgagttaaatgtggcagatgtgaaagaaccgtccacaggatacacagaagtagtgggagagaagatctattactatgatgtgaccctgaccttctataactccctgccgtttgacatcccatccacgggtggtggcggcatgggtggtgtgaccgctggtatggcattgatgttgggaacttctgcatccgcatggctgctgaaacgcaaaaaaagaaaattgagagctggatgatatctggctctcaaccataagaaatacttggagtgatccatttatataagtatttacaaatcattttatccacataagaaaaggagaggaaaacatgagaaaaagaaatgcagtaaagaaaatcgctgccgtgttggcaagtgcatgtctcatagtgagcatgctggctacaaccgtcatggcgaagccggcgactactggaacaactggtagcctgacaattaaggcaaagacaggcgagacactgaatgggtatacatttgatctgtatagggtggccgatatcgcagtagatggcgaaggaaagatgacttatacagtaaaagagaagtataaaagtgcgttaaattctgctactgatctggaagatcagacaaaggtagaagaaaatctgaaagcacttgtgactgcgtcagcaactgacgaaaaatttgctacaaaaattgctacatcaggagaggcttctgtaaggtttgattctgtagacatgggatattatttagtaagagtcagtgcaccggaaggagcaacctctgcaacaggagatttcctggtatccgttccgtctaccaaggcagaaggatccgacctggtttatgatgttaccgtgactgttaaaacatctacggttaccattgaaaaggaaggtaaagtagagggagctgcaacaggagagaaaactgtaaaagttggagacaagatcaattatactttgaacatgaaggttccagataccactggattttcaaaatatgtttacaaagtgacagataccatggacaaaggacttgcatttgatgagaatagtctgaatgtatatgtaggaaattctacgataccaatggcagcaaataactatcagctttctaaaaattcttcaactggaaaaactgagatcgtagtaaactttaatgataccctgtttgtaaaaacaggcggtacaggcaatccgactgagtatccggctggaactgcattaaagattacttattctgcaactgttaccaaggatgctattaccacaggaaaagatggtgtatccaatactgcaaaactggagttcagcaacaaaccgggttctgaaggaaccggcagtaccggagagacaccggcaccggaaaaaccaaccttctatacatttaatcttaaagtagacaaaacatttgctcctgcacttgtagatgcaaatgatgctaaaaaagtaacattcaaactgaaagatgtaaaagtaaaagaagtaactacaggtacagcaggtgtttacattgttgatccggatggaactgatatgaatctgaaattagctaatgataatacattgtctgtatctggtctggcagctggaacctattatctggatgagactgcaaccgtaccgggatataacctattaaagagtactattaaaattgtgatttctccgacctatggtacagatggaaaactgaccggatatactgcagatacaagtaagattgatattgataatcagaatacagtaactgtaagcgttgaaaataaaaaaggcttcactcttccgtccactggtggacagggtatggtagcactggttgcagcaggtatctgtctgatggcagctatggcagctctgatggtatcctacatgagaaaacgtcggaacgcataagtgatgagaaaatggatacttcccgcgctgatggggcttggattcctgcttggattgggtatcaccctttatccggcagtaagcaattacctgttggagaagaaccagagtactgccatgcagggatacatagaagaacagggaaaggttccggacgaagtcagtgaacacctgaagcaggaagcaagggagtataatgaaaaactgagagaagggactgtcgtgctgacagatcccttcgatccggaagcgttaaagtatattacagatgaatacgaggagatgctgaatccggatggggatggattgatgggctatctggagatcccatctatcaaagtatatttgcctgtttatcatggaaccagtgatggtgtgctgcaggccggagttggccatctgggcaacacctcgcttcctgtgggtggcgagaacacgcatgcggtattgtcaggacacacggggcttcccaatgcccgtcttctgacggatctggacaagctccaggaaaaggatcagttttaccttcatgtgctggatgaggtactggcatatgaggtggatcagatcaagattgtggaaccggatgatatcagtgacattttcatagaagatggaaaagattatgtgacactggttacatgtacaccatatggaattaattctcaccggcttctggtacggggaaccagggttccgtatgtggaagcagaaaaagaacaacaggtcagccgacaggaggaaagtacctggaatcaggaataccttcatgcaatcattgttggcgtggaatggaccgctgttggcattggtgctgtgctggtattgactggattgtaccggttactatttaaatcaaagaaaggaggaggtaaagcatgaagaaaatgatgaatactctgttgagcatgctgatctgtacagtgatgttcagtacatgctttggcgcgacaactgtctgtgcagctccttccggaaaaatagaaatacagttaaaagatctgaatactgcacattcaaacaaaacaggtgtaacatttaagctgtatctggtaggagatgtgctggattctggagagccagtgatagatcctgtgtatggaatcacagaatatcccgtaactgcggatgagaccgaacaggcggtgaagaagatcaaagctgcactgtccgggtctgcacaggcttctgctgcgacagatgccagtggaaaagcgatgttttctggagtggctgatggtatctattatatcgccgctgatgaagcaaacggatatggaatagtggaaccgcttctggtacagattccttattccgtagaaggaactggagaaggcaatcatctggtatgggaagtgagtgcagagccgaaggcatctgtccggccaccaaaaccagagaagccatctgacagtaagaaacatccttcgagtaatcatcctgacaatacaccggcctcattgccggagacagatacaacgactgggatcaacggtccaagaaccggtgataacagcccccttgcaggttatgcgatcatgatcgtatctgcatctctgttgatcatctggctggcaggtagaatgaaaaagttaagagaataaaagcataaaagaaacaggaggcacttgctgcctcctgtttctttgcgagaatatactaaatatattttttctgcttcagatagaagaggatctgttctgctgcttcttcaatactcatgtcaccggtgttcaggcacagatcatagttggatgcagcctcccagtcacctccggtatagtagctgtaatatttcttacgctgcttgtcagtctctttgatccgttcaacagcagcagattcctccagagaataagaatgcatcatacgctgtactttgctgtccatatcgccacatacaaagacatgtacgcagttatcatgatctttcaggacataatctgcacagcggccgataatgatacaggattcattatctgccacttcccggatcagttcagactggaaacggaacaggttgtcaggagagacgatatcctttccaagagaaggcttctgatctgccggtttcagatcctttaccagtttgtataaaagattgtttcccggacgttcactattcacatggaaaaattcttccagaacaccactcttatcagataccatacggaaaatatccttatcataataaggaatgccaagttctttggacagatgctgcgcgatataggtcgcaccggcaccacattcacgtcccagggtaatcacatatctttcagccataattataccacccttctattgtgaaaatgatttaattttatatatattatatcatgaaatatatacaataacaacaaaagaatgtgcctctatcttgaaataaatgaaaaaagaaatataataaaaggcaggacgataacaagggattgtggattgaaatgaaacgggttgattttgaaaatggaacggtgacagggaatattctggaagcggctcttccgatgctggtggctcagatcctgaaccttctgtataatattgtagatcgaatctatattgcaaggattgcggaggtgggaactgctgcactgggagctgttggactatgttttcctttgatcgtgattatcactgcatttgccaatctgtttggaaatggcggtgcgccactgtttgcaatccagagaggacagaaggatgagaggaaagcagtagcgatcatgaatacctcttttaccatggtctgtgccagtgccatagttctgatggttgttggattcttatttgcaagaccgattctgattctgttcggagcttccgataactcacttgtgtatgcattgccgtatatgatgatctatctgctgggaacattgccatccatggtagcagtggggatgaatccttttatcaatgcgcagggatattcgctgatcggtatgtgttcggtagcggtgggagcaggagccaatcttctgctggatccattatttatctttggattgggatttggtgtgcgcggggctgccattgcaactgtgctgtctcagtgcctgtcagcaatatttgtatttcattttcttacgaaaaaatcagaattgaaagtacgattgctgaagaagaatgagatcgctgcctgtatgggttatgcaaaaaatattataagccttggtatggcaggatttatcatgcagctgaccaacagcctggtaacgatctgctgcaacaatgtgctgtcagtcaccggcggtgatatctacatctcagtgatgaccattgtatccagcgtgcggcagctggtggagacaccgatccatgccatgagtgaaggatcatcaccaatcctaagctacaattatggggcgcgccgtccggcacgtgtgcgaaaggcaggaatggtgatgggagcgttgattcttgcttattccgctgtgatatggagcatcattattctggaaccaagacctttgatccggatcttcagctcggatgcacagctgatcaaagatgcagttcctgcattgaaccagtattttgctgcatttatctttatggatctgcagtatatgggacagacggtatttaagtccctgaataaaaagaagcaggcgatcttcttctcattgcttcggaaagtatttattgtggtgccgcttacttatcttatgccctatgcattacatatgggaacggatggagtcttcctggcggagcctgtatctaacgtgatcggtggtacgctgtgttttgcaactatgctgatcaccgtactaccagaattaaaaagaatggagaacgagctatgaaacagattctgatcgttgtagacatgcagaatgattttattgatggagcactgggaacaaaagaagcagctgccattgtacccaaggtggaggataagatccggaattttgacggcgaggttttcttcacaagggatacccatgagacctggtatctggagacacaggaaggaaagaatcttccggtgcctcattgcatccgtggcacggaaggctggcagatccggaaggaattggatgctttgagaaagacagaccccatcgataaggagacctttggttctacggatctggctgcagatctgctggctcttcatgaagacgaggagatcggcagtattacgctggtaggactttgcacagatatctgtgtgatctccaatgcattgctgctcaaggcaacacttccggaagtgcccatctatgtggatgcagcatgctgtgcaggtgtgacgccggagagtcatgaaaatgcattgaaggccatggaagcatgccagatcaaggtgatgaggtaaaattagtattgctattgtgcggacatttgcatataataaagatagatggaaaccatacttacgaaaggagaggttttatatggctacaaaatcagcaaatttatatgcaaggattgaaccagatgtcaaagaaaaagcagaaagtatcctgtctacacttggtatccctgcttccagtgctatcaatatgttttataaacagattatcttacagagaggacttccgtttgaagtaaaaataccatctgtcagacctgttgacatcagcacattaccagaagcagacttcaatgaagaattggagaaaggatatgtggatatgcaggctggacggataaaaaatgcgaagaaagcctttgctgacattcgcaaggattatggcttatgatatatgaaatagaagtatccgaac

SEQ ID NO: 3865 - DNA, 3609 bp, Unknown
  16S sequences of unknown bacteria
tgcaggcttccgtcttctgcgatgcccgcatccatcgtgtccgagatgcactcatgacttttcgtcgagctgccagacgggctatccgaaagctcatcgctgaaaatgtccatgccgacgaaggccacgacggccaccacaacgatgacgatgagtatgcgcccgcgggtcatcttgtgcttcttgcgccccatagcaccccgcctctctatccagttggaaatctagccgaaaaacgccgttagaacttgaccgaaggggcagctgcggcagactccgccgcgtcgaacagctcgcgggccttgaacccgaacggacctgcgatgagcacaccggggaaggtctggatcgcgttgttgaaggtcatgacggtgtcgttgtagctctggcgcatgtagctgatcttgtcctcggtgtcgcgaagctcgccctgcagctcgaggaagttctggtttgccttgaggtcggggtagttctcgcttaccgcgaacagcgtcttgagcgtgccggtgaggacgttttccgcctcggcgcgctgctcgggcgtggtggcgttcatgcacgcggtgcgggccgccgtgacgctttcgagcgtaccggactcgtgcgcggcgtagcccttgaccgtctcgacgagattggggatcagatcgaggcggcgctgcagctggacgtcgatctgcgaccaggcattgtcgacccggttgcgcagcttgacgaagttgttgtacaggccgacgagggcaattgccaagatgacgacgataacgatgatgacgatcgctacgatgctcatgcgagactcctatctcgtgaagtaccagctgaatcagattatacgggacacgtgggacgcgctttgcgccatacggccaaatatccagatgaaggcagcgccatctgactcgataccgtgcagccgcctctctgctgccctgccccgccggtgccgcacgacgcatcgcgcaggcagcaagacgcccggcgcgaggcgtttcggcctgctatttcccgccgtagattgcgagcgtctggtacggcttgcggtcgctttcgtcacctgccagctgctcgagcgtgacgccgtcgacgtagtcgtcgatgacggcgtcgaggccggtccagaagccaaccgtgctgcacacgttctcgcgtgggcagccctgatcgagcgccgagcaggccacgggcatcgtctcgccctcggcagcgcgcaggatgtctcccgcggatacttttgccggctcgaccgccatcttgtagccgccgtctcgtccgcggacgcttgtcagatagcccgccttgaccatggagcgcgcgagctgctcgaggtacttgagcgaaaggccttccgccgccgagaccttgcgcagggcaacggtatcgctgccgtcggaagcctgggccatgtagaccatcaggcgcagggcgtagcggcctttcgatgagatgagcatgatgcctcctgactgacgtgctcgacgtcgtttcccagcatgataatcgacttttgttaaatatctagtaacgcactagggttttatcttgacttatcctttccaccctataaattagcaactagttttatttgctccaccaagctccatccgtattgagagacgagacaggaagtaaacatggctaacgaaaccaaccccctgctttccattcagggcattagcgcatctgtcgaggaaaagcagatcctccacaacgtcaacctggacgtcgcgccaggcgaggtccatgtcctcatgggccctaacggcgccggcaagtccaccatgggacatgtcgccatgggcgagccgacctacaccgtcgactccggcaagatcatcttcgacggtcaagacatcaccgacctcacccccgacaagcgctcgcgcgcgggtctgttcttgagcttccaggcccccgtcgaggtgccgggcgtgccgctgacgagcttcctgcgcgccatcaccaccggccgcgagggcctcgacatgaagcgcaaggagttccgcaagcgcatccgctcgctcgccgacgagctggacatggaccgcgcctatctcgaccgcgagctcggcgtgggcttttccggtggcgagaagaagaaggtcgagatgctccagctgctcttgctgcagcccaagctcgccatcctcgacgagaccgactccggccttgacgtcgacgcgctctccgtcgtctctcacggcatgaagctctaccaggaaacctgcaacggcaccctgctgatcatcacccacaacacgcgcatcctcgagcacctgagcgtcgaccgcgtgcacgtcatggtcaagggccgcatcgttgcagaaggcgacgcatccatgatcgccgacatcgaccagaacggcttcgagcagttcgagcaggctgctgcgaacgccgagtaaaggcggcacgacatgtcagagaagaaaaggacacaggtcgacgacatcgatcgcagcatgtacgacttccactacgacgagtccgaccaagaacacctggaagcgggcctcacgcccgaaatcgtgcgtgagatctccgagaagaaagacgagcccgagtggatgctcgagcaccgcctgaagtcgctcgagatctacaacaagttccccgagcccgactggggcccctccattgagggcctcgacatggacaacatcgtcacctacgtcaagcccccgacagagcagcaggccagctgggacgacgtcccggacgacatcaagaacaccttcgaccgtctgggcatccccgaggccgagaagtcctacctcgccggcgtcggcgcacaatacgactccgagctcgtctaccactccatgcaggattccgcggcccagatgggcatcgtgtactccggcatcgaggaggcgctgcacgacgagaagtacgagggcctcatccacgaccacttcatgaagctcatcacgccttctgaccacaagttcgccgcgctgcatggcgccgtgtggtcgggcggctcgttcgtgtacgtccccaagggcacgaagctcgactaccccctgcaaagctacttccgcctcaacgccaagggcgcgggccagttcgagcacacgctcatcatcgtcgaggacgacgcgagcctgcacttcatcgagggctgctcggcacccaagtacaacgtggccaacctccacgccggcgccgtcgagctgttcgtgggcaagaacgcgcacctgcgctattccacgatcgagaactggtccaagaacatgtacaacctgaacaccaagcgcgccaccgtccaggagggcggcgacatcgagtggatctcgggctcgttcggaaagccatgtcggctacctctaccccatgtcgattctgaacggccgcaaggcgcgcgcgagcttcaacggcatcacgtttgccggtgccggccagaacctcgacacgggctgcaaggtcgtcctcaacgcaccggagacttctgcatccgtcgagaccaagtccatctccaaggacggcggcgtgtcgaccttccgcagctccatcgtggcgactcccaaggccgaggattccgcagcgtccgtctcgtgccagtcgctcatgctcgacgaccgcagccgctccgacaccatcccc

SEQ ID NO: 3866 - DNA, 2839 bp, Unknown
  16S sequences of unknown bacteria
aacgcaaaccgcgcagaagttgcagctatgatctacaccttccttacaaaaacctctaagtaattcttaatctgaatcgcttagctaaagtttaagtaaaacaaaagaaccggtaacggagtaaaatccaaaccggttctttttttgtgcttattttataaaatttatgatgtcttttgtgcattcttcacgactggtatcgtttagaatctcgtgtcggcagttcgggtagagcttcattttcacattgcatccgcgggatgaaagctcgtcgtacaccttctttacacctgcaccgtaatctccgacaggatcgtcctcgcctgataccaaaagcaccggcgttttcttgtcgaatccgtcgaaccatgcctttgagttagtcgcgcggttcagcgtcatcaggtccttcatcgccgcgagggagaacttgaagctgcaatacttgtcggaacggtatttttcgcgaattcccgcgtcctttgtcagccaagaattgctttcgttttcgggaaatttcttgccgaagctgccgaaagccatgttgtcaacgaattttgagacgtatctctcgcctctaaacagcatcatcacgtcaacgagtgcaattccgacacccgccgcgggattttttcctcccgttcccattatgatgagcttgtccggctttacgtagttttccgaggcgtagcgcactataaacgagcccatgctgtgtcccatcagatagtacggcagattccctccgaaatcctttctgacggcagcgctgtacactccgacgtcttccgcgagccgcttgtagccttccttgtgcgcaatatacccgagttcatcgtcgctgacagtcctgccgtgaccgaggttgtcgtatccgaagcagatgtagccctcgtccgctatcttccgcatgaactcgtcgtatcgcccgatatgctcgcacattccgtgaaccacatggaacagccccttaatctcgcctcccggaacatcgggaatgtaaatatgccccgcaagcatgtgttttttgtcggaagacataacattgtattcggtttttatcatgctcatgttgtttttcctttcattctttctttgataatattatatcgggttcgcttgtttttgtcaatctcgggtgagagcagaaattttactctaaggaaaattaatttttaattttggattgacatttgcgcttgtttcatttatacttattgtgagttaaaaacacacggagaaacgtaaaatatgaaaaataagctgaaattaagtacggttttcacacttttggtcctgtttacacttttttttacactgtttgtctcctgctcaaaagacgcgggaacagtaacggaatcgggtgagacggaaaacgagggtgaagctgcggctgaggtcatcacactcgcgaaaggcggaaacgctgaatacacaatagttcgcggcgagggggctgacaaaacggaaatcaacgccgctgttacgctgaatcaggcgctgaacgacatgggctacggcaaattttcaatcactaccgactggataaagcccggtgaggaagaaaacgtcaagaccgcgaaggaaatcctcgtcggaaagacagaccgagacgaaagcaaagccgcgctgtcatccgttgaagggggaagctacataatcgaagccgtcggcagcaaaattgtcatcttaggcgactcttcactcggaacggagaaggcggttgacgacatcatttccggcaaagtcagtctgttcatcgaagaaaaggacgccgctactctttctctcccgtcggagctgaaatacagcggaacttacgacagcattctttcgcacaccatagtcaactactctacttctgtcgcgacggctatcggcggttcggaacaggacgctattcgactgacaacctgcttacagggactcattaaccgcgattttgccgagacggatatgctcgtgcatcagactatggactcgacagatacgttttggctgaactacatgaccgaggacggaaacttcttcgcggattataagatttatgatatcagcagtgcggacgagtatctcacgtacttcctcacgttcatcaaaaagtacggcatagttgcgtgggacagcgaggttccggctacagctaacgtggcgtctaccatatgcggcgtggactcgtatcttcccgtgatgtattccgaggatgagaacagcctttatcagaagctcatctctctcggcgtggaagagaaaatgtcgctcgtcggcaagttcaccggaagcggcactattcccgacacgaacattgaatcctccggtagtgcgaagtgcgacgcttatctctgggcgctggaaatgtacatggacaaatgctcgacagaggtcatgggatatgttcttgacggcgcgggatgtgttcccggtacgactacatatgagggagctgaatccacaaacgcgttctacaaccagatatacaaccacgactattttgttatgaagaaagcgttctgcttcgaccttacctccaacgcgaaggaagctccgtttgacgaccctactcagccggtgggaacggactatgagacgctatgcaaaattctccaagccgcttatgacagagcagacggagagttcactcagattgtaggattcccgccgtggtggatgaaatatacacgctttttaagccgcggaaacatcggagaggtcgaccttgagtggcagtttgctcagctcgtctccacatacaactgcgcgcttgaagccgactgtgctcatccgtgctgtatgacaaacgcctctctctacacctactacccgctcgcggacagctacg

SEQ ID NO: 3867 - DNA, 6690 bp, Unknown
  16S sequences of unknown bacteria
ggggggtgttttttattgggacgccgatgccgggggctccgttcgggacatatccggacggctctcttccggcgttcacaccgaatccggcagggagcatcccctatcctcaaacaggcggttgaacgcgcggttggcggcggccgtgaaaatccggggcgtcgaaaccgcggagggcaggccggcgcctttccaatctgcggcccagatcaaataccggtccagcggcaagcgctccctgaccttgagatggcatccgtcacggaccagccgcccgtcccgcgcaattttcccggcgtccagatataaacggacgccggtttcatagcgggcgtccccgtccatcaggatatggcccttctgtttggatagaacgacgagctcactcgaaacggagccgctcgaaagcatgatatactcccggaaatccacgggatcccccaacgcaagcccgatgggagccggttcccagtcgctcctctcccgcttcaggacagcccagctctttaaggccccgtcccgttggatagccggccagcaggcggcgggagtgctgtggacggccaccgccggctcatcgtccctcaaaaacccgtcccggcaggaatgcccctcataggccttttgcgcctcccgccaatcccggtcggaaatggacagcagcacgccgctgcccgtctcctggtggaacgtcagaaaatccatcaccgccatcccccagtggggataggcgcggctcaccctgaccgtatatatgccggtcggcccgctgccggtcatcagccgatagtcggccggaccggcagacataaggcgacccaggtacgggcgggcggcaggtccgcggaggttatggaggaaagctcctcctccccgacacgatacagcatcgccgtgccacctttccatgaggcgctcccgtatgaaggacagcccgcggtggttcgcgggctgtccggtacgccgctgcttcaggaccggggacgatcctgctgcggaggctggctttctccgttttcgaggtaggtttcaacccggaaacggggccgggccttgacctcgctgtaaattttgccgatatagccgcctaaaaccccgatgcacaagagctgaatgcccccaagaagccagatggaacaaacgatggcggtccatccggccaccgtaacccccacgaaataagaaatcagggcgtaaagcaggccgaggacactcaagatcgagatcaggatcccgaggttggagatgagcttgagaggtttgacactgaacgaggtgatgccatccagggcaaaggaaatcatctttttcagcgggtatttggattcccccgcgaaacgctcgtgccggtcgtaatacacgtaatcgctccgatacccgatcagggggacgatgccccgcagaaagagattgacctccttatagtcgcccagcgcctcgagggcgcggcggctcatcagccggtaatccgcgtggtcatacaccacgtccactccaagcattttcatcactttgtaaaagccgcgcgcggtggagcgcttgaaaaagctgtcggtatcccgcttgttccggacgccgtaaacgacgtcgcacccttcttcgaatttggccaggaagccgtccagggcgtcgatatcgtcctgtaggtccgcatccaggctgatcgcgcagtcggccttctccttcgccgccatcaggccggcaagcagagcgttctgatgcccccggttatgcgcgagcttgaggcccgcgcacagcgggttttcctcgcagaagcggcagatcagctcccaggtcttgtccttgctgccgtcatccaccagcagaaaccggctgttttcatccgcgtgccccgcggcgatgagggtcttcatcttctcggtcaggcggctgaccgtctcgggcagtaccgcctcctcattatagcagggaaccaccagatacaccgttgacatgctttcagcactccttttctctctgtttccttttggcaagatatcgggatagcgtccaatacacccccaaccccaatacggataccgccgtcaggactatgcctgccgtcccgcctgggggagtataatggaaaacgatatggttgtcgcccccggagaccggtacggccatcaggccgctcgatttcacgatagggaccgcctccccgttgacggtggcgctccacccttcatcgtaggtgacggaaaagaaggccatggtctcctcgcggcagtggatatccgcggtaaaggtccgattgtcccgtgaaaaagaggaggaggattcccgacgccggttttccagttcggccgccgcgtcctgttcggacaccgcatcgatctgtgaatccgtcaacggctgcatacccacgagcttgtccacgtcctcttcatgcaccaccagcgctttgcacatgacccaggcccgtttctcgacggggatctgcaaaaaccgctcctgggtcacgtaataggcgtaggtaaaaccgatcggcagcgcctgcggattctcatagacggaataggtgttcccgccgacggtatactgcgagagcagctccagggattcgtcgtccgtcgggttgacgatgtatttgatcgacagcaaatgccggagatcctcatggtcgagaagcggaacgttgccgtggccccgatacacccccatgttggaatacagctcaaaaaccccgccgctgacggaactgttgaagctgggaagcgccggcacatccgctatgagcccctggttgacagacgggagcatgaaccgggcgcctggatcgtccggcagctcggctttaagcatcggggccagataggaatccttgacccaggcggaggaatcgcccacctgccgcattctgtgtatattgaaggatgtggatacactggcaaacaggatgacgccggccgtcagggcggccgtgaaaaaccggcggttccggaaaaactcgagcagcatccaggccaccgcgatgccgccgagcgccagaacgacctgaacggcgaaggctttggggtcatggatatagtcgccgatccgccggactttggggtacagccaggtaaagagggagaagagcagggttcctccgaacgccaggccgcatccccaccggaatccgacctcctccagattgtcgagcgccatggccgttatcagtgccatcatgaggatcagcatatacacccaacggaaccgccaatccctgcccaggtagaacacgctgttcaagaagggaatcaccgccataacagccagcagtgccacaaaacccgtcgcgaaattccgctttttcagcatccacgccagcaccatcgacacgctgaacatgggcaggaagaaggactgggaatcgtagttggccatatatgcggtcgggaaaccctggctgtctcccggcaaaagcacggccttgatcatccgcagatattcctgccagccgaaccgcagcgggatcccctcgaacgcccccgtcgtcctcggatttgtcatgaccatgagagtggacggcaaaaacagaaaggccgccatcccgaggccgatcaccgcttccagcaggcagcgggggagctttcggatgctgctgcggaaatcggggatcagataccggcacacaaaatacaggacgacaaacaccacttcaccggtaaacaagacaaagttgaccagcgcgttgagtgccacggccagcgcaaaccagcccacccgccggttctccatcatctcgtccagcgtgaagagcagcagcgggaataaggccaccacgtcgtggaagtgattgtacagcagattcatggactggtatccggaaaacgcatataaaagggcggcgatgacggcataattcttgtttttgacgtaccgctgcaggaaggcgtacgacgtcagccccgctacaccgcattttaaaatcaggagcgggccgataagatacgggaaaaccgcgccggggaaaagcaggctcagccagaagaaagggctccccagattgtagaagctgtacccgacaaacgcgctgcccaaatccgtattccagttccagaagacatccccgcttttgaccgcctcgttggccatcatattgaacgggatttgctggtagataaaatcggcccggatcgtgaaaatgcctccgcccatcacgatataggggacaaaaatgagacagccggtcagtaagcacagtaagaagaccttcccgtaagggttccacttttcttgagaagtccgcagtcccgtatgattcatattccgttctctctcctcagcgggatttctgcttccgcagattttgaaaaaaagccgacagcacctgtgcgcactcctgttccagcaggccgctttccacgaccggatggtggttatacggcagggcgaacagatccgtcaccgagccgagcgagccggccttgggatcagcggccccgtacaccacccggccgatgcgggcattgaggatcgcgcccgcgcacatggggcagggctccagcgtcacatatagggtggagccggacagccgccagccgttcaggcggcggcaggcctgatcgatggcctcgatctcggcatggcaaagcgcgtgccgcagcgtttccctccggttgcggccggtgccggccacctcgccgtcccgcaccagtaccgccccgaccggcacttctccctcggcggccgcttcgtccgccagacggagagccagccgcatatacgcttcatccgcctgtgtgaagccgccctcttccggccggatcacgacggctgccccacgatgctcgacacaacgttcagagcggtgatggcgagcaatccggccaggctgaggatgaccgtgggggaaagcagaatctgccccacccgtctgggcaccgaaagggcggaaaatccgttgccgaccggccgcagaaccgcctgcggcgcggtatcccccggccggtgcccggcccacaggacagccgccccgatcacgccgagcaccgccatgaccgtgaacgccgccccgttgagcatccctatggagtccagatccggcaggaaccgggcggcgtattgcaggacgaccgaaaaggcgttattcaggaaatggagcagcaccgccggccagatggaaccggtctggaccgtcagatatccaaaaatcaggcccaggatgaaggcaaagggaatctgcagcagattcccgtgcagcagcccgaaaaacaccgccgaaaacacaatggctaagccgtccccctgcgggcggagcgccccgagaatataaccccggaaaaccatttcctccaccagcgcgggaagcacggccgtcgacaccaggttgagcaccaggctcaggacggtggtgtccatggtgtcgatggacgttggccggggcaggccgaacgccgacaggatattcatcaggatgctggccaccaggttggccagtaccatcagccccagccccaccatgacggccgggatcaacaccgacggctggacccggcgggaaggaaagggacgcaggtcgcggcgcataatcagtgccaccacgatggccggcagggcgagatagagcagataggccgctgtttgaaagaagagataccccatcttgtccaacccgtaattcacctgtgccagatccgccgcacccaatacctgcagcagcatgagcagcccggaagggagggtcatcgacgcgcccaccagggccagcatcaggacaccgacgaaattggcgttttttctcaaaggaggaagttcctccgccccgggctgattccagccgtagggcctccactgcacgttcatagcagcctccaatccggctcaaatatacagtctattataaatcgttttccttcactgcgcaagacactaaaaaaaataggcgaaatccgggattttccatcgcaagccttgccgcgggcaggcggacgcggtacaataggaaggcggcggacgccggtgggggcgtcccccgcgattaaaatctttgtgggagtgttgtttatgcagtcaaccctgacggtggaggccctgtatacgcccgaacataccctggccgctccgctgctgcgttccgtcgtgtatccgtgggaggccctggccggcatccgggagtgcatccgtgccttgggcgccgctctttccccggaggaatatgactccccccgtcccggcgtctggatccacaaaaccgcccatgtgttcgattccgcctatatcggggaggacgtcatcatcggccctgggaccgaggtgcgccacggggcctttatccggggcagcgccctggtcggcgccggcgcggtggtcggcaactccaccgaactgaagaacgtcatcctgttcgacaaggtgcaggtcccccattacaactatgtcggggattcgatcctggggttccgttcccatatgggagcaggatctattacctccaatgtcaaaagcgataaaaccctcgtcaccgtatcctgcggaggtgaaaagctcgaaaccgggctcaaaaaattcggcgccatgctgggggacgatgtagaggtcggctgcgggagtgtgctcaatcccggctccgtgatcggccgcggcagccgcatatatcccctctctatggtccggggagccgttccggccggcagcatctataaacggcagggggaagtcgccgccatcagccgctgaccggtgccctcatccttccgcccgcat

SEQ ID NO: 3868 - DNA, 2639 bp, Unknown
  16S sequences of unknown bacteria
atgcgatcctgatgaagccccagacaccggaaatgcttctggaggaaaagcagctgcgggagcagctctatgccgctgtgatggctctgccggagaagcaggctaagcgaatctatgcccggtattacctgggtatgcgtgtgagcgagatcgccgcagcggagggtgtagacccaagccgtgtccgtgacagcatccggcgcggtctgaagcagctggcaaagtatttttaggatagaataagcaaagggcgcaaggtatcaaagtgcttctggcacaggaccttgcgccccatctattgcagtagctttagaggagtatttcgcagagttgtctttggatgcaaaagaagcaggagaccttttcagatttccggcttcttttgtgctagtgataaatatccaaaatgcttttgacttaactcaaatgggcttttgggattgtatctgtagagtcaaaagtcaagatgattttacatccacagttaatcttactgtcaatggtcatagtcccttcatgtgccgctacaatttgtcgaaccaaaacaagccccagcccatgtcgaagatctaagcgctcatctgtgctttctaaataatgaggtttttcttttagttcttgtagtttttcttcggagagtcctataccatcgtcttgcacaataagctgaatggtattttccatccgtcttaaagataacagaatcctacatcccagcgggttgtgcttcatactattttgaacaagattattcacggctcgtgaaatcaatctggcatcacattctaacatagtgttttcagcgtcattagcaatttcaattccaatattatagctatcggaaattcccatgttcaataggtctgctacataggatcgcagcaatttggataagcgaaccatctctttgtgaagcggctgcatttcatattccaactgtgagactaaattcaaatcctgcaccagttctttgattcttacgctttgcttccgtactatttcagcctgttcttggatggtcttgctggcagattcattttccgcaatgcggcccgcataccccataatcatggagagcggtgtgcggatgtcatgggaaacgccgctgatccagttcgcccgtgcttcattttgccgattcaaaatggaagaagctttgtttacgctgcttgcaatatccgacagttctccgctgatatgaagtgagactggctttccatctgccagagtttccacggcagatacgatcggttcggtattacggatgattttgcgtttggagaaataataggcacaaaagaggcacagtacatccaatcccaacattccaagcacaaagacggggagccgtcgaagtgctgaaatggaatagtaattgctggtgagttttgtatagctgtcttttggataacccaataccaacagtccatcatcggtgttccagacaaaaaccggataatcttcaatatatccttttgaaaacaatgcgacatcttgaatagtgtaactttttggcacttcatcgggcaaatcaaccgaccaataacactgcccatcagcgtttaagtagattgcccaaatatgattctgccggagcttttgcgctgcgtcatctgataatcgttctggtgtggcggcagcagcggtcatttccaacatggggtgcggggatgaagttccataatcctcggtcacaaccttttgaaatgtcaggccgaataccactgcgttaagaaacagtagtatcagaataaaagtagcgaaagatataagatgttttgatatataatgtgcaaatgatctcatggcattacttccttgctatcagcttatagcccaaacctttaatagttatcagggatacaggttttgagggatcggtttcaatcttttcccggacacgccgcacatgagcattgaggctgttttcgtagccgaatgggttatccccccacaaggcttcgcaaagcgcatctacggtaacgatctttccggcattacgggcaagcgtttcaagtaaagtatgttctttggctgtcagggagataatctcgctgcccttatggacttcggcccggctgaaatcaatcgtacatccatctaaaacaagcagcggcgaatcctctttgtaggttcgccgcagcaccgcatagatacgcagtaacaattcctgcggcataaagggcttagaaatgtagtcgtctgcaccaagtcccaatcccgataatttgtctgctgtctcgtcctttgctgttaagaaaatgaccggcacattagtaaaggtgcggagctgctgcatcaaagaaaagccgtccccatctggcagcatgacatccaaaacaattaaatcaggagtttcctcttttgcggtcaaaatagcttttttgaccgacatagcagtaaggacagtttcaaatcctgcatctttcaatatatctgataccatcttcaatagttcctgttcgtcatctaccaacaggagccttttactatgtaaaaaagaattatccatagcatcctctccaatctgattttctttgtttctattatatcataggctgtccattctgcgatcttgtccattaaaaagtaaggtaaaagtaaggacgggagaatgtagatgtcaggttgaagttgta

SEQ ID NO: 3869 - DNA, 32759 bp, Unknown
  16S sequences of unknown bacteria
tttcttctcccattctactcttgcttctccctttattcagttttcagggtatatgaaacctacaggatacacatttgtgtatcctgttttttgttatattgaaaacgatgccgattttaaaatgcggtttggtccaaagtataataataaaggaatttggactgcgaggaaaatacgttgacaatcggtaacgcagttacagggtgacagggtatttgtgccatgtttgaatgatgcaaacggaggaatgctgattatggtgcggatcgaattttttggcgcgtggaaagacgaggacgtgcagactgtgcgggacgtgacggtgacgggcattgaaaaaaacctgaaaatttcggttttacccgcatattttgaagagcaatattctttaatagaagaaaattgcttggctttctccgaaaattgtatgaggaacgaaaaaattgcacctgtggagtgtgatgaggcagaacaacggatgagcggtgtaaaaatcacgatctcgctgtttccggcggggaacgggcgtatgcggcggcagactgcgcaggaaatcacgaaaaatattgcgctgaagacgggaatacccaaggataatatttcggtcacgctcgatgcgccgccgcaggagaggagaagctatgccgaagaacgttgaaaactttgagatccgcacacttggacgtgatgattacgcgcaggcggcggaaatttttgcatttgtgcatgcgctgcaccaagcaaatcgcccggatatttacaggaagacgaatgtcccgctcggcgaagacgaatttttcaaaatgtgcgatgacccgcacgaaatcatgctgtgtgcggtgcgagacggcaaaattttagggcttgcccgcacggtgatgcggggaaatgccggggatgcggttactttgccgcgtgtgtgggcggttatggaggagctggccgtgttgccgcaggcacagagcatgggcatcggcacggcgctgctgtatgcgagcgaggcagaagcgaagcgccgcggtgcggaatctttggagctgatggtgtggtcgtttaataaatcggcgatgcggttttatgaaagcgccggcatgacggtgcgaagccttgtgatggaaaagaaattgtaagcgcgcaagtgttatgtaaatcaagcggtggaagagctggcggcggagacctcggacacggtgtgtctgggcgttggtctgcatagcggctacggtgcggcgcagcgcgggtacgtgccggacggctccggcgtgtggtatgaggaccacgtgtgggaccaatatgcgccgtgcgtgaacgacgatgagttgaatttgttcctttctaagaagcttttttgatgtattgtgtggcaatttaaaatagaaatagatacaataaaaagccctgcattctttttctttgaaagatgagaatgcagggcttcgcttgttgcattttatggatttgcaatgcaaatccatcggaaacccccttaatagggttttccacgagcagacagtccactggaccgtttgctctcctttcctgatttttatgcaggcaaaaaaattcgctttctgcggaaagcgaccaactttctgaaaaaagttggatcaaaaacttttaacgttgcggcgcggtgatttacgacagtgcgcaaatcatttttccgtttccatctcgatgatttttgcggctgctaaatctttggcatcgcggggatcgtgggtgacgaggatcgtggtgcggttcttgaggttttcttttacgaactgcatgactttttcgcgggtcagatcgtcgagacctttaaacggctcgtcgagcaggacggcgtcaccgcttgtcagcatggcgcggacgatggaaacgcgccttgccatgccgccggagagctgcacggcgttctttttgaggtcctcggggtcgaacccgacctgcaaaagcgctttttctgcggctgtttccgtgcacccggcggcgacggaaatgtttttagcggcggtgaggtacggcagcagccggtcttcctgaaacacggcgctcggcttttgaaagccatggatttcgccagaatccgcaagcagaagatttaataagacggagagcagcgtggttttgccgcagccggagcgcccggaaacggcggtgacttggtgctccggaaactcggcggagaaatttttgaggatttccgcttcaccacgctttacgatgagattatgcacgcttgccatttaacacgtcctccattttgagcttttttaagaccaaccgcagcaaaagcataaaaagcttttcaaatgcgacgctgacagcgacgacgacgaccgtccacgcaagcagctcgcttgtctgcaaaaagattttggcctgataaaacaccgcgccgatggagccgtccggcgtgccgatgacctcggcggcgatgccgcttttccaacatagtccgagcgacacggagcaggcggagacgaaaaacggcgcgacggcgggcaggtagatgtaaagcagctttttgccgactgagagcctgaaaacctgcgccatttcgagcaatttttcgtctgcgctgcggatgccctctaagacgttcatgtaaatgacggggaagaccatcagcatggagatgatgacggacaaattttttccggaaaaccacagcagcaccaaaatgatgaacgacgcgaccggcgtggctttaatggcggccgtgatggggcgcaggagagtctcaacgacccaaaaccgcgaggcgacccacccgagcaccgtgccgagcgtgagcgcggtgaaaaatccgcctaaaatgcgcgcagcggaataccacacggtctttaaaaaatcggggtcgaaaatgaccgtgaacagcgtttgtacgacctttacgggcgagacgagcacgagttcagagccgacgcagaggctgacgacatgccacaccaatagccaaaaagccacagcgcatgtggcggctatggctttctgtttctttgttttcacttttttctgctttgcggggttattccgtatagtagaaagcgtcatcgggcagcgttcctccaacagacttcgggtcggcgtcaaagagcacctgtaaatagccggagaccttctccttcatttcttcacccttgatgaagtggatgttgcagccgggcagagcctttaaagcaatgggctccttcggcacgatctcatactgtgcgatgagctttgcagcgtcttccgcattcgtctcggtatagttgatggaagcttcgtattcctcgaggaacttttcaacagcggcgggattttcctccagcacatcggtgcggatgatcgtgacgccggtgacgagcgtactgccgttatcgagcttatcccactcatcggtgaggctgagcgcgatgcggagcttgtcgttctgcatcatagcggtggtgacgaacggctgcggcagcacggcgatggcatcgtcggcctcggcaagcgctgcggcgacctcggtcgcttcggatttatactcgatggtcacgtcggtctcgggatcgataccgttttcgcgcagaatgtagttgagcgcgaactccggtgtggtgcctttgccggtggaatagatcgtcttgcctttgaggtcttcaacggactgaatgctttcgccggtctcaacgacgtagagcacgccgagcgtgttgatgtcgagaatcttgatgccgccctcggtcttgttgtacagcacggaagcgaggttgcacggtacatttgcaatgtcgatcgtcttattcgcgatgccggcggtgatttcgtctgcggtgccgtacatcgtgacgttgtaggtgtttgcggtctcgccgttttcggcgtcctgcatcagcttgaccatgcccatggtggtcggacccttgagggaagcgacttcataggtggcgggggtgaatgcctccggcgcttcggtgggttcggcggtcggttcagccgtaggctcggcggtgggctctgccgtggcttcagcgctgctttcggaagatgtgctctcggaggaggcggcaccgctctggccgcaggctgcaaataccgtcatgcacagcagcatggcgagcaaaacagcggttattttcttcatttgaaacggtcctttcttttgcggcgttccgccgcggaaatcgttcgggagtttgtctcggcgaacagtattatcgtagcacaaaaggacgcgcattgtcaacgaattgtcaattttctgcgcgatttttcttttgaaagcggaagggaatttgtgtgacggtttcacacacgaaagcaaaatttgaaaacttcccgtcgtcgggaataaaaagggtgcccggcgcgaaaaatatgcgaaaaaatagaagaaaacaggttgacgaacggaaccttctgtgctataatcatcaatgtcgcagaatatgcgggtgtagttcaatggctagaatcccagccttccaagctggtcgtgtgggttcgattcccatcacccgctccaacccgcagaaaagggacgattgccttgggcggcataaagagatatgcgccaatagctcagctggatagagcaactgccttctaagcagtaggtcaggggttcgagtcccttttggcgcgccatatggtggatgtagcttagctggttaaagcgccagtttgtggcactggagaccgtgggttcgaatcccatcttccaccccatgaaaaaagacctctgtcgtttgacagaggtctttttgtatacagaatagccaaaaagcggaacggttattctccttgacacaaaggaaacagcatgatatatttcaaatatatcgtttggggagggattctcatgctgtgcgtgattgcaaagatcgacccgaagtccaaagcacgatttttgaagctgcaagggaaaatagaaaaactcggcatctcggtgaaagcgctgcacgggcacattacgcttgtgtcgtatatcggcgaagacgaggcggcgttcatcgcgtcttgtaaggagatattatccagctgcaaggtgttcccagtgtgttatgacaagatagaggttttggcttcctcctgcattgtggtggcttcgccgcgcaaagagggggtgctggaagcggtgcaaaggaagatcgccgaaaaatgggcgaaagacttgcccgactacatgcaggcagatgtgtggtatccgcacacaacacttttgcaggatatgcaggcagaccttgggaaaatcgcgcagcatttggaagaaaactttgagccgttttgtggcgaggtgcagacgatcgagttctcccgcgtggagaaagttgggtatacgattgtggataccgtagaattgccgaacgcgtaagccgctacggaaaaatctgtacggtatttgacaaattcggttcttcgtcctataactgaaataagactaaaaaatggacaagtgtattattcgtgagtacaatgcaacgctttttagaaccaaatcggcggcttgataaaacaattttcattggaatcacagttactgccgatttgatcaggaatttttatattcggatggtgtcatccccgttttgtttttgaacactttcaaaaagtagaaatagtcctcaaacccacaggctgtactggtttcagaaatagtatagccggacctgagcatacgctttgcctggttgacacgcaaggttacctgcatttgtttgatcgtcataccatatacggtttggaatatagtatttagacgattgtatgttttcccaaaggtatcctcataatcccgattcttcaagtgctggtctttgttgtcatcaatatattgtaagattcggtgggccagtctgctttccaaattacaccaaagctctcttttttgcacagcgaaactaatctggtacagaatcgcctgaatttgggatgataaaaaatttttgcttgaaaaaggcaatgttcggtgctgaatcgcgtactccatcagatcaaagcagggcagctccagaggaatctgtccatgtaacggaagcaaaatatgattggtatctacctttacaggcggtggaatctgaatacctgttgcctgaaaatgagcaaaataggctgtatgattatcatattgaagcccgcaatgctgcacgtaaggaggcaacaggaaaaattcgccgctatgaacgacgtaattctcaccgtagacacggaaagagcgttctccgctaatcatcaacaccagtacccactgcgtcatcattctatccggatgcatattatttccgctaaacttatcgacatcctccatgcgaatctcctcgtttaactgaaaccagtagagatcggtttgttttatatccatggttgaacatctgccttttccagtaaaatgatcttatgatatgtctgcctaaaaggagccagacaataattcaataaatagtttcgtttattccataccattttcattctctccatagactttttttcggatacactgtatgatcgtttcaaagaatcctaggagggatacaacatgaaaaacggtaaattaagagtggcgctcgtaggagtctccttcggcgcggaatttatacccatctatctgaaacacccggacgtagattctttggtgttagtggatacgaatgaaaaactgctgaatgcggttggcgataagtttcttctggaagaacgcttgacggactttaatgccatgttggaagataaaaccatcgacgccgtccatctggtaacaccgcctgctactcatgctcccctatctgtacaggtgatgaacgctggaaagcactgtgcctgtaccattccgatgggaatgagtatcgatgaattgtaccaagtcatcgatgcacgaaaaagaagcgggaaacactatatgtttatggagacctccgtctatggtcgagagtttctgtatgtgaagaacctttacgaaaaaggagagctgggcagaatacagttcatgcgctgcgcgcattatcaagatatggaaggatggccggactactggttgggctttcctccgctgatgcatcctacccatgcggtagcgccttgcctgatgttgttgggcaagcgtccggaaaccgtatattgcaagggctccggcagagtacgtaaagaagtggaagctccctatggttgtccatatgcctttgagtcagctctgatctccctaaaagacagtgatgtaagcattgaaatggctcggttcctctaccacgtagcccgaggctacactgaaagcttcaacatatatggtgaacgaaaaagctttgaatggcagcagttagaatcggaacaaccggtactgttctccatggcgcttggtgcaaatgctgaacatgttatgaacgattacggtcgaggcggccttgtgacggaagaacgtatccaaatccccgactatgcagatcgtttaccggcggaaattgggcgcttcaccaaacaaacagtgtatgatgacagcaatccccatctatcgttcctgcaaggcggtggccatggtggttctcatcctcatctagtccacgagtttgtccgaagcattctggaagatcgaaccccagttcccagtgatattgacggcgcctactggaccggtgtaggaatctgcgctcaccaatctgccatggacggtggcgtggtaaaacgtgtacctgttttcgaatagaaatcttctttagaatccataaattcaaccagacagccgtattcccttgccttgaagggaacacggctgtcttttactgtctgtttttgcacacctatttccccataggttgggtagctacgtaatgaagcgctccgtcagtgttaaattcatccttacaatagcaaaaagcaaagagcaaaacaaccgaccattggttgagtcctcacttaaaaccatattcttcttttgtctatctacctttacaggcggtggaacctgaatacctgttgcctgaaaatgagcaaaataggctgcatgattatcatattgaagcccgcaatgctgcacgtaaggaggcaacaggaaaaattcgccgctatgaacgacgtaattctcaccgtagacacggaaagagcgttctccgctaatcatcaacaccagtacccactgcgtcatcattctatccggatgcatattatttccgctaaacttatcgacatcctccatgcgaatctcctcgtttaactgaaaccagtagagatcggtttgttttatatccatggttgaacatctgccttttccagtaaaatgatcttatgatatgtctgcctaaaaggagccagacaataattcaataaatagtttcgtttattccataccattttcattctctccatagactttttttcggatacactgtatgatcgtttcaaagaatcctaggagggatacaacatgaaaaacggtaaattaagagtggcgctcgtaggagtctccttcggcgcggaatttatacccatctatctgaaacacccggacgtagattctttggtgttagtggatacgaatgaaaaactgctgaatgcggttggcgataagttccttctggaagaacacttgacggactttaatgccatattggaagattcagcatgcattggacgtaattatccgctctgcggaagaagaaaaatggctaccctgtgattaattcatgatatgagaggagtttttttaaaatggcaattcgagtaactgtttggaacgaatatctccatgaggttcaattcccggaagtggctgaggtgtaccccaagggaattcacggctgcatcgcagactttctgaaagaagccggtatggatgtgaaaaccgccacgctgcgagagccggaacacggactgactcaggaggttgtagacaatacggatgtgttgatttggtggggtcacatggctcatcaggaagtgtcggatgagattgtggatcgcgtttacaatcgtgttctggaaggaatgggccttatcgttcttcattccggccatgcctctaaaatcttccggaagctgtgcggaacggatagctggaaattgaagtggcgtgaggacggcgagaaggaaatcctttgggttgtagatcccagccatcccattgtagacggtctggacgagaaaattataattccgcacgaggagatgtacggtgagcgctttgatattccccagccggatgagcaggtgtttatcagctggttcgaaggcggagaagtgttccgcagcggttgctgctggcatcgcggaaaaggaaagattttctacttccgtccgggccatgaggtgttccccatctatcatcagccggaaattcaaaaggtgattgtcaatgcggtgaagtgggcagcgcccatccgtttccccaataccacctttggaaatcctgcacccattatgcccgttaagggagagatggaacatagtgttcaggggcttcacgaccagaagagcatctcctaaaaagcagatgtgtttctctcttaatatctcttaactaaggaaccaatgtgaaaaggccaaggttcttgcgcgggaagcagggataacgaaagcgcgcctttcatcagcatcagccgttggaaggcgcactttttatctgaaaaatcatttcccggcaagaggattcgaaaaaagtcaggttcactcctgcaaaatagatatcgctttttggtactgctgctttttccaggtgtccagcaacttatagtcacctctttgcaactcactgaccaaacgagcgtaggtcggcgcgatttcatcggcagaacaatcctccaccaaattcacgatctgattttccagaaatttctgttttcgttcgtctgccgtagccagacgtgtgttggagtagagggaaaacaggatttcgtagtgagtgatcggaacagtgtactggctgtcaatgccgatagatttcatcggttctgcattcttgagcaaatctccaagcccggagcgctccaaagcgttcttctgttcgggagaaggctccatgttttgcagataaaatgctgccaacagtctggcttggaattggctttgtgtgctgcttttaacaaacagggtggagacgtattgttcctcgaaattgttgctgagtgccggttcccgtccggaatccgagaggatgggcgagagaatttcatattgttcccaaattgggtggctttccgggagctgggagagcagcttgcccagcgagggggaagccgccaaaaagatctcgccgttttgcagctgtctgagcagggactcttgactgagggtgaatacatcgcgggaaagcagtcgctcacggaacagggtgttcataaactccagtgactccaaagtaccggggtgaaaaaaaggatcctcccacgcagtgccggtatcggcggtgacgccaaacatctgttgaagactgggaagctccacgtagcagggaatcaactccggataggctttccgaacggcttttagctgttccaagcaatacgctttggacaggggctgctgactatcccagtggattttttctcattccaatgatcgtttggtactgaggagtcgggagggaaagtataccagtatgtttattttacaaacattatagcagttttttcagaaaaggtaaacgcaaaaagctgtcttataacgggtgtgcttttcgccggtgttggccaagtaagacggagagtttgacagaaaagcggaggatgcagatgcttacagtgatggtagtggatgatgatccccttttgtgcacagccatgcgacgaaagatagagatgattgacagggaaaaccagttaggaattcaagagacgctgatagcccactcggcccaagaggcgtgggggattttgcaggaaaagtccgttgatatattgatcagcgacattcgaatgccctatcagacgggtttggagctggcggacaaggtaaacgaggctttcccggagattcagctggtgattctgagcggctatgacgattacgagtatatgcggagtgctctccgcagcggagtggtggattatctgctcaagcccgtaaagctggtgcaaattcaggaagtgctgctcaagtgtcaggagaatcttcgccgccggaaggcgcaatctctccgaaacggcaacgaccgggaggtactggaaaactggctcaacggcttactcgcgggtaaaaccggcaagcccccggtggaatttccccatccggtgttctgggttgcatggccttttggcggggaaggagaagccggtttccggactgaggaagtctttgccgaggaatcgtcggaggatgtggcggcattcttttttcgcaacgtaacgcaagacgcagttgtgctgttgaataccgaaagcagccgggaggacattgtaaaagcatacatcgaaacgtgtcaggagtcctgtgtcaagcagggggcgggacggccctgttttgcagtgagtcgaccgtttacgcgtttggaggagtatcctgtgttttataaagaggcacggtacaccatggcctatcgcatgctggagccgttcgaccttcggttttcctctgctcaagcggctacggagcaaagccggtttccgcggtttcaagcccggattcattcggcctttcagagcagaaattttgctgagctttatcagttgcttcaaaaaatcttctgtcgggaattttttcaggagcagccctttcctaaggagattcgacgattttatgtgtattgggagtctcaggttcaggagatggcttctgcgtatcatctggaattggaagcgtttcctcactttagcagatttgccagtttaaatgaaatgcaagaatacttgcagaaggttttgaagcagatggaggcggctgtgcagaccgctacaaacaagtatgcccatattctttccatagcaaagcagtatgtgcagaataattacaaccgcgatatcagcatggacgaagtggccgagatggtttccatgagttacagctactttagccgtgtgtttaaagagcagcttcatcaaagcttttcggaatatgttctgtctgtccgaatgcgagaggccaagcggttgatggaagaagatcccgcaatcaaaattaaggaggtggcagaactggttggctatgaaagcgtgtataccttttccagggcgtacaagcagtactatcatgtctcaccgaaacaggatcgagacggctaaccggaattttgccaaaacatagacagcatattcgagaaaggaattttaaaatggaatataagaaacttgggaaaagtgatgtactggtctcggagctcattctgggttgctgggccatgggaggagattatttcggcgcaacagaggacaaaagctctttggaggcgttggaagtatcctatgagaatggtgtgaatacctttgacacggccgagatttatggcgatggccgttccgagcgagtggtgggcgaggctgcccgccggattggcagggacaaggtgcgaatcatctccaaggtgttcaagccctctatgtcccacgataagatgattaaagcctgcgaagacagccttcagcgcttgggtaccgattacttggacgtttactttttacactatccggtagcggaggaagaggttaccattcaggaaagaatggagaccatggaagaactgaaaaaggccggaaaaattcgagcgatcgggttgtctaacttctctctggaagagatgaaggcggctatgcgatttggacaggtagatgtgattcagccttgctacagcctgctgtggagatacgatgaagccttgctggagtttagccgaaagcaggagatttcggtgattccttacagcacgctggctcagggattgctgacgggaaagtaccaaaaaggcgcagtgttcacggacggacgcgctcgagcggctctgttccagccggaaaactacgataggtgtctggaagtgacggacgtactgtcacagatcagtgcgaaatatggcaaaacaccggcccaaggcgccattgcttggctgctgcaaacccaagggattacggcaccgattgtcggagcgaaaaacggaagacaggctcaggagaatttgaaagccgccggctggcaattcagtaaggaagactacgatgtgattgaccgagccagcagacgctttatggagggcttaccccattacacactgttcttcaatacggagacaacaaactgagaggagagaaaagagaatgccattggttaaagtaaatgagctgctgcaccacgccacggaaaacggttacggagtagctgctgtgaacgtgttcaactacgaaacgattaagtgggtggctgaggcggccaatcgggagcgaattccggtgattatccagttttatcccggcttcgacaagtacatcgccttaaaacatgtggcggctatcgccaaagattttgcagaaaaatcttcagtgcccatcggagtacatctggatcattctgccggctatgaaatagcagtgagcggtgtgcgggatggctttccgtctgtgatggtggacggctcagcgttgccgtatgaggaaaatatggcgctgacagcagctgttgtgaaaacagcagcggtgtttggcgtagacgtagaggccgaactgggtcatgtgggctcgggagccaatctggatgacatcgtcaacagcgatcattacaccaacgtaaagcaggctgtggaatttgtgaaatgcacgggttgcggatctctggcggtggctgtgggcaatgcgcacggtgcctacgtgcaaaccccgaatctggactttgaccgtattgcttctttgcgtagcgctctgcccattccgctggtactgcatgggtgttcggatattcctcccgagcagttgcaggagagtgtgcgcctgggtatgagcaagttcaacatagccaccgagtattttcgagcttgctatcacggtgtggtacagcatggggatccggctgaaaagaacggggacatgttccgactgatgatggagacttccgaaaacgctatagattttgtacgtggtaaaatgcgtttgcttaatccgaataagtttacattttagttaacttaacgcaaaggaggctttaggaagagttgtgttaaaagaatttgaaatagcgggctatgacatgccctgcgtagacctggcagtgaatgtggatgtgtttcccaagccaaacggaggaaccgggataaacgctatgagctggcagggcggaggaaaagtggccaccggtatggtggcggcagccagattgggagctaaatgcgccatgataggtgcggtgggaagcgatgactacggcgagttttgcttacgggattttgaacgtcatggaattgacatatccggaatgaaaacgcgccaaggagaaacgacatctctctccatagtgctcagcgaccgcgagacgcagggacggagtatcgtgtaccgatccggcacggcaaatccccctacgttggaggagatagaggaacgaattctgacggggtgtcagtggttttttatctctcatgccacacatgtggcaatggaatcagccaagcgggcaaagaaagcgggagccaaaatcatcgtggacgccgattcctactcatcggaaatgatggagaatatcggcatcatcgacgtttttattgcttcggaattcttctataaggtgcttttccggggaaaggaggaggcctttgaagcaaattgccgggaggtccaaaaaatgggcccttctattgtggtattcacattaggagcaaaaggctgcgtagggtacagcgaggaggatggcttttttcagatgccctcctttgcagtggatgtgcaggatacagtgggggccggagatgtgttccacggcgcatataccgtaggattgctgcgcgggctttcttccaaagaagccgctcggcttgccacgggagtttcttgcatcaagtgtaccagaattggtggcagagccggcattcccgattggaatacggtgcagcgctttttgcgcaccggggaaatcgactatacggaaattgatcagcgtgtagaattttataggaggaagttgcagatatgaaaaagcagaacattgtgattggcgtagcgcctactaagcgcagctttttgagcatggaggaggccaagcggcaaaaggaaaagtttatggctgttattcgcggtattcatccggatgtggtcactctggtggatattgatgacatatgcgaaaacggaatactgttcgaaacggaaaaaataacgcaggtggtggaaaaattccgccgggcaaagattgacgcgctgtttaccccccattgcgattttggtgaagagcagtgtgccgcaggagtagcggcggcgatgaaggtacccaccttggtatggggtgctcgagatgagcggcctaacaccgacgaaagccgaggaagagatacgcagtgcggcatgttcgcctgcaccaaggtgatgcgccggttcggagtgcagtatagttatatttggaactgcgagaccgaaagcgaggatttccgcaatggctttgacagctttatccgtgtggtgtccgttataaaggcggtgaaaaatctgcgaatcgccaagtttggagcaagaccggaaccgtttatgagtgtgacggccaatgagggagatttggcaaccaaattgggtgtgactgtggtgccgatatctcctaacacagtggcagcccgcatggatcagttgatcggtgaaaattctcccagattacaagactacgtggcgaatgtaaagcaacgtatggatgcttccggtatgaaggaagaggcggtggaacgagccgcagcagctaaactggccattcaggatctgatggaggaaaagcactgtgcagccggagcgatggagtgctggagcgcggttacagttttaggcgcacctgtctgcatggctttgggcgagttgtctgatgaaggattgccggtttcctgtgagacggatgtcaacggagcggtgaccatggcgatgttgcaggcggtcaccttgggcaaggaggcttgtttccttgcggatttgaccattcgccatccgcagaacgacaacgcggagctgctgtggcattgtggtcccttcccgtattccttgaaggattcttccagtgttgcccgacttgtccagggacaggaacggtttgaactgaaaaagggccccattacggtatgccgtttcgacgatgtggacggaaagtactatctgtttggcggtgagggcaaaggagtagacggacccgaaaccaatggaacctatgtgtggttcgaaacgaacaactggaagatgtgggaagagaagctgatgtttgggccttatatccatcatgtgggtggaatttacggaaactacaaaaaggtgctgcgggaagccgcccgttatctgggaatgatttttgatgatgcggacgaacagggcgtgtatagcctgtaatcttagaaaggaaaaattgccatgagagagattgtttcaaaaccgttggatcgggagtcgtttcgtccctatggagattttgtggatttgctccatatcaagcagatggatgctatggccggagcggataatatcttcatcccggacttgacgatactccgtttagatgaaagaatgcaggcctcggtatgcgtggcacgggtgtcccagtgtgagagaatcatcaccgctgtggaataccatggatttaccagcgagggaattcttcctctggacggtgacattgatatatttgtgggaccttccagttttcaggtgaatcctgcgtccattgaggcgttccgtgttccccggggtacctttgtccggctgaatcccggtgtgcttcacggccgccagtttgttgtggattcccagagcgtcaatgtaatgatcttgctgccggagcgtaccttcggaaatgactgtgtgttcacgcggctggcagaatccgatcagattaaaattctgttgtaaaggagtgattccatgaatcgagaggcaatatttcacaatccggtcagcaattatgcgtttcccatttcctatgaaaagttcaaggttcgtttgcgtgcagggaagggcgatttggaccgagtgactttggtcattggaaataaatacctctggcatacccgcaaggaagttcccatggaggtggaaggttcagacgagctgtttgattactattcttatgtgtatccggtagatgaccctcgcgttgcctactacttccttttggaaaagggggacgaacagtggctgtatggggacagcggtttcgcaaagccggaactggtcaacatagacgaggatgaatcttcagcctttgttaacttccattttccgtttatcaaccgcattgacatccataaaaagccatcttgggtcaacagtgcggtgttctatcagatttttccggagcgcttttgcaacggaaacccaaagctttctccggagaatgtggcgccttggggcaccgcgccggacagacagatttttatgggcggagatttgccgggtattacccaaaagctttcttatttggaagaattgggagtgaacgccctgtatttgaccccgatttttgaagccacttccaaccacaagtatgacaccgtggactatacgcgcatcgatcctcattttggcgatgaatccgatttggtggagctgattaatcaggctcataagcgtggcatccgagtgattttagacggcgtgttcaaccattgtggcggaggttttaggcagttccaagatgtggtggagcacggagaggaatctcctttccgggattggttttacattcgggaatttccggtgagttttgatcctttgaattttgattctttcggagacactccctatgcccccagacaccccggtttgaaaaatttatctgaagagcagctgagaacggcctgcatgcccaagtggaacacggaaaatcctcaggcgaaggaatatcttctgggagccgtggccaagtggacccgcatgggtattgacggttggagactggatgtagccaccgaggtggactcccatttctggagagagtttagggagaccgttcgggggatcaatcccgacgcactgattatcggagagttctggcgcaattcggaagcgtggcttcagggggatcagtacgatggcgtgatgaactatggtgttcagcgcgcggcagtggagtactttgccaagagcgcagtggcgccccagcgttttcaggagattctcacggaaaatttgatgcgctattccgatgcagccaatgactctatgctcaatctgctggacagccacgacactgctcgtttccttacggtcagcggaggaaatacggcgcggttgaaaaacgcggcggctttcctgttcacctttgtgggtatgccctgcacgtactatggcacggaaattggtatgacgggtgagaacgaccccgattgccgtaaggcgttcgactgggaggaatctcattggaatacggatttgcggacgcactatcagaagctgatgcggttgcgaaaaaccagaaaagcactgcaggagggaaccgttagattccgttctcagggagatttgtttgttatggaacgccaattgcaggaagagcttctggtgacggtaatcaacaacacagattgtccccaaaactacacgttgtcgggaaatcacgtccgcgatttgttaagtgaaaaggcctttgaagggactcagaatgccaccgtggtggaagtttctcccttctctgcaatgattctggaaaaaataaattaattttatttaatttataacttaatttaaaggagttgtaatcaacatggaaaagaaagttattcgcgtaggatctgtaggcgtaggagccatctggggcggcgtgcacgagcccggtattgccaagagtcccgatttgaccttggtggccatctgcgacattgatgagaaaaagctcgaagccgttggcgagaagtatgggattcctccgcagtaccgttttacggattatcgagatttggttaactgtgacattgtagatgcagtggatatctgcacctctaatgacgcccatttcaaggtggcaatggctgccgtggaagccggcaagccgtttaacctggaaaagcccatcactctgaccgcagaggaagcagacatactggctaaggcggctcaggagaagaatgtcaagaatatggtgtgcttctcctaccgattcaaggctgctgcccgctatgccaaggatctgattgcgcagggcaagatcgggcgtgtctatcacgtgaatatgcagtattttcaggcgtggggattgccccgtgccaactgccccttagtatggcgctatgtcaagagcagaacaggtacaggtgctctgggagatctgggaagccatgccttggatttggtacgatttgtgacgaacaaagaatatacacgtgttgtgggacataccggtacttacgtacacgagcgtccgctgctggacggcaaaggcgtcggaaaagtagatgtggacgatttcagcaactacatggcggatatggaagatgagatttctgtcagcttccagattacccgatttgcttatggccgcggtaactatcagcgtatggagatttacggtagtgagggtgccattgtctacagcttggatgccacacctgccggaattgacgaaattgaagtctgctccggagacatcaatgccgatgcccatgttttcaaccatctgcccattccgcagcagtatttctgcgatcagatgcagtcctttgcagacattgtgaatggcaccggtgatggtcttgctgccaatattaaggatggacaggcaaaccagcacctgctggatgctattgtagagtccgcagagaaaggcacatggttatcgctctaagcaaaattccaaaggcgaagagtgacggtgactggaaagagatgcaggcacctttgaaaatcagtgtagagtaagcaaccgcgttccgctttaactttaaggcggaacgcggttaactctatgtaaagaagcatttgaacgatatagttgcgaaaaaggcacaacttacggagggaaatccgtaggttgtgccttagctttattcgtgaaattagaatggattatgtaccacccgtatgctattgctacatttaaagagaattacatcaagattgatcgtatcttttgtctcttttttgtcatggttttattcagtcaatctcgccgttggctttcgcggcctcaataaccttctgcgcaacattctgcggggcttcttcgtagcgcacgaaatcaaacgtgaagctgcctctgccctgcgtgacctggcgcacataggtgctgaaatcgtacatttcggccatcggcacttcggcgtctacggtctgatagccgacggtttctgccggggacatgcccagcacgcggccgcggcgcttgttgacttcgcccatgatatcgcccatgttagcgtccggtacggtagccttcaattcgccgatgggctcaagcagaacggggttcgcctgcggcatgccgtttttataggcaatggaagcagcggtcttaaacgccatttcgctggagtctacggggtgataggagccgtcatacagcgtcgccttgagaccgacgaccggataaccagcgagaggacctcttgcgatgcactcgcgcagacccttttcaacggcggggaagaagcccttcggcactgcgccgccgacaacgcgctctgcaaactccaagccgtctgcatcgcagggagagaattcgatccacacatcaccgaactggccgtggccgccggtctgcttcttatgtctgccttgtacggaaacggtcttacggatcgtctcgcggtacggaacgcgcgggttgcgcagcgtgacatctacgccgaacttcgtcttcagcttggagacgatgacatcaaggtgctgttcgcccatgccgctgatgaccatttctttggtttctgcgttattttcaaaacgaatcgtcgggtcttcttccgcaagacgcatgatgccctgcgcgaccttatcttcgtcgcccttgttcttcgggacgatggccatacgcatctccggagtggggtatgcgatgccgtccagtgtgaccttgcgtgcgggtgcgcagagcgtatcgcccgtgttgacgccggcaagcttcgggatggcgccgatatcgcccgcagtgatggcttttacatcttcctgctttttgccgcacatcatgacagttttgccgacgcgctccgtgtttccggtgcgcatgttgatgagcggggtctctgtggagattttgccggagagcacctttacgtaggagagtttgccgatgaacgggtctgcaacggtcttgaagacgatggcagccgtggcggcatcttccttaacggcaatctcaacggggttgccgtctacgtctacgccgatttccgcgcccttatccgccgcgctcggggcgagccagcaaaggccgtccataaactgctccatgccgcgcataagcatagcgtcgccgcagaatacgggcgagatggtgccgcttttaacaccctgggaaacaccgacgataacctcttccggcgtgaattcttcgccggagaaatatttctcgaacagctcgtcgctcgtttcggcgacggcctcgtaaatggcggtacgcagaccctcaagacgggcgcccatgttcggcatatctacctgtacaggcttgccgccggagtaatcgtacgccttatattccagcatattgatatatttatctgccttgccgtcctcaaaatacggcacaacaatcgggcagacggacgggccgaagctcgcttttaaatcttcgaacactttatagaagtcggaaccttcatcgcacaggccgtttacgaagaaaatcttagacaggccgcgcttttccgctgccgcaaaagccttttccgtaccgacggaaacgccgctcttgcctgcaagcacgatgacaacggattctgccgcgcgtgcggcttcatacagaccgccctggaagtcgaaaagacccggggtgtccagcaggttgatctttttatttttccattcaaacggtgccacggccgtggagacagacgtcttgcggcggatctcctccgggtcggaatcacagaccgtgttgccctcgcctactttaccgcgacgatcggatgcgcctgcaagataaagcatagcttccgcgagggaggtcttgccggcgccggaatggcctgccatagcaacgttgatgatgttcttagccggatatgtgttcatggaaaacaccccttatatgtataatttacaatttcaatttgagattgcttcttaattatatatcatattgccagatattgcaatggtgaattgcaatttatacagatattctattttgtatatttaaagtttatgcatgttgtatattccaaaaaatgctttttgcaataagctttcaaattccgtttgaaaaggatagaattcagcaggatttgagaaatatatagcagacttcttctgatgagggagctgtcagcgaagctgactgagggagaaatacagcgagctaacgaacctcacagcaccttttttatattatagagaaatcctctcccggctacgccgggagaggataaatgatatcagtcggcaaaaagatttcgctttcagcggagctcgaccaaaggcgctgcctttggaaactgccaactttttgaaaaaaggttggatcaaaagctttcagcgactctttccatgttactcgactgtttcgcggcttaaaaaatcggacgcgagcttgccgagccgcaaatgctcctgcgtttcgccgggctttgcatcttcgtctttaatgagcaggaacatgccgcacaaatcgcccgcacaggagatggggaacgctgcgtttgcggtgcgcagcccgccctccgccgccaaaacggtgtcctcgccggaggagatgaatgcctttttgcggcgcatcagctcatccaattgcttggagacaggcttatccagcaaatcctttttcgggatacctgccgttgcgatgatgcggtcgcggtcgcacacggcggtgccgatgccgcttgccgccgagatgcactccgccatgtttttggcgctttcgttcagttctcccacgggcgagtatttgcggaagatgatgctgccgtctttgtcgatgaaaatttcaagcggcgtgccctcgctgatcttcatggtgcggcgcagctctttcggcaccaccactcgcccgagatcatccatacgtctgacgataccggttgccttcatatctcaaatctcccttgttttcaaagtttcggtatgggtagtatttgagaaatgcggggaattatacacgctacaaagttttacggaaatacacagtggcgcgttcggtacctgctttgacgtgaaaagcggcatggttgaaaaggattgttttctgtgttgctatataaaatcaagcgtcatgcttgaatgaaagcacggcgcttgacttattaaaaataaattttaatcttccacaggcgtttccaaattgttcattacaagccctgtgataagcttcgggtaaaaatacgtggacttctgcggcatcttttcgcccgcagccgctaccgcgccgatctcctccacgcgcgtggggttcaaaataaatgcacactgcatctcgtcgctttcaaccgtggaaagcgcttcgttcaaatcgcgcgtatacgtcaagtttttctgactcgccatattttcgcgatcaatcccgagggcgcgctccaaaatgagcgtatgcaaaacgctgacgtccagcccgcgcgaggcctcgctcttttcgggcataaattcttccataaccgccgcgtctttcaaaatcagcagcgcgtagttcattctgtccccgtttttatacacgaatgcgaacgccttttgcccggcatcatacgcatttttcatgcgcggcgcaatctcgcttttgtccgcaagcgtctcgatttgaaagtattccccgcagctttcaagtaccttttcggcggaaaagccctcaatgccgcgcacaaggcggtgcgttgggaacaccacaagccccgggtgtgccatatcgacgagcgtcatcatgacgaattcgctgcccggcgcccaaacggcgttttcacggcagtaatcgcggtaatgaattgcggtttcatagcggtgatgcccgtccgcaatgtacaatttgcgcggcgcaaaatcggcgcggaacgcttcaagcgcctgtttgtcattcacaatccacaggcggtgtgtgacaagtccgtctgaaaattcgcagtacggcgtgccggcggaaaggcggtcgatgcgcttttgcgtctcgcccttttcgtcctgatacaaagagtaaatcgaactgaagttgcagttcgtcgccttcatcagctcaaaacggtcctttttcgccttagagagcgtctcctcgtgcggcagcacaacgcccgcggaaaaatcctccacgcgcacaaggcacacgatgccctttaggctgcgcacctcgccatggtctacgtcggttttgaattcttcctcgtagatataaagacctgcgtccttgtcacagcgcaaagtgccgtcggaaagccacgtgtgcaacgtcttgccggcggtcttatacggttcttcgccgcgcggcagctccaggcgtatgacgttgtgcgggtttctttccaaaaacgccgcgcgctccgcttcactgatgatgtcatacggcggacaggtcagtcctttcgcttctcccgccgattttgtgtaccgcatggcatgaaatgcccgaatgtctgccatcgtggtgccccctttaaatttcactttttctcattataacggcaaagcactcttgcgtcaagaaaaaagcgatacaacatgaaacatcctcgccgcagttcaagtccgaaaacacttcacagcccggctgttttgtccgtattttccgaccgttcgaatcaaaacctgcttcttaaaagcgcaagaacaaaacgctgtgcggcggcatttgcaaggttccacccgcagcttggtccagaacgtttgacggggtaaatgaggagggaggcaacacggtgtcactggagaagagcatcgcctcgctgcaaggtccaaaggaagagaagtccaccggctttttgcggtgaaatgcggcgttcaccaccgtggcggacacccgaccctctcgatccacggtaataacggcttcttgagacgcggagcacagacgattacccatgtgccagcgattcatccaggagaacacttgtccttgcgctgtcaagctcacgtgatccggtttcacacacagcattccctcgttgatcgcctgaaagtgacacgcaagggctatcccgcttttttccgcctcttccatcaacatgtgcaaaaccagcgccgcataaataccgtcggtaacactggaaggacggtaccaggcataccacacattccactcgtccatggaaatgcgtatagaaggctccagccactgccgggactggtgaatcagttcccgcatccgggagacagaagccatgcaccggttatattcctcctctacggtggaaaggtcggtgtaatgagggtcgtagccataatagtgctgggaaatcatctgagaaatcccggcaagcggcttggctgaaaattctgcccattccttgttaggatagggtcccgaggagcacaggctgagaccgggtgaggcctccagcatttttttgccattctccagtgcgatctgacagtacccggcaggagtgttgtcgccctccatgtgaccatagccgaattcgttacccaatgaccaaaactgcacattgtaaggctcttggtgcccccgattggctcggagttttccgtagggggttgagacatcgccgttgcagtattccacccaagcggcgttctcatcgggggtgttccaacaggggttgatggtgataaacggctcggcaccgatttctcgacacagggcgataaagtcatcggtattcatctcgctgaaatcgtagcccatggtgtgcggttgagtctccagacccaaataggactggaacggcgcacgcatatccgccggcaaaaggccgtccatccagttgaattccccggcaaaattgccgcccggccagcgcagcaccttgatgcccaaatccttcatggcttccaccacatcgcggcgcattccgtggaagtgatccttgggcagcaaagaaacggctcctacgcagacataacccgcattctcccagcagattcgcaggtcggcatcagagtcagcggcctgcggggtgagctccacctctaaacgggtccaatcgtcgccgccacctacagatgcggcacggcagtagacgttcttcccggttcgatctgtcaatgaaaccgtaaacttcaccgattcttgggttttaaccaccattccgaacagatacggttgcccctgggatattgtgatgccatgctgacccatgccgacagcttccccgcagtaggggttgaagataccgacggaattacattcgagggtccgcttcatgtggtagccttctccgtggcgggtgtagggttcatccaaggcaaacacgccacgttcccccaagggaaaccattctatggcgcagccctcgcaagccgtgggcttcccggcaaactttcgattgcgaaccatctgggcggataggccggtatagatacaggagcgcgtgtgctccaggttgcagccgaacaagtagggcgaaaccagtaaatccgcaggatcgtcccggcgtaaggtgagaggtgtggcctgagctgcttttccatcccaatcgacggcctcgtccagattgctgctgcgaaccacgttcatgagttcgccgctgagaagctccacaacgctgacgcgcagctccgcagccacacggctgaaaagcgtcacgtcgggcaggcttttgccacgttcccacttagagaccgctttatcggttacattcagtcgttcggccagttgagcctgcgtaagacccatggccatcctgcgccggctgataaactgtcctatttttgataaattcataaattttcctccctttaggactttcctttagcataccatagtccacccgcacaagcaaccgaccgacagttgagtaacatggggcgaaaaagatttctctgacacttttatgaaacgtttcttctgtcacgtcggaaaagaaaaaaacgggagtgcttccgaacatcgcctcgcagttaaggtggaacgtggttgcttattttgcacttattttcaaagagctgcaccgtattctgcttcgttttttcgcccggggtatctctttaccgctttgcaaaaataaaagcttttccgtgcgcaaaaagcttgaaacgcaacgggggatttggtatgatggacgtaaataagccttgaggggaaggactgcacattgtgtgcggcgtgcgccctaaattttgggaaggcggttggattgagatggaaaaaagcaagcgaacgtttcgtggcagttacccggcgtatgccctgacctatttcttcttttactggagcttgggcgtatttacctcggtgctgtctatgtatctgacgggcatcggcaaatcgaaagcggagatgtccttcattatgtcggcttcgagcttgttcggcgtggtgctgatcccaatcgtggggtatatcaatgataagctgcgaaagccgcggcttatctgtacggtgatgatggcgtgcgtggcggtgttcggcattctgtttgcgctggtgcgcgaaacgatgctgctgttccttttaaacggctgcatcatggggtttatctcatcgctttcgccggtgagcgagcgcatggcaacctcgacgaagtatcgctacggtaccattcgtatttggagcacgttcggttatgcggcggctgtacaggtggcctgcgccatgatggaatttacgagcccgcagctgatttttgtttcggtctccgtttcggcggtgctggccattgtgggtttcctcggcacggacgacatttcgtttacggatacggaagcggcaaaggctgcgacgggcaagcagttttcatttctctgtgcgccgatgtacattttgttcgtcatcatcgggtttattttttcgggctgctcaaatctcaacatgacatacagccccattttattgcaggagctcggcatgccgacgggtgcggtgggcacagtgctgtttttcagtacgattgttgagctgcctgtcattttgttttcgtacaaatttatggatcgcttttcaggacgcacgctgatgcttttggcgtttgctattatggtggcgcagtttttgctgtacgccacggcgccgaacgcgtttgttgcggttgtgaccatgctggttttgcgtgctatcggttctacgctgttcgggatgatcttattgaagatcgtgcgcggcgttgtgcaggtgcgttccgtttccacagcgctgggcgttatcagcgctacggacgcgatgagtgccattttaatgcagaacctcggcggcattctggtggaaaacacgagtatccgcatcttgtattttgccatggcgggcctgatgatgctcggcatgatcctaacgctgttcctgcgcgtgcagaacacggaaaaggtgttttcgtaaaaaataccccgcagcttcgcgaaatttccgacgtgaagctgcgggaaatttttagaagccgaacacggctgtgtaatctaaaacggcgtgcacgaggacggggatccacagggagccggatttttctttgaggtattggaaaaggcagcccatggcgacaagccccgccatttgtgagcatacaaaacgcacaaggtaagacgcggtgatcgctccgaaatccgcataggcgaacacgtgcatggcggcaaagagaatgtttggcacgaggtagcgaacggcggcgggctcgtcccgcaaaagccccacgcatacgccgcgcacgacgaagtcctcacaaaacgcgatgaaaacggtgtagtagaataggctgtacagcacggtgattttatccggctttacgatcagcgctgcggccgtgacgataagcaggagaaacagcaacaaaacagcgatttttcttgttttgcctttggggacggtcagctgcatcgcctgcacaaagcgctttttgcagaaaacgagcgcgaggaaaacaagaaaagcgggcacggcggacgtgagcagattttgcgcaaagagctgcggcaggtgcgaggaagccgcccgcacggagagcagcgtgcctttttgtttttcggcgtatatgacccatgcggcgaaaaacatatccgcggcacaaatcaaaaacacggcaagaattttcagcgcaaatttgccttttgaggacgctttatctaaaagcatagttttctcctttcgcggcccgagcagccgcctttttcgggtaaattatagcacggctttcagaacgtgacaagttcactaaatttctgacagtgaattttacgggagtaattttctttttactggaaacgggcgggcggctgtgctatgattaaagtatcaaacggaaggtggttatatttatgatattggaaagagtcacgccggaaagtgtgggtattcattccgaaggcatattgaaatttatcgatcttgcagaaagcagaggacttgagctgcacagcatgatgctgttgcgccacggcaaggtgtgcgcagagggttggtggaagccgtataacccggcgtcgccgcacatgatgttctcctttacaaaggcgctgacctccacggccatcggctttgcgtgccaggagggagcgctgtctcttgacgatcgcttgagcgagctgttcccggacaagatgccggaaaatccgagcgaaaatctgcttgcctgcacggtgcgcgatctgctcacgatgtcctgcggccacgagacggagatcaatacgttcgacgtgaacgagccggattggattaagaatttcctttcgcacgagtttaaatataagcccggcacgtgctttatgtacaataccgccggcacgaacatgctgtgcgccgcgctgaagcgccgcacgggtgagaatctgttcgagtaccttacgccgcgtctttttgagccgctcggcattgagaatattgagtgcttctgcctgccggacggcgttgaaatgggcggcgcgggcagccgcctgaagaccgaagacatggcgcgctttattttgtttgtttcccggcacggcaagtgggagggcaagcagcttttaaacgccgaatggttcgacatggcgagcgcaaatcaggtctcgacgatcagtccggcgaataattcggataaccccgactggcgctgtggttacggcttccagttctggcgctgcgtgccggagcatgtgttccgcgcggacggcgcgttcggccagtacggcgtggtgtttgaggacaaagacaccgtgctcattttgcagagttcttcctccaatcagcaggagcagctgacctgcgcgtgggaggcgttgctgccggccatcacggacgaggagacgctgccggaaagccccatggcgcacgttttgaagaagcgtttggaaagagcggagatcacgccgatgctgtcttcccgcaacccgtggtccgaaaaagagattgagggtaagaaattcgcgtttacggaggaagttccggggcttgtcgatttcatcggcggtgtgtggattgtggccccgcagggcggtgtgacaaagacgctgcgctttgaatttgcgcccgaaaaagcaaatctcgttttcgagcaggataacggcgaatttacggcggagatcggccttcagagccacttcacgagctttacgctcggcggccgtacctacggcggtgtgggtcgctggcgcagtgacaagcgctttgagctcgaagttcgctgtgcggaatccgcaggcggcagacgaatgattttcacgtttgagggtgacgcgctcacgctggagacggaatctacgatggcaatctccggcggcattgcagaccgcccgtacaagcgctacacgctgaaagcggaataatttcaaagaaggatatggagccgtgcgcagaaggaaaacctgtttgcgcgcggcttttctttgcttaaaacgtttgactaacggcctgaaatatgctatactcttggggtattgaatattgggctgtcgccaagcggtaaggcaacggactttgactccgtcacctcgtgggttcgaatcccgccagcccagccagaaaaaaggactttgcgttttgcaaagtccttttttcaacaagataaatcccctagggatttgtgaaactgccctttgaacaataaaatgtcttagaatgtttataaaaaggaaaaccgccggtcttcgcaatcatctcgcgcagcagctccgggttttccagcatggggcacgggcgcaggtggttctcgttgaacggctggctatcgtggtacgccatgaagagcggcgactgcaggacttcaagcagtgttttttcgcgaatgttggaatcggaatagtggatgaatacgcacgagcggctcgccgccggtgtagatatacaggtatacgccgagctctttgccctgcgtgatggcagaaattttagagaaaacaaaagcgccgggcttccatgaaagctcggcgcttgatttattgatgaaaattatacgaactgggacgggtctacacgggtgccgttttggtagacctcaaagtgacagtggtcaccgaaggaatagccggtatcgccgacatagccgatgacatcgcccttgttgacccactggccctcgctgacggcgacggagctcatgtgtgcgtacagggtggaataggtgctgtcgtggtaaatggagacgtagtagccccaggaatagccccaatcatcggagccgtttgcggtcatgaccctaccggagcgggatgccacgatctgcgtgccgcggcttgcggggatatccatgccgtagtggccgttgccgaatgcacagctgacgccggtccagcccggaacaggccatgcaaagctttcaccggaatagtcatcgtcataagacggctgcggcaccggggtcggggtgggggtcggctttacggtcggcaccggggtcggtgtcggggtaggcataacgttgccgttatcgtccacttcttcttcaggcacgggggtcggcgtaggtgtaggctctacggtcggtaccggggtcggggtgggcgtggcttttgcctgtgccatctgctgctgcatttcggcgatctttgccgccatcatgtttgcgagcacgtattcttcttcctcggtgcgggaaagctcggtctcggcactgctcttatcggagcggatctgctcgagcagggcggtgttgtcgctttcgagctgctttaattcctcttcgcttgattcatacagttttttggcatcggcgagcgcggtcttttccttttcaagctcttcgcgctgtgccttcgtctcgttcatgtacgctgcaaccgtatcgatgagctgcttatcgtggcgggtgatggtggagacggcctctgcgcgcatggagaaatcatgcaggctttcggaattgaagagaatctccagcgtaccgacggtgcagccggcggagtacagcacggcgagacgctttttcagaagctccatggtatcggagatctgatctgcggaatcgctgagctctttttcgagctttttaatgctggtgttcagcacggtgatgtcgctgtttgcgg

SEQ ID NO: 3870 - DNA, 14312 bp, Unknown
  16S sequences of unknown bacteria
ccgtcagcacatcattgggcaagatgaacgcattgacgcccagcgccaccaagaagttgccggcgatgatctgcgcactgtccctgatcagttcctttttcatgcgtccacctcccgctttcttcaggtccattatacctattttgacaaaagaaaggaagagaaaggcgcatgcccattctctcccgctttaccacagaccggaaaacagcgattccagccatgacttcggctccacctgcgccacgcaatagctccagtccgccagcgtgccgctgacgcttgcccctctgccatctccctgcgtcagcacgagccggtcctgctccatcttcgcctgcacatcgtccgactcaaacaaggagagattgtgcacgagcaccgtgtaacggctgtccttctgaatgccccgcatcagctgttcatacgtttcctgcagctgttcctgcaatggatacgtctccttggtatcccggtcaaaatggatcgtgtacgcgacgccctctgccgtgcctgccgcaacgccgccgctgagcacgcacagccacagcgccaccagtacgaatgcttttttcatttgttcacctcatatctgaagtatggacgttcttcccttttgcatacctcattctgatacgctcctttgcctagcacaacgccctatcaaccgggagatatttgctgatcaagcaaacgtaccgtcagcgacgcatttctttaagcgagcaataacgtcgctgggatacttcctgtcgttcttccatggcttttgccggcgtttccggtataatagagggcaaagggtgatgatatgacacagaccgacacttttccatctgaaacgatcattctggttccggacgcgctgcgcctgatcctgcagcagaggatgctgaagcgcggcagcggccagatcgggatcacgctgatctccttgtctgcctggcgcaggcgtttttcattgacacaaccgccttctcgtgccagccagctgctccgcttccggcacacgctgctgccgcatcgcgatgattttcccatcttcggctctctgttcgaggacactgccttcctcgaggaatgccgcagctttctgtgcgagctgaagcgccatgatgtgccgctggacagcctgccgcagcaaagcggcgatgaacgcgagctgttccgcatcctctccctgctggaagatctgccttccgatgcgcagagcgagctggaggcgtacgccgccatccaaaaggagacagacctttcccacatccgcatctatccggccttcttcagcctggaagaacagcggatcgtcaacctgctcttggacaaaggcgcgcagatgatggcatgcgaaagctcatgcacacagcgcgagctttaccgggcggtgaacatgcgccaggagatcgaggcgatcgcgcagatgatcatccagcgggactgggatgccgaggacatcgcgttgtgcgcgctggatcccttttacgcgcagctggcagagcagatcttcagccgctatgagatcccctatacgctgctgagcgcgtcatcgcgcgatccgctggctgccttgactcaggcctggctgaactggcggcgctccccctgcaccgccagcctgcaggcgctttgtgactgcgacgcctttgccatcgactgcagcgtgctgctgcagctgctggacacctttgccatcgatgtgcatgacgacctgtgccgcagccagcatgtcggcccctccgtgctgtttgatgaagaggcgctgaagcggcttcgccggctggaagagcaggccgcggccatccagcagcagatcctgccgcagctcgatctgatccgcgactgcccgctcgacaccttgttcactcacgtcagcgaacgatgcgcagagcgcttctctgcaggaggccgcgcggccctgcagggcatgcaggccgtccaggaagtgctggaggccgcatggccgcatctgcacagcgaagacgatctctccttcatcatccgcctgcttgacgacatccgcctgcacagcgcgggcgaacagctgcgcggggtcatcatccacggcatgaaggagctgttttatgagcggcccatccgcttcttatgcggcgtgaccatgaacgcctggcccggattcgtcccgcatggcggcatcttcgatgaaaagctgcgggaggccctgccgctgccatccatggatgagcgctatgcgcatcatcttgcgcaatgcggaaaataccgcatggctcagcagacgctgatcgcgctgtatccgcaagggacctatgaaggaaaaagcaatgaagccagcctggagatcgagcagatgatgaaggcgcatgcggatgatccgatcccgctgctgcagccgcaggccgtccaccgccgcatcacgcctacgcatcatctcaacgccgatctggcacggcgcctctacctgcgcgatcatgtgctgtatggctcgatctctgcctttgaacgctaccgcggctgtcccttctcttatttcctgcgctatgggctgtcgctgaagcgaagccgccagcagatcgatgagaccagcctgggcgctttggtccaccatctgctcgaggagctctgtgcgcagatgggcaagcaatatgcgcaggcagacgagcagcagctgatcgagatgatcagttccctgttcaaggaagctgagacgctcttccccgaccggcatgcgcagcatgagcagatgaaggcacagctgctcgtgcagatgaaggcgctgttgtccaggctgaaggcgctggaggagcacagcgccctcagcccgcggctgctggaacagcccttcaccttccggatggatctggaagaagaagacgcgcagctgtgcatgagcggcgtgatcgaccgcatcgacgcagctgcccacatgggcgtcatcctcgattacaagagcagccgcaagaccctcagcgaaacgaaggtgtacagcggcagacagctgcagctgcccgtctatgccctcgccctgcacagcggcatgatccctgaaagcgaagacatcctcgatgtgatgggcgtcttctatctgtcgacgaaacaagaatcgatcacccaggaggcgctgaagatctcccgggtgaagaagacatgcgaccccgtggaagaagaggacgtgcaggcacagctggacaaggcgcaccggctcaacgggtggatcttctcgacaaacatcagcgccttcgatgatgacggcacccatgtggccggactgaagcaagataaggaaggaaatgtcgtcctgcataatccgaaacagacgctgcgcgagctgcagccgctggatgaagggatgaagcggctgctgagctggctggcccagcgcatcctgtccggcgcgatcgaatgcgaaccggatgaagatgcctgcacctactgcgacttccatgacatctgccgctatcacggacagccttatgtcagggaagccatcatcaccagagcaggcacatatgccgaaggaaaggaggaacagcatgccgaagtggaatgaacagcagcgccgcgcggtagagatccgcgaacgaaacatccttgtctcagcgtcggccggcagcggcaagacgaccgtgctggtcggccggctgatggatctggtgctcaaagacggcatcagcgtcgatcagatcctggccatgacctttacggaagcggcggccaatgagatgaagaagcggctgtccgccgccttgcaggatgcggcccgcgaaagcgaggatgaagcggtaaaggcgcggttaaaccgtcagctcacgctgatgcagagcgcgcagatctccaccatccactcgttctgtctctccatcctgcagtcttattattacatcatcggctgcacggccagacagatcgccacgatcgcagacaatgcgcagacgcagcgtttccagcagcaggccatggcaaacaccctgcgcctgcatcagggagaggcgctcaacgccctgcgcgcccgcttttccgcccgtcccggcgacgatgccccgctgtgcggcgccatccgcagcctggccgcgctggcatccagcaagcctgacccggacgcttggctgcaaagctgcgcgctgccttatcatggcacgctgccccaggagatgcgcgattccttcttcgctttcctgcagctgcagcagcggcagatcgtcaacgcgatggagacactgtgcgcactgcttcatgaggaatttccccacaaagaaaaagccatcgaaaaggccgagcagaagcgccggctttgcgcgcaggcctgggatgtgctccgatcgcaagattatgccggctatcgccgcgcattcatgacgtgctgccgcaacccgctgcccaacagcccggacaaggacaatgcgctcttcctgcgctgccgcgaggagatcaaggacagcgaagaccggctgggcgctgtcctcttcgatccggacacgctgcaaagcgacatgcaggcaagcgcgggcagcgtcgatacgctgacggcctgcacccgcacttatctgcaggaataccgccgactgaagcaggaagcggaagtcatcgactttgacgatatggagcatttcgccctcgccatcctgcaggcgcaaaacggcgccgtggccgcccggatgcgcgagcgctttgcgatcatcatggtggatgagtttcaggataccaacgacatccaggatacgatcatctcgctcatcgcccgtgagaacaatgtgttccgggtcggggacatcaagcagtccatctatggcttccgccatgcgcgcccgcagatcatgcagtcgcgcatcgaccatgccggcgcgctggatgaggtcatctacctctccaacaattaccgctccagccgcacactggtcgagttcaacaacgtcttctatcagaagctgatgaacctgccggagttttcctcttcttaccgtgagcaggactgtgtcgccatcggcggcccgtggcaggaaaaagtcaaagaaccggtccgctttcatgcgctgctcgcggatgaattgaaaaaagaccctgtcttccagggcatgagcacccagcagatcaaggcattgtggatcgcgtcgcgcatccgcgccatgcacgaagagggccgttacgactggaaggacttcgtcgtgctcgtccgcagcaaccgccgcaaggatgacctgcgcgccgcctttgaccggctggccttgccttatttcatcgagatcaaacacggcttctatcaatccaacgccgtgcagatcgtcctgtccgcgctgaatgtgctgcatcagccccatgatgatctcgcctttgtctcgctcatgctctccccgctgttcgatgccgatgaagacatgctcgcccaggccaggctggaaaaagagcggaacgcctcctattatgcccatttccgtgcgcaccctttccccggctttgcgcagctggagacgctgatgcataagcgagacctgcccatccacgccctgctcaatgaggtctatgcgctgaatgactattatgcctgccgcacgacgctgcaggaaaagaccaacctcgacctgctctatcaacaggcggtgaagttcgaggagacccacagcaacgacctgcacgccttcctgagctatatcgattccatcaaagatgcccagagcggcgaagccaatccgatctcgtcagaggacgatgtgatccgggtcatgagcatccatcagtccaagggactgcagttcccggtcgtcttcctgtggtccacggacagacaggccgcgctggacttccgcgagccgttcctgtttgacgcagacatgggcatcggcgcacggcacatggatgagcgccgggtgcagcgtccgacgcttgcccgcatcgccatccagcacaaaaaggaccgcgaggagctggaggaggaaatgcgcatcttgtatgtggccaccacccgcgcacaagatgagatgatcgtcgtggactgcatcaaagaccctgaacagtaccgcaccccgctggacggcgtgaccgtcttttcccgatgcggctacaccggatggctcctccacgcgttcagcgatacggcttcttcgctgttttccctgcagatcatccaggatccctttgacatcacgccgcagcgccaagcacatcagcctgaagcgaagcgcatggtctatcgccgcagcgcttccgcgatcgagcggatcagcgcgtcttcgcgcaagggcgtatcggagctgccgatcttcgatccttcgcgcatcgagcgccagggcgcccgccgcggcaccttgatgcatgaagtgatcgccgagctgcatccgcctttttccacagcagagatccaggctgccttcagtcgccgaaatgcgcaggcgcagccatgggacatccgccagctgcaggctttgggaaacgatacggcatatcttcgcttctgcgccatgccgaaggtctgtcacgagcttccttatcaggcccggatcggcgatcagatcttctatggctacatcgactttctcgccatggatgatcacacgatcatcatcgtcgattacaagacagatgcgctggaggaagacagccagttcgtcacgctgtatcaggagcagctgcgcacttacgccatggcgctcagccagatctggccggatcatgagatccgcacctacctgtatgctttccatctgaaccggatgatccctgcataatcgccgcgtttgtgacgacggacaagaccaaaaaaggccgttcggccttttttgcatcttttctcgatctgggcgccgctcagcttggcagcgagtgattgaactgcagataagcgttggctatcgtatacatcacgctgttgagcaggccggcgcgggcgctggtgatcatgacctgaatggcataatcgctgttgccctcatccagcatcaggatcagcgcggcaagcaggcggttctcccgcagaaatgcgcggtcttcttccggctccatattgatggcctgttccacccgcgcgttgtcccgcagcccgctggtcacctcatccggcatcggcaccatcttgcctccgctgcagatcgcgtttccttgctgagacaggctgaagcgctgaatgaaatcctccacgcgcttcttcagcggcaggccgccagtcttcaaaggcgtccagacggccgctgccattgagatccttgaagccatagccgtcctcctccatgatctgcaccccggcattaggctgataaccgatgttctttccgccctgattgacgatgatgcagtgatgcttattatgctttaatgtccattttgaatccatatcctgatcatcctttcactgatactataacagagcggacgaaggaagttgtcgcagccgtgtgtgaaattttgtcagtcttccgcatccatcatttcccgcgcggcatcacgcaaaaaccgcacgcattgatcgatacccatgcggctcgtgttgatcatcatgtcgtaattggacagcgcgccccatttgcggtccgtatagtattcgtaaaaccgcgcccgcttccggtcaaagcgctccatcgtctcctgcgcatgtctttcatccacatgatacagctcgatgccccggcggatccgatccttcttttccgcatacaggaacaaggagagcacggtctcctcatccttcagcacatagtccgcacagcgcccgacgatgacggcgctttcccgctgcgcgatggagcggatcagcgaagccgcggattcatacacctccaggttcacgctcagggaggtgacggtggccagcggattaatccgtgtgcgggatacttcgtacatcccatcttccccgcggttgtcatcacggaaaaaatcgccggaaacgcccagcttcttcgtgatatcttccagaaactcgcggtcataaaacgcaatgcccagctctttggcgagccgctgaccgatgatccgcccggcgctgccgtactggcggctgatcgtgattatgatctttctgctcatgttcatcatcctcgctgctttgtttattttcattatacctctttgtgaaagcgcattcaatcgctgttcttctgttttctcctgtggtatagtgaaagcaaaacaggaggtctgatcatgttaaacgtcgttaccatcggaacaagcttcatcacggatctgttcctgcaggctgtcgaacagctggaggggatccgctgcacaggcatgtatacccgcacgcgcgatcatgcgcttgcgctggcacagcgccatggcgtctctgccatctacaccgatctggatgagatgctggctgccgatgccgatatcatctacatcgcatcgcccaatgcgcttcatgccgagcatgcggaaaaagcgctgcgcgcaggaaagcatgtgatctgcgagaagccctttacgatgacatccgcgcaggcaagggcgctctttcagctcgctgagcaaaagcagctctttctgttcgaggccatcgtcacgcagcatatgcccaactatcacgccatccgcgatctgcttccccgcataggaaagatcaaggtcgtccagagcaatttctctcagtattccagccgttacgcgcaatacctcagcggcagcgtgcccaatgtgttcagcccgcagtggggcggcggtgcgctggccgatatcggcatatactgcatccatttcatcgtcggcctgttcaacgagccaaaggaagttcattacttccctaaccgcggatataatggcatcgacaccagcggctgcggcatattgatgtatccagacttcattgcttcctttacttgcgccaaggacagccgcagcgaatgtatcacgcagatccagggcgatgcgggctgcatcacgctgcatggcgaagcgagccgatgcacccgcttcgtgctgcaggacgctgaaggcaccattcatgaggaccttgctcagccgcagcatgacaatgtgatggtccatgagctgaaggagttcacccgcatcttgacggaaaacgacagtgccgcgtatgccgcgctgaaacaggagagcctggcggtcatgcgcactttcgaagcgcttcgtgcgcacggaaacgtcccctggccaaacggcgattaaaaaagcggatctgtggtccgctttctttatgcgctgatgtcgctgacatgatagccggccgcttccacggccttccgcagctgcgcatcgctgatcttgcggtcatagctgaccgtggccttgccttctttcaagctgacatttgcggacacgccttcgatcgcattgagggcgcgggccacatgatccgcgcagttttcgcaatgcatgccgctgatgcgcaggatcttcctgccgatcacaggacgcataagctgtttctcctgtgacttgcgtgaggaagtgccgccgcagcaaggcccttctcccttgaaatgacggatgctgccatagagcgcgatcaagagcagcaccgcgacgatgatgaggatgatcacatcgattccttgcatgaaatgccccctttcctcatttgtgtttcttcctgatcagctggatgagctgataaatgccgacaccgacaaaatagatcaccaggatcaggatgaagaaataaaacatcgaacctgttgaatcgcccatgctcattctccttgcctgctgccacagtcagcgcaggagcaggcggtacagcctgcgcagctcatgatcttgcccatgcgggcagcgagctttgcctcacgatagtgacggacgatgatgaagacacagtacccaagcaccagcgccagcacgatgatatcgatcatctgaacctctcctttccaaaagagccgggcagtcgtcccggctcttcatttcccttattcctgaacagaacggcgggaatacactttctgatttttatagggatccggcctgaacagcaggaacagcagcaccgcgagcaggatgagcgcgatgatcgtccatatgccgaacgctccgccggtaagcacagagccaagctgatagacgatcaggcagacgacataggcgaacagattctggaagacgatggcgaaccagaaccacttctttgactgcatctgctgtgccatcgtcgcgatcgcggccagacatggggagtccagcatgttgaagagcaggaaggagaacgctgccatcgcgctggggaaccacatggccacggccggcgcgacgacgcttgcttcttccgcaaggtcttcagagacattggcgagcacgcccatggtcgatacgatcgcttctttggccgtaaagcccgaaagggacgcggcgaccggctgcccttcgccaaagccaagcggcgcgaagatcggggcgaatacaccgccgatcacagccaacaggctctgtccgctttccaccatgccaaagctgccgtcttccgcaaagccgaagccgcctaagaaccacatgacgacgcaggcgaggaacaagatcgttccggccttgatgatgaagcccttcagacgttcccacacatgcatgagcacggtcttcacgctggggatatggtactgcggcagctccatgacaaagggcgcaggcttgccggagaacggcttcgtctttttcaagatgatcgcggcaaccagcacggcgacgatgcccaggaagtacatgagcggggccacgagaccgccggcttcatagctttcggtcgcatagctggccatgacgccgcccatcagggcgatgaccggcagcttggcgccgcagggaatgaaggtcgcggtcatgatcgtcagccggcggtcattgtcttgctcgatggtccgggatgccatgatgccgggaatgccgcagcccgatgagatcagcagcgggatgaagctctttcccgaaaggccgaaatggcggaacacacggtccatgacgaaggcgatacgcaccatatagccgcagtcttccaaaatcgaaaggaacaggaagaggatggccatctgcggtacaaagcccaatactgcgcccaggccgccgacgatgccgtcaacgaccagcgaaaggatcatctcactggcgcccagcgatttcaagaaaccgctgacggcatcctgaatggcgactacgaatacatcgttggtccagtcggtcacgaaagtgccgaccgtgctgaccgagatataatagacgatgaacatgaccgcgataaagatcgggatgcccaggatccggttggtcacgatctggtcgatgcgatcggacacagtgagctttcctttggctttcttcaccgtcgtcttgacgactttttgaatgaactggtagcgctcgtcggtaacgatgctctccatgtcattgtcatgcttgctttccagcgctttgcgcgcgtcttccacgacgctgcgggccgctgtgctcaggctcatggattcgctgaccttgctgtcattttccagcagcttcaccgcataccagcgctttttgtcctctgtgatcgacgcaggcagctgctgcttcacattttcgatcgctttctctaaatcagcggaaaatatatcagcgggcaattccacttcctttgtgttggcagtgcggatcgcttcctccatcagcttgttcaggccatcgcctttcagcgccgatgtctcgatgatcgggcagccaagcaccatggacagccgctcagtgtcgatcttgatctcacgtttttccagcagatctgccatgttcaaggcaatcacgaccggcacgccggtctcgatcagctgtgtcgtcagatacaggtttcgctcgatgttggtcgcgtcaaccaggttcacgatcacatccggatgttcattcaagatgtaatcgcggctgacgacctcctccagcgtatacggcgaaagcgagtaaattccgggaaggtcggtgatgatcacttctttcttccctttcagttttccttcttttttctccacggtaacgcccggccagttgccgacatactgattagcaccggtcaggttgttgaacatcgtggtcttgccgcagttcggattaccggcaagcgcaattctgatcgtcatttccacccctcctcatggtcatttgacttgtacgcattttgcatcttcttttcgcacggagagctcatatcctctgaccgtgatctcgaccggatcgcccagcggagccacttttctgatataaagctccgtccccttggtgatccccatgtccatgatgcgccgtttgtaagcaccatctccgtcgatcttggtcaccacgacggtgctgcctacttttgcttcacctaatgtcatcgctgtatctcctttcctgagaatgaaaccgtgatctgttcagatcatgatatgtctggccatatcttcattgatggccacgcgcgaatctttcacgttcacgattacgttgcctccgatcgaggaaagcacggtgatcggcgtaccggtcacaaagcccaggttttccagaaaccgtcttgtctcttcgtttcccccgactctgcgaatggtgttttctgttccaatgtccgctagtgtcaatggcatcatctttcatcccttttcttccagacaaaggccaatagcatcgctacggtctttttactcagttatcatagtctaacttaagttagccgtcaacaacattttgttagtcatggcttacatttaagcaaaaaaagagctgccaggaacagctctcacttgcgtcatgccgccagcgctttcaccgcgtcgatccagcgatccacttcgctttgtttcgtctccatgcggctgccgccgttgatcatgaacggcaccaccgtcttgcctgcaaagtcatgctgagccagaaaagaacgaacggccggcgccatcgtataccaccaggccggtgtgccgatggcgatgatgtcaaaggcagaaaaccactgtccgtctcttttttgccttgtgccggcacttcctcatcactgcctgtataaggctgcagcgtttcgatgcgatccagatcagcgccaaaggctgcagcgtttcgatgcatccagatcagcgccaagggcagcagccagacgctctgcgatccgctttgtgtttccatttgaccagtacttttttcatcatcagacctcttgaccctcattttacgcttggctgcccgatggagaagaaaggcttggttactgcgtgctgagcgcacgacgcagcagcctgttcccccacagccgaaacccgatgaacagcagcgcgcaccagccaaatgcaagcatgatcatgcgtggatccgctggcaggccgagcagggcgccgcgaatcacttctgtgatcggtgtcagcggctgaacctgcgcaaagaacgcaagcgggccgggcatagctgcggcagggacaaagccagagctcagataaggcaggatgatggccagggccgaaagtgcgctggccccctcctcgcttctggccaacaggccgacgatgattgccagccaggaaaagacgaggatcacgcagataagcaggacaagggccagcagccatccgcctggatcaaaagccgggcaaaaccccaggatgacagcgacgatcagcacgatcaaagaagtgatcagattgcgggtcagcgcttccagcacatgcccgtgaagataagaagagcggcggatcggcaagatacacaatcgccctgccatgcccgtgcgcacttcgcgacagaccatgacagatgtcgtggaagagcactgtccgacgcattgcaaaagcacgccgggcacgatgtaatccacataggccatatccccgatctggatcaaggtgccgaacaggaagacgaacaaggccatcatgagccccggaagcatgacgctcgtgagcagtgtatcgggattcctgagtgaaagcaggcagcaccgccatgtcaggatcatcgtatctttccattcatctctcatgtgcttcacgctccctttcgatcatctgaagaaacgcgtcttccaggctgggccgcgcttgctcaaagcgaaccggcatgatatgcgcctggtgcagccgagtcagcacatgcgtgagcaacgtcatcgtctccgcgcgctgtacgcgcagttccaatgtctgcgcatcactgtgcggacgaaagtcagccaggatcgcggctgcctgccgcacaaagcgggcatgggcaaagtgaaagcgcagcttctcgtgggaaaaccggcctttcagctgttccggcgtgcctgtggtgatgatctttccttcatgcaggaccgcgatctgatcagcgagcagctctgcttcttccagatactgtgtcgtcaggaagacagtcgtccctgatgcgctcagctgccggatcgcttcccagctttgcctgcggctggcagg

SEQ ID NO: 3871 - DNA, 9364 bp, Unknown
  16S sequences of unknown bacteria
cataaaactctcaggaaccacgagtctcttgtttgcggagtcgtccagggttctctcaaaccactgagtggacgccgtcattgcgggagacatggaattgctcatgacaaaccgggacagagaagcgattctctcacttcgcatcggatttctcttatacgccatagcagaagaaccgatctgctttttttcaaaaggctcctctacttctttcagatgctgcaggagacggatatcgttcgtcatcttgtgagcgctctgagcgataccgctgagaacagccagcactttggcatcaatttttctggtatatgtctgaccggagacaggaatcgatttttcaaagcccattttctttacgactttccgatccagctctttgactttttcatgatccccgtcaaaaagatccaggaaactggcctgggtacctgtcgtaccctttacccccagcatcatgaggctgtcgatgagctggcagacgtccagatagtcgaaataaaaatcctgcatccacagggtggctctcttgcctaccgtggtcagctgagccggctgaaaatgagtgaatcccagagtaggcacgtctttgttttccaatgcaaatgcgctgagccggctgagcagatccgcgattttatgttttacgagggtaagaccctctctgatctggatgatatccgtattatcgcccacatacgcgctggtcgctcccagatgaatgattccctttgccttcgggcactgaactccgtaagcgtagacgtgggacatgacgtcatgcctcacgtctttctctctggcccgggccacttcataattgatatcgtctttatgcgccttcagctcatcgatctgctcctgtgtgatatccagccccagctccttttcagcttcggccagagcgatccagagctctctccatgtggtaaactttttatcaggagaaaatatcgccgacatttcccggctggtatatctctcgataagaggattctgataggtatcttttttcacgttcttcctccatccgtataaaaatttcaaggcaaaacgagtctttctgccctttcaccgatattgacgagaacactctcacagcattccgccgcgcttctccccgccgcagacgagggatcattccagccgcggcttttgcaggcgaacactgtctttcagcggttcaaagaagcagacgtttcccggcgcccggccgaatcccgccgcacacgctgtgcggccggcagaaggctttactccgatttaaaatctctgaaatgaaaactgcgtcttccttccgcataatcggcgacgatatgtccgtcgccgaacagcttatatttataagtcacaaggccctccagtcccaccggacccctggcatggatctttccggtgctgatgcccacttccgcgccgaaaccatagcggaacccgtcggcaaatctggtggaacagttgcagtaaactcccgcagaatccaccagctgcatgaagtattccgcagcttctttgtcctccgtgagaatacagtccgtatgatgcgatccataacgattgatgtgcccgacggcttcctcgatgttttccacagtcttcgccgatatgatgtaatcgagatattcggtgcggaagtcctcttccgaagccgattcgcattcgatgatttcccggatctcttcggtgcccctgagacacacatgcgcctgtgaaaaagctctcgccagcgccggcagaagttttccggcgatgtcccggtgcaccagcagggtttccgcagcgttgcaagccgcaggatactgcgtcttcgcgtccagtatgatcggcaccgctttttcgatatccgcgctccgatccgcatagatgtggcatacaccgtcggcatggcccatcacaggaatctttgtatgattcatgatatgctgaacgaactcgttggatcctctcggaatgagaaggtcgatagactcatgacatttcagcacattgtcgatatcatcgtgggtttccgccagcatcagacatccctccggtagtcccgcggaaagggcggctccgtaaatgacgtcgaagagtttccggttcgtccgcttcgcctcacttccgcctttcagcatggcgcagtttccgctcttgatgcacagagaagccacctgaaccatagcgtccggacgcgcttcaaagatcacgccgatgacgccgatggcgcaggtctgacggcagagacgaagaccggcgtccagttctctgtccaaagtgattttattgagaggatccgccaaaccggtgagttcggcgattcccgccagaacttctccgattttctcttctccaaatttcagacgtttgagcacaggtgcggggattcctttttcctcggcggcttccagatctctgaggttctcttcgataatccgcggtttctccctctcgatggcatctgcaatcgcctgaagagcctgatttctcatgtcttcggatgctgccgacataaacgggctgacggccttcatccgcgccgccttttctctgatgtccataagtcacctgccttttctgactgagttttaccggcatgcgtttccgcagaaacacatgttaactcatttattttaccgcaataaacgccccggggaaacagctttttccgcctctccagcgaaaacacaattcactgaagtaccccgccgagaatatttttgatcagagcgttgatctcccggtaattcagactgtctccctccttcagaatcagaaatccgctctcgtatccgcccatctcgcggatcgaaggacagtcggcattcagcagaacggtgtccgccacaatgctcccggatatgttctcagcaaaaatattcagttcaaaatccggcgaatctccggaaagaacaaactcataaccgtctccaaaacaccggtaagaagcgtgcggtccgtaaacctgcccctgcacatgcaccgtgtttttcttcgttctgatcttttccacgcgaatcccggtctcgcctgtaaaagcgggaaatccttccgcatacaaaatctcgtggagattcagagtccgcaggatgcgcatcatatccgccagcctgacgatatcgtcccgattgtgaagtaaaatcacatttctcagggattcccgctctcctccgctgctccttccgtattcatagtaaagctccacgcttttggcgccgtcgattttatcctttcggtccgcggcatcgcccagatagacttccacggttttctgcttcagattaggaagaatcttcggcagatgagaatggtattttaaaatccggtagatgtccatggagtacagccgatccagacaggacgtatctatcttgtgcctctccatccgcgccctgagaaaaggcagatcaaaccgctgtccgttaaacgtcaccaccacgtccgcccgggacagaagccgcgcatagagagtcagaagttctctttcctcacctacggtatcggcgaaaaactgaatcgcctttcgccgtccgccctctccagtcacagcccccgccagaaccacggcggctttcgccggtgacaggccggtggtctcgatatcggccaccaccacattcataccggaaaaatactcggaaaaaataggcgaatcaaacaacgtcccctgcagatgttcttcgataatatgtaccataaacctcacctccccgtacgttctataaaacaatccggttttatcatatcataaaaaagaaagacccgcccctctttccgccgcaagcggaagagaaacgggtgcgtttactgtttgttcttttccggacagatttcctcagagagcctcttctcccgccagtttgatatctccgcccatcatacactgaatgatctcgtgatttttcaccatcacgccggcctctaccacgccgcccggctctgtaaatttcagtttgtaaattccgtcctgattgagcattcctgtactcgccgccagataccaagcacaggctacgcttccggacccgcaggaggactcccagatcagagactccgtgctgcggacatagaccaccggcgtcatctcatcgcccttcagaaataagattccgcaggcgttaggctgccattttcccatagcgcgaagagcatcctccgccagttcctcatctgcatccacgccttccatgatcacatggtcaatcccttccatatgcactaccggacgcattgtatccttgacgagcacctcttctacgccgagaggtttcggcatctgcacgaaagccagaccggcgctgagatccacattggccattaccggattcgccgctccagagatctccaccttcacagcatgtctgccgccggaatgctgttcagacgccttgagataggcgaacgcccgcaccgcgtttccgcagaattctccccccatcatctccagcctgcagtctccgccgttgacaggaggcacttcaaatcctacctgctccgctttctcctgctgaagaatctgcttcgccagttctacgcgcttttcattgccgaattctccccgtacgatcgccgtcatgtttcctgcaggatctacgtaatgtatcatagccatttttattctccttttgcaaaacgtgctaaaaactgtctggtacgctcttctttcggatgttcgatcacttcgtgaggatcgccttgctccacgatgtagcctccgtccataaagacgacccgatccgctacatcccgtgcgaattccatctcatgggtgacgatcaccatcgtcatcttttcctttgccagctgacggatgaccttcagaatctctccggtcagttccgggtccagagctgacgtcggctcgtcaaaaaacagaatatgcggttttatcgccagagcccgggcgatggcgactctctgctgctgccctccggaaagctgacagggataatagttctcttttccagtgagccccatttttgacagcagttctttcgcttctttttccacatccttcttatttcgcttctgcacgtgaacaggagcgtctatgatattctttatcacggaataatgaggaaacagattgaaattctgaaagacgagtccgaaatactgctggatctttttcagctgtgccttaggcgaataaacgcttttaccgccctcactgcgcactgcggactcattcagatagatcagttccccgtcgtccattttctccagcatcgtcgcgcatcggagcagcgtagatttaccggatcccgacggaccgatgaccgctacgacttcgccttcttccaccgagagagaaatatcgttgagtacattcagatcgttaaatgactttttacaatttttaatttcgaacaacttcatgaatgcacctcctttactgataataactcatcttcttttcgactttgcccatgatgcccgccaccagcaggttgaatatgtaatagaacgcccccgctacaaacagaggaacaatcgtcgtctgtgccgcggcgacctgctttgcgatcgtaaagatttccacatagacgagtacaaaagccagcgacgtatcctttaccagcgtgatgatctcattcgtcacgggaggaagaacctgcttgatcatctgcgggaagatcactttaaaaaaggtctgcaccctgttgtagcccagcactttggccgcttccctctgaccgaccggaatcccctgaattccggaacggaaaatctccgcgaaatatgcggcgtaattgatgccgaatcccagaacggttgcggcaattctccattccggcgtaaggcggataccgaacaggtaataaggaccgtagcaccagacgatgagctgaagcatcagcggcgtacctctcagcaccgaaataaaaaactgcatgatgagacggatcggattaaattttttcagcagcctcgcgcctcttccgttagactcgagcctgcgaaacggccggatatcgctcatgcgggcaaatgctaccagaaggcccagaggaagagatatcaccagagttgaaaaaaagattgtcagcgtggcgcccgtaccggagagcacctgctggatcatgccagacagagtcatgacacaccccactttctaaattatgattcttttctgtacaagccaaaagaagaggcaggctctgcctcttctctgtaagtgactttccgatcaggttattctttgtcgctcttatctccgccgtccatatatctctcgatgcagatcatctcaggaatgttgtattcggcgtacttttcagcgatcttctggaaagtgccgtcctcatacatttcaaataatttttcctgaacggcatcgcgaagttcctcatttcccttcttaaatccgataccgtactgttctgtggagagcggcttttccagcttgcggaaagtatcgccgcgggaagtcagctgatactgcgcaacgccgatatctaccgcgatacagtctaccgctcccgattccagattgaggaatgcgctgttgtaatcaggaacttcctgaagttcagcgaaagaatcctttaacgccaggttttcttcattgtcttccgtggaagtcagcgctgccagagcggaggaatccgcctgcgtcaccacgaccttgcccgccagatcttccgccgtctgaatatcggaatcgttcatgacgataaatacgatagagttatctacatacggaacggagaacgtgtatttatcctcgcggcctgtcattgtaaaaccgttccagatgcagtcgatcgtaccggaattgagttccatatccttggcatcccagttaatcggctgttttttgagctcccagcccatacgatcgcagacttcctgtgcgagatcaaggtcgaatcccacatactcgccgctgtcgtccttatagccgtacggcgcgtattccgcgtcaaaacctacggtcagcgtcgtcatctcagacacaggagtgatcccggtatccgcagatccgcttccgtctgttgcattgtcttttttgtctccgcagccggtgaacacaccgagaaccatgacgagacataacattacagctaaaatctttttcatatttcctcctcatacccgaaaaaccgggcacctacttttttcttttgtgcatttcaaagcaccgtacttatgatttattttatcataagcgttttacctctgcaacaatttattttaccgaattaccacgttatcgctttattgtcaaaaagcaaagagtgttctgaagatttcacacaagtctttccagccttccgcgcttcatttcgaaaggtaaggaatattccctcggacagcctcttgcagcagacagatctccgcttccgcccctctccgaaaaaaaggaaaaaattcctctgtgaaaaggacgctgataaaaaatatggttgacaaaatgcttcaaacgttatattataacttagtcggcagaagctgacagagataaatgtgcacgcgtggcggaactggcagacgcgcacggttcaggtccgtgtggattaacctccgtggaagttcgaatcttctcgcgtgcaccatcgaacacggtatcggtatcggtaccgtgtttttttattatccccgacgccgcaaagaaaggagaagaaaatcatgacctcaaaacagaagataaaaaaatcatcactgcaggcagactctcaaaaaaagactgtaaataaagcattgtctctattttatctcttattgagaatttccgtcatcggcattctcatcgcccagttttttaatggaaattttgaaaatgtcatgctctgcgttctgacgctgattctcttcgccataccgccgcttatcgagcggagactcaaaatcgagattccggatacgctggaagtgattatccttctatttatctatgccgccgaaatcctcggagagatccgttcctattatactgcgtttccggcttgggacacgatgcttcatacgatcaacggttttctctgcgctgccatcggtttttcgctgatcgacatcctcaaccgcaacgatcgctttaaattttctctgtccccgttctatctggcgctgtttgcattctgcttttccatgaccataggcgtgctctgggaattttttgaattcggaatggatcagttcttcggaaaagacatgcagaaagacacgatcattcagagttttcagacggtccttctcgatccggcaaagggcacgctgccgattacagtagacgacatccgcgatgtgatcatcgtgaaatccgacggttcccagaccgcactcggactcggcggctacctggatatcggaattatagacacgatgggcgatcttttcgtcaatttcatcggcgcgttcgtattttccattctcggctttttttacatcaagaacagaggcaaaggaaaatttctccgccgttttattccggccagaataaattctcctgaaaacggcagctgctgcgtccccgatactgatttctccagcgacagcccaaacggccgcagcgaaaaggatcgcggccgaaaggataaacgccgcgcgaaaagcgtctccgaaacttcaggaaactctgacggagaatgccggcggaataccataaccccggtgaaaaaatccggtacggaaagaggaaaaagcagctctgatgaaaatgaaaaaaccggcttcgagacgacataaccgtccctgacagaacggcgcggtgaaatataaaaaagaggcgatcatccgcatttcatcgtacgatcgtctccgtatctgaaacccgctcggtaccacaggcgagtgttgctgttttttctttttctgtattctaagctttctgtgtgaagattttctgaatgaaatatggcagatttacgaaattccgacgacagtttaccgccttaggaaaaaacacaaagaaggagcaaaatgatatgacgaaagaagtattgattcagactgcggcagacagccggaaccgcgcctatcatccctattcggacttcgcggtaggcgccgctctggaatgcgccgacggccgcgtttttacaggatgcaatatcgaaaatgcatcctattccctcaccatctgcgcggaacgaaccgccgcagctaaagcggtcagtgagggacacaggcaattcacgcgaatcgccgtagcgggcagcggcgccgatccctgcatcccctgcggcgcctgtctccagtttcttgcagaattctgcgaagacatggagatcatatgcgtcagcagcagcggaaatttccagacgtaccgcctttcagagcttctgccccacgtctttcggtaaggcgacgggaaaaattgcactgcgccggacttcttcagcgaacagagacgaagaggagggcggacgcattagactttcat

SEQ ID NO: 3872 - DNA, 9548 bp, Unknown
  16S sequences of unknown bacteria
gatggtggagacgccttcatcggcgagggggcggactatatcggtgaatggggttatcggttcgtgttcgatgagctttttcattcgcgcgtcgcggatcatgaagtttgtcgcgctgaggtcttcgtcgattagaagcagcttcgcgccggaggcgatggcttcggcgatgttcgctgcctgagaggtggagccggaggcgtgcgcggtcgagaagtctccggggtcgctgccgggaatccatttgatgaagcgggagatgtcgcggcgggagacgcttctgccgtcttcggcggttattatcacggcggtggggtcggtcaggacgagttctctgccgtcgccttcgtgatggtcatagattcctgccgatatggcgtcgagcagggtggatttgccggagtatccgcctccggtcacaactgtcactccgcgtcggagagccattccgcgcacaccggcgatttcgatttcgtcctcaggcggggagatgaagggggacgcgcctttgagcgggcctccgcggctcattttgtaggtgttgttttcggttgtctgccgcgggagcaccgagccgttggcgatgaacgcgaagtatccgttttcggacaggaaatttctgattgccagctgtttttcaccgaggatcacggcgcgctggattttttcccggtcgtgagcgtcgatgaattcgcggatggcgcgggggagctcttttgtcagcatggtgatcgcgcgtttgagttttctctcggggagcttcacgagaatttcgagacagagacagacggtcggcggggtgagttcgtcttcggggaggacgcggacatttatgcccgacaggttctcatagtcgcgggtcggacagacggcgaagtacgcggtgttgcgggcaaggacttctccgccggggcggtggatgatgtagtgcccggtttcgcgttctgcgaaggggtttgagcgcgccgcgtcgtatgggtcgatgaaccgcgggaattcgcgcagaagcgcgtcggcggcgtgaacagcgctgttcgaggtgatgattctgaggtcttcggcgtctgctccgggacagattatgtcatcgagaccgagtttgcgggctgggatcattatcctgacgaggggtttgtcctgttcggcttttgaggcgcattctattgtgtagccgacatcgttgtcccagtaggtgtttgagttgtcgtcgtagtcgatgcttccttgagttatacggatggggccgtcgtacatacgggtgaagtgtttttcgtcggttttcattccggagaggatggacaggagtcgtttcatgtgatcacacgcggtgacagtatgaacaaaaaaggcgcgtcacggacgcgtcggcggattggtataggtttcacaaaaggcgagcggcgtccggtattatattgatcatacggtgtcaccgtccttttgttttattcggattctgcatccgtgcttttattctaacacatcccgctttgataatcaagaggaagttcgtgtaaatttgttttttcccatgtataaagcttttaggaagggggagtggggggaacctttttctccgaaaaaggttccccccacatcttatgtaaaataatcgaattttcccagagccttctttgaaaacgcgctcggagtctgccctgtgtattgcctgaaagcctgaatgaaatatgacaggctttcgaatccgcagtcttcggcggtttttctgacgccttctccgcgtgacagcatggcgcgggcgtatttcattctgagggcgattaagtattgtttgatggtggagccggtgtagcgtttgaagtcgcggttgagtttgtttacgctgacgaagaagcgggcggcgaggtcgggggtggttatgtcggatttgtagttgagtccgatgtattctactacgtctttgatgtatgttttgatggggctgagggttttggtgttccggtcggtggagtattctttgagttcggtcagaaggagggcggagaggaggattttcttttcggttgagattttttcgtcggcgatttcggtgaggtatctgacgagggtgtcgagttcgttgtcgtcgaggtcgatgacggcggagccgcaggcggcgaatttgccgaggtcgcccatgccgcctcctatcatggcgagggcggattcgccgaggtagaggactatgcgttcgtagaagacgtcgctcgggacgttgttgcggtggaggacgtgggagttgtggaagcagacgcagcggccgtttgattcgacgctgccgccggtgtttgagaaaacgatcctgccgcggctgaggacgaagatgaattcgtagtaggtgtgtgagtggtagaggggcatgtagtggccgttctgcgagagtcggtaggcgatgatttcgcattttctctctctggcgaacggatagaaggcgtcttccattttatctttcctttgacaaaagaatcggtcgaaaacctgaatataaaggtcggttttctaaaccatgtacctattatatcatattttcgaccgtttgtccagaggatttattatatttccgcgcggatttttgtgttttagcccggctccgccccggaggtgtagttcacaatgtttctgaagagggtgaggtagtcctgctgctgcttttcgcttttcttcttgcttccgaaggcgctcattgtcgagatttttctcatgcagaggatggtgttgtccgggagggcgctgatgccctggaaatccttgccgaagtcggtttccgagaggatgatgccgcagtcgtcgtaggcgctgtcgggtatttcgtcgaagatttcggagagcgggaggaagccgccttcttcgtgtacgttttcgtacatatacggcgagaggaggcagatgaccgagtcgccggtgaatatctgctggttgaattcggtcattgaggtctggagaaattcgttgttgaatttggcgccctgggatttggcttcttcgagctcttcgggggagagcatgacgatgtccttgagggtgaccgtgacctgcttgtcgcctgtgcggtcctcgccgaccgacgcgagggcgcgctctatgtatttgacgtcctgataggcgaagatttcgggaccggcgtagatagcgtagtagtcggattcgtccttggtcacaagctgggtgacgcagatgacgacggtgacgatggcgaccgccgccatgcagatgtgaaatttgtagtggtaccagatgttttcgagtttcgactggaatgtggttttttcgctcatttatgtttcccctctgtttttccgtgttattatataagtataacaaaaaaagcgccaggattcaaggtgtgtggcacttattttacaattagtttataaaatccggcaaatagacggcaatcgtctgccgctcgtccgggaaaattcgtgtggataaaaattaacaattttacggttgacattctgacccggagcgcgtataatattattaacagaacccgacacgcctctcaacgatgcgtaccacgtcgggtcatttaattatccggtgatattatgaatcttaaagaacatcagccgccgcttgatatagacgcgcagatcgaaaacctgaaaaacctcggactcactatacctgacgaggacagcgcgaaagagtttctgagcgacgtatcatatttccgctttatcaaagcttacagcctcggaatgaagcctaaaaacggaaaatatattgaaggcacttcatttgacaccctgaaagagctgtatcttttcaatagtaatttcagacagcttctgttcccgcttatcgaacgggtagagatcaatctgcgatgcaggctcgcgaattacttctgtgcaaaatacggagttctcggatatcttaacgccgcgaatttcagggacatagaataccacaaggaattcctgtatgatattgatactgaaatcgagcgaaacgaaaaagcgccgtttgtcaggaacttcagacagaattatgccggcggtaaactcccgctgtacgcgcttgtcgaactgttcagcttcggcacactgtcgaaattcttcaaaaacatgaaaaatgaggacaaaaaagcggtcgcgaaaacattcagcataggctatacatattttgaaagctggatcgaaagtatcgcgttcgtacggaatatctgcgcacattacggtcggctgtacaacgtgaacctcgccaaaacgcctatgatgtacaagcagtatcaggagataggaaatctgcgcgtatattcggttttgctctgcctgaaaaatctgcttccgaacgatatacactggagacagttcaccgacacgcttgagctgctcatcgaaaagtatccgggcgtcaggataaagctgatggggttcccgaaaaactggaaagagcttcttatatagataaagatggaatgtcgtgataacacgacattccatcttttcttattttcagtccggcacgatcccgagcttttcgtcttctttataagaagcctgaagacagatcggcgtgacaaagcttgtgattataataagaagtacgatgaacggcatgattgatgtgtcgataatcccgtgctcgacgcctttctgggcggtgacgaggcagacttcggctcttgccatcatgccgaagccgaccttgatggcgtcggatccgcggtaacggcagagcttcgcggcgagaccgcagccaccgagttttcctatgattccggcgaggatgaagagggctccgaagatgagcatattcccgtttatcccggagaaatcggtcgagatgccgatgttgccgaagaagaccgggacgaagaacatatacgacaggacgtcggacttgcggtcgatgtagcttgaatccgggttggtcgagagtatcagaccgaccacatacgcgccggtgatgtcggcgattccgaagactttctcggagaggaacgcgacggcgaagcagaacgcgagcgagcagatcggcacgaggcgatggtgcgggtacttcttgtcgagccagaggaagaacctcttcgcgacgaccgagatgatcatgacggcgacaaagtacagtatggtgcgcagaaggacgacccacgggctgacgtccgcctcaccgctgatcgcgaggacgaaggagaggacgacgatgccgaggatatcgtcgattatagccgcggcgacgatgctggcgccgaccttggtgttgagtttgccggactctctgagcgtcgcgactgtgacgctgaccgaggtggcggtcaggattacgccgtagaacaggcacttcatcgcgaccggcatcgtgagacccgcgaagccgccgtggcagagcaccgcgacgacgaagccaagccccatcgggcagacaactccggcggtcgttatgaccatagcgggtccgccgaccttcttgatctgcgcgaggtcggtctcgataccggcggagaacattatcaggatgacgccgatcttcgagatgaacccgagaccggtcatagcggtgtcggtcaggacgatctgaccgggaatgtatttgacgagaccgacgaccactccggcaaggagcattccgatgaccgtcgggagcttgacgcgcgtgcagagcttcatgaagacctttgagaccacaaggagcagagcaagcggcaggagaatttcatagtactgcattttttactaccttttttctttatttgattttgttccacaagatataattatagcactctgagcggcaaaaatcaatagctctgagaattttcagcgatagatacaaacaggggcaccgcgcgggcgtccctgttttacacgtgtatttcaaccggttaaagcgtcagccgccgaagatcttcgcggcgaccctctcccgcgcttcctcgaccttgtcgaagttcatcgcggagatgtatatcgcctcgaccgcggcgtggacgcgtctcgcctgcgagagcccggcgagggcgttcgaggtcagctcggcggcgcatttcgcgagggacttcctgcggcggcggttctccttcgtgatcttttcctgattcatgaagcgcgccatgttgatgagccgcaccgactggtcggagtcgtagagacgtctcgcggcgccctttccttccccgccggaggtcgtctcggcgcgctcgatgagcttatccgacacaacggtcagtgagatatccggaatgtgcacggcttcgctctcatccgtcaacagcggcactggcgcgcggacgacatcgtacccgcgggagaccgccgcctcgatcagcgcgtcgaaatacatggccgacgtcccatcgcgatcggtcacgatgcacttctgcccgtcgcgctccatgtatgtgccgaagctgtactcgccgattgtcgagatcgcgctgacggggcggatggtgatcttcccgcgctcacgcggagcttttttcgtctctctttcacccttcgggacgcacgccgacgcctgatctatgagcctcgcggcggcggcgcgcatcttttccggcagcatgaagcgcgcggcgtcgcttctgagcatccgtgtgatctcgccggcggcgaacaggtactcgaaagcctcggagaacagtgcggatttctccttcatcagcgccgagagctcgccgcgccttttttcgagcattccctcgtcccagaaatcgccgagattgattatctcctccgccgcgccggggagtatcgggtcgcgggtgtgcggcgcggttccgtcgatgacggcggctgtgcgcagcccttccccgcccattgtctttcttgtgagtatcagaccgtcgagcgaggtcgggtcgctcgagcagtagtagtattcggcttcgtatccgcgcttctctccctcggcggcgaggcgcttcatgaaagtgctcttcccggtgccgctcccgcccttgattatgaagcagcggtcgatcgtgtccggtgagaaaatccggtcaaaccagcagacgaacccgtcggcgctgttcgccgccgcgaaatatctttttatcatatatggtccatacctttcggaaaacataaaataacagcagagtttccggcgtccggaggttccggagcgctttctcctctgctgtcattttatgcttcttatcgggtttgtgaccatattttaatcagcgtgaaaattccacgtgcctaagatacagcccgtccggcggcgcggtgaagcccgcgcgtgagcggttgcgggacgatatgatatccggcatatcctcaggtgagatacgaccgtaacccacgtcgacgagcgtcccgacgattatcctcaccatattgtagagaaatccgtccgccgcggcgcgtatccggatgagccttccgtccacgatgattttcagccatttcatgtccctgacggtgtccgcgatgtccgatcccgccgccatgaacgcgccaaaatcgtgctttcccggaaacgcctccgccgccgcgcgcattcttataagctcgttttcaccgagagttcgctttaactgccacgcccgcccgacgaggaacgggtcgcggatactgtcgttcagtatgagatactcgtactccttccagagaacgtcgtgccgcacgtggaagtcctccggcacctccacagcgcttctcgccgaaatgtccggcgggagaaccgagttcagcgccgcgggcaaccttctgcacggtatcctgccgtccgactcaaaggtcgcgaaaaactggagcgcgtgtactcccgaatcggtgcggctgcaacccttgaccgccggtctttcgccgtaaagtctctcgagcgcgtcctgaagcgtctcctgcaccgtcctgccgttcggctgaacctgaaacccgttgaagttcgtcccgacgtaagaaatttcaagtaacgtcttcacagcgatatggcgcagggaatcatattaagcagcacaacgcccgcgacgaaaaccccgaagatcacgaacgccagaaaatccttcgccgtgaacttaagtatcgtcatgcgtgtgcgcccctcgccgcccctgtagcagcggcactccatcgcggtcgcgagctcgtccgcgcgccggaacgcggagatgaacagcggaatcagtatcggcacaagcgccttcgcgcgcttagcgaggcttccgttcgagaaatccgcacccctcgccttctgcgccgacattatcttgtcggtctcctcgatgagcgtcgggatgaatctcagcgctatcgtcatcatcatcgagaactcatgcaccgggagccgtatcttcgcgagcggcgcgagcagctgctcgagaccgtcggtcagcatgatcggcgacgtcgtgtaagtgagaattatcgtagttccgacaagcagcgtcgttatccggattatcatcattatcgcgtagacgacgccctcaaagtacacctttatcttccatacgctgaagagcagtatctcgccctcagtccagaagatattgaagaaggtcgtgaacgccagcacgaaaatcagcggcttcatgctcttaagcagcgtcttcgccgatatcccggaagtcagcacgagcgccgccgccgaggctatcagaaagagaaatgcccagagattcttcgcgaggaaaattccgacgatgtagacgatagtcaggattatcttcgccctcgggtcgaggcggtgtatcaccgtgtcccccgggaagtactgtccgattgtgatatccttgatcatttttcccctcccggaactttcctgccgagaaggcgcagtatctcgtccctcgcgtcgtcgaccgtgtaaatgccgttcctgaccggcagaccacgggagcgcagaaggttcatgacctctgttatctgcggcacgtcaagaccgaccgagacgagctcgtccgcgcgctcgaatatctcgcgggtcgtcccctgcatcttcactttcgcgtgatccatcactattatctcgtccgaatatctcgccatgtcctccatagagtggctgacaatgacgaccgaactgccgcggcgtctctggtagcttcgtatgccgccgagtatctcctcgcgccctctcgggtcgagccccgccgccggctcgtcgagaaccagaacctccggctccatcgccatgactccggcgatagcgacacgtcgcttctgtccgccggacagatcgaacggcgatttgtcgagcagctcgtccgcgattccgcagaatctcgccgaatccgcgacgcggcgggcgatctcctgctcgtcgagccccatattcccggggccgaacgcgatatccttcctgaccgtctcctcgaacagctgatactccggatactggaacaccagcccgacccggaacgcgaaggaactcaccttcttcggatccgcccatatctcatccccgccgacgaacaccttaccggaggtcggcttattgagcccgttcagcagctggacaagcgtggattttccggagccggtatgccccatcagtccggttatcaccccgccgtgtatcgtcagcgacacgtcgtcaagcgccaccttccggaacggcgtgtccgggctgtagatatacgagac

SEQ ID NO: 3873 - DNA, 22696 bp, Unknown
  16S sequences of unknown bacteria
atttaaaataattgccatcgggtttgaacttgttgaacctgcccggccttcaagacctgtgatagcgatattgaaaaggcctgctgaatatacaatgtaaccgaacacacaggcaacggcaaggccgagaaccgatgtgaaaaggaacaagcccaatgttttaagtgaaattctgcgcaactggctcatatcggaaattctgtttatagccatgataattgatgtaaataccataggcacgataataagctgcaaagccctgataaagagctgaccgccaatgtagaaaagacccaaggctctttcgttgccccgtgcggtaatatcccggaacaaaaggctgttgattttagcccatttttcccggccgccgttggcgattaaattctcccttaaaaaaacaaccgcaaggccgcagagaatacctgcaaccaatgcgatgaacatattgcgaacaaactttgactgtttagatttctgtttatccataattttctctccccgtaatgtttaaatttgcttcaccgaaatgtaactttcggtggagtgtaacttacacacccgggattacattataccacaaatgacaaatttgtctataaaaaaacatcaaaaagttaaaatttatgttttttgcatattttattttaattaataaacctttattttgtgtgtgcatataaaaatatataatcaaatcactttttgccgattattgtaaaccgtgaatttgccttttcacttgaattttaaaaaatttttaaaaaaattattaaagctctgccgttttcatccgacagagcttttaaaatttacaatccgtttttactttttgcagattaaaccgtacaggcagtaggaaataatcagtgctgtggagataaccgcaacacagcctaaaattacgcccaatagaccggagttaaaaacaacactcaacagatgtgatattatccaaaccgatgcaaatataactgtgttcctgcctgtaaattttatttttttctctttaaacaaaccgataactatacatataactattataatctctgccgcatcccaaagcagagaaagacccacatcaaaggaggacatacccagtttatcggcatatttaacggtttcgattatttcgttaatttcttgcagttcgcctgaaaagaatttgttaaaaagcaataccatacccccttttaaaaagtgtaatcaacaaacagttaaaaccaaactgcgtttatgaaccgtaagcataatcggtaatttctataaaattagggatattattccaataatccgctttttttataagggacattttcatcatgggtatatcaccggtgtatgtgttgcccgccgggtccggaatttcaattttgtatgtaaattcgcctgtttgcacataaaaatattcgctgttttccgcaaatatgccacaaaaattatcatcggaatacaattcaagtttagtaatcgttttctcgtttacatccacagccaaaaaatccgtatatccgtcggattttattccgtcaagcaaaatatgcccatcgtagaaatcgtgtcccaaactgaaactgtcatatttaacaccgtttacggtgctatcctttattgtatatacaacctcttcttcacctgtggataaatttagggcgtttatattgccattgccggcattcagtgtgtacagcatattgtcatggcacaaaacgctcttttcctctttaccgaactctgttattttttccgttttcagcgtatctacatttaagagtattatctcaaatttttggctgtcaagctgttggtaaaaaggtttacttctatccggtacggttgcttttttaagcactaactcatcaccgtatgcgcctataatgaaatacctgtctgtattatctaaggtcaataactctgtcttttcacctgtgtttatatttacggttactatattctttttttcagaatagccttcttcatctaagtagctctcgataaagtataaattatcttccttatcacaggcaacaccgcttgtgtcatgcatccattcgttggcggcaaaggtataaaatttgttcttgttctccccattaaaatccatagagattatctttgaaagagctttttctccgtacttattcaccataatactgccggagccggtatcaaaaacaagcagtttattttttgtagccacaggtctgaccatgctgtatgtgtcacttatatagcttgtactgctgtccgacatatgatccgacgctgcgtcgcttgataaaaaaattttgcttctgctttgatagtcagtataaattacatttgaatgaacgccaagaccactaagcaactcataacaaccattttctgttccggcatatgtatttgtcataagtccgtaatcatcagttaccatatacaggtcgtgatgattatttttgttgtcaaaatcggcttcaaaatggttgtcatctgttttagcgcatgatgagaacaaaagcattatcaatgcgagtaagtatatctttttcataacttttttgaatgccatataatttctcccataacaataagataatatatctaatattacaaatgaaccaaagcggaatattccttttaatccataatttcacctcaaatctaaattgtgtataatcactaattttttaaacttttattatatttttagtgtatcatatatataattgtaatgtcaacaatgatttagcatattttatttgtcgaatttaacgaaaaagaacctgccgattatagcaggttctttaagtttattgtttattgttcttccaaatcggagatatttacaagtattccgtttactttaacttcgccgccggcgggaattaaaatatattttctgccgtctatcgcccttgcagttacatagtggctgttttcctgtgaaactgaaattttaacctccggtgtttccaccgtaaactttttggtgcttataacattgtccggtttaaccgtgccgttatccccgtaccggtcggcatatttttctctgaaatcttcaatgttttcttcttttaccccggtgctttggagtatatcccccatatccccccgagaaagctccaaagcggtaggtattttagcctctttgtgttcttcaacacgccttattatctcatcatttacctgttgcaccacctgaaaactgcaatcttcccccagtgtgtcctctatcatggcggcaaaactgtttttctgctcctcggcgctcatgggtatatccgcttgaaaaatcgtgtctataaaagcctggtggatattgtccgggtttttaacatagtacagggcgctgtaaatatttgttgctctgtcgtcaaaagaggggaacataaatgccatttccgggttttgggcgatgtggccggaggaaatactgcggaaatccatattttcgctgtcatatttaagctccgactttgccggttttacagggcaaactgcgcatataaaataatcgaaaatttgtccggaactgtcaggcaaaagctcgtcgtttttgtccttgtatggcacatcgtatctgtcacttgcaagaagaatgagaaaatcgttatcccccaaatcagtacattgaatgatattttcaatcaattttttgcgatattcttcgtctttcagtgcagtgtcgttaaggttcataagcagggtgtgctcgctgccctcaataacctgctttgaagaaaattcgatattgagcagatttctgcccaaagtgccggaaaggctctttttaagcagtgcaaggtacatttctttttcttcctgttccataagggttaaggaagtatcaaaagaagatacaatatttttactgctgtttacaaaaactccgtatatatgatttatgttgttgtaatccggcttaaatctttttttaatttcatttatctctaatttattcattaaatgcctctttaaatatttgatgtagtttattatacaatttgcagatgaatttgtccacccaaaagaaatgacccccgatttttcgagggtcaatgtcaaaaagaaatgtataggtaaaaattcaattagagcttttatttatgtaaacctacaataggaagatccgtcataggaatatcttcgcttgtctgcatgctgtcctggaaagcgatgtattcttcctttgtcataatcggtttgtaatcggcaatattttcttttgccgcctttgcgccgtccttcataagtctgtatgttgtaagggcataaattttagccgtaacaacataagcaagatacgggtcaacaaactcgaaatccgggttgtggaaaccgccgacctgtccgcctgtgccaaagtgtaccaaaggcataaggcaagaaatatcgccgtagtcatcggaacctgtgctgtgcgcctcgtcaaccttaacatttgtatatttaccctctgcggcgatgtcgtcaagaacactcttcaacacttcaatatgtgggttagccatttctgacatataaccggccatagattcaatatgcaaaccgcaacctgttgccatagcagcggcacggagagaacggtcaaccttcattgatgcgtctttgtatgcctcaggggttttacctcttgcgcaaacctgcattgtaacatggtcggcaataacattaacggcagtgccgccgtcctgaatgaagtagtgaacacgaactgtgtcctcatcacggtagctttcctgttggagagccatatttaccattgcggatgttgcggcattcaaagcgtcaacaccgtggtgcggcatacctgcggcatgtgccgaacgacctgtgaatgttacggttttattgataaagccgtttgatgtgccgttcataattgacatatcacagccggcctgtgtgtggtggcccagagcaatatctatatcgtccattgcaccaactctgataagttcgcacttaccgccgccgtaatggagtttgccctccttcataagctgatttttaaaagtaatatcaacaaattcttcggcaggtacagccataaagcagatatttccgcctaaggcggcctttacctccggatctgtcaaagccaatgcggcacctacaacgcctgtaagctgtgcgttgtgtccgcaacagtgcgaattgccgttccaagcgtccttgttgttcggaataggcaaagcgtccatttcccccataaccgcaagggtaggtccttcggttgagcccttagggttcaaataagttttaacgccggtgatagcccagccctcttcattttcaagacccagttttttcatccattcgcagtatttacctgcggttctcacttctttgtaaccaagttcggcatgatgccaaatgtcatcgccaaatgctatgatttcgtccttttttgaatcaatgatgtcaatgatcttttgttctatcggatcccacatagtccaatctcctttttctttttcaatagtatttttctttttcctaatagctttctgagctattgttcacattatacaattttatttttattttatcaatacaaaatgtaaactttgttttaagaaacaaaaagcccgccgaaaattcggagggctttggtattttgcataaagtttggataactttactataaatgttactttttcatagcgttgtgcattttttgtgcagagagaagaacagcggctctcgatgcctcaaaactgataccgccctgcatatagagctggtaaggctcacgaagcggtgcgtcgcatgaaagctcgatagatgaacccattgtaaaagcacctgccgccattataatctggctgtcatagcccggcatatccccaggttccggggcggcaaagctgtctatcggtgatgccgcctgaatggcacggcatatttctattatattctcaccgttgcggcagttgattattgtaataatgtcgtttctgtcctcttgataaggcggttcggttacaaagcccattttttcgtaaaggcaagatgtgtaaatgcttgttttaagtgcatttgcggtaaccataggggcaaaataaacacccaggtacatatctcttaaaacatcgtttgtacagccgatttctctgcctgtgcccggggctgtaaggcgatgaccgcaaagttccacaaggtcggctctgccggcaatgtaaccgccggtaggcgcaattccgccgcccgggtttttgataagagaacccatcattaaatccgcaccgtactgcaaaggctcttctttgtgggtgtactcaccgtagcagttgtccaccataacgattatgtctttgtttacggattttgcggcgtcccgaatttccttgatggtttcaagtgacaaggcctttctgtctgcatagcctctgctgcgctgtatatagcaaacttttgcgtcggcgcatttttctttaattttttcaatatccggctttgaacccggcaacaaatcgcactggtcgtaaataacgccgtagtccataaggctgccgtagtgtgaaccgtctattcctattactccgtgtaaagtatcgtaaggtgtgccggtaacgcaaaccattttgtcacctgtcctcaaaacgccgaacaaggcaactgtcaatgtatgagtgccggacataaaattgtggcggcaaagagcgtcctcagcccctactatatccgcaaaaagtctgtccaatccgtcacggcccttatcatcgtagccgtatcccgttgtgcctaccaaatgtgcggaggaaatcccattgttgataaaagcctttaaaaccttgagctggttgtaggcgctgacttcgtctaccttgtcaaaataaggtttgcaaagagccataacctcccggtcaagtttaataaattcatcgctgatgtcaaaaaatttttcaatcatatacttttcctattccgatatattgtacaaatacagtttatctgtttttttaaaacctaagtttttgtaaaaatttacaagttcgttgcggcaaacaagccttgcaggcttattttgcaaatctgccaagattgtttttattattgtgccggcacggccattgcctcttgcccgggcggcagtggaaacaaatgatatatacccgtaaccgctgtaatcggcaacaaatgccccggataaaattttattgttttcgtttattgtataaagattacctgttccccgatttatgggcaaagtaaaatacgggtagacaaaatctctgtcaatgccggggaaattttcgctgcaaaaccctgcaaaatcataaatatttttgtttttgcaaacttgtgcaacagctttgatgcctgtgacggcggaaaacccctccatcacagtcagactttccgatacaggcaaagacagttgttcctgccggctttctatggtttttagcccggtaaagcggcagaaaattttaacactttcaagttcttcctgcgataagtcgccgcctaccgacagattttccccttttgccataagacatttgtcgttcaacagataaaaagcgctgttgtggcaaaaaccgaagttttcatactcgaattttattttatccgaaataaagttgttcttttttaaattctcggtaaaccgcccaatgcagtcacgggcgttttttatcataattcatttaccaatctcttaaagtggcggcctctttcttcaaagttccgatacaaatcaaaacttgcggaggcagggctgaagcttactatatcgccggcagaagtattttcatacataagtttaaccgcctgctccatattttccgcatggagaattttaatgccggatttttcaaagtccgggtgttcccttacaactttttcaatcttagggcctgtttgacccataaccaccaaaatcttaacatggtctataatcggctgtgccaaaggttcgtaaggtatctttttatcataaccgccggctatgatacatattttttgcggaaagctgtttaaccccgcaatggttcttgtagggcttgtggcgattgaatcgttaaaccactggacgccgtttaaggttctcacaggctctattctgtgttcaacacccttaaattcacgggcgatttttgtcattacatcgtcgcttacccggccgtcaacggcacaaaatgcagccaacagattttcaagattatgcttaccgcgaagcgccacttcatcttggtgaactattcttctgccggaaacaacaagataaccgtcgccgtcaatataaccgctgttcttcttatccgacaagtcactcagacgagaaaaataccgacattccccttttacatctttgtacatattacggctgatttcattttcatagcccaaaaccgcctttgagttgggtttttggtacaaaagaatatttctttttgcgtcgatatactcccgcatatccttgtgatggtcaagatggttaggagtaacatttgtgacaaccgccacatcgggagattggcgcattgaaataagctgaaaacttgaaagctccacaaccgccacatcactttcttttacatccattgcaacaggtaaaagcgccttgcctatattgccgccaaggtgaacattcttacctgaggccttgagcatttcgcttataagggttgtagtggttgtcttgccgtcggaccctgttacagcatagattttacatggacaaagtgaaaaaaacaactccatttcacttgttacggttatgccctcttttatccgatcttgaagttcttttgtataaaattcaaagcccggtgtacgcaatatcatatcttgatttttaagcccatcaagataattttcacccaaagaaagatttacgcctaattttttaagttcatctccataatcgccgaactttgaaaactcctttttgtcgcataaagtgactttggcaccatactccgtaaacatttttataagggttttgtggcttacgcctgcacctataaaggcaacttttttaccctttaaaccgttgtaaaactccacagctttgttttccataaaaccgtttcctccgttgtttacaatttgttaataatcaaacaaaagtcagttaaaactcacttgtgacagtattataaaccgattttccgtttatggcaactgttttgtaaaaacttacaaaattatacacaggcataaatttttattgaaattcatttatgttagtgataaaatattctcaataatttttcaaggattatttatttaaactctgtaatccgaagaaaaaattttagggcgtttttacaatttatatgttacggtatattggagagcgctttttatttttttaattttatcggtttttctaaccttacgccgatagaaaataatttatataggagggatatttatgaaggttgattttgacagcatttttggagcaaaagtttttaatgacagcgttatgaaggagcgactttctaataatgcttacgagtctatcagagttgcaagagacgaagcccagatttgggatacatcttatgcggatgaaattgcggaagctatcaaagtttgggccatggaacaaggtgcgacacatttcttgcactggcattcaccgctgaccggcacaaacagcggcagacatgactcattccttgacggaactgataaggagggtaaacctatcgtaaatttctccggcaaacagcttacaaaagcagaaagcgacggttcaagttttccgtccggcggtttgcgttccacatttgaggcgagaggttacaccgtttgggatacaacaagtccatgttttgtaatgggcactactctttacattcctacggcttttgcggctttcacaggtgaggcgcttgactacaaaaccccacttttgagaaccacacaggctttgaacaaacagggcgtaagactttttaaagccatgggctttgatgacataacatatgtaaaacctaccgtaggtgccgagcaggaatacttccttgttgacaaagaattgtttgacaaaagacttgaccttagggaaacaggcagaaccatcttcggtgcaatgagtgccaaaggccaggaattgggcgatcactactacggcagcacaatggaacgtgtaagagaatttatgcgtgatattgacgatcagctttggagattgggcattgccgcaaaaacagagcataacgaagttgctccgggtcagtttgaacttgcctgcgtttacgattacgccaacatcagctgcgatcacaaccagttggttatggatataatgagaaagacagcactcagacatgatatggtttgtcttttgtacgaaaaaccttttgcaggcgttaacggttccggcaaacacaacaactactcccttgttacaaacacaggtgagaacttgcttgcccctacaaaaacacctgaaaagaacatcaagttccttatcaccgttgccgcattcatgaaaggcgttgacgaacatgccgatttgcttcgtctttccgccactacacagggcaatgacttccgtctcggtgcatccgaggcaccgcctgcaatagtttcaatgtacttgggcggcccgttgcaaacggttatagaagacatagccatgggtcatgcgattgaccacgataaatacaaaaaagacattcttttgggcgcaaaggttttgccgcttttgacagttgacgagggcgatagaaacagaacttccccatttgcatttacaggttataaatttgagttccgtatggttggttcttcacagcctttgggatttgtaaacacaattatcaacgcacttgttacaatttctttcagagaatttgctaaggaaattgaaaactatgatggcgataagattaaaaaggcatacgaaatcgtttcaagagaatattttgcacacaagagaattcttttcaacggaaacggttattcagacgaatgggttgaagaagccgcaagaagaggtttgccgaaccttaactgtacggtaaaagcaatacctgttttgaaaaagcctgaaaacattgaatttttgaagagagccaaggctttgaccgaggaagaagtcgaatcaagatacaatgtaatgtttacaagatatattcaaaagagcaacattgaattaaacgttgcccgggaaatggtaaacaaacagattttgcctgcggctatcgaatactgcggcgatcttgcaaaagccaactactatggcgaaaaggtgggtattctcaacggtgtaacggttaaatcccagagagttatctcagaacttgcagacgaaattgacgctttgtgtgaaacacttgttaaaaatcacaaagaggcaatggaaatgcctacgcaggaacaacaggcaaacgctttgtatgaagtttgttcaaaagacttgccggctttgagagaaaaggttgattatcttgaaaccgtaatgcctaaggataaatggcctatgccgacatacacagatttgttctttgacttataataaaaaacaatatttaagggcgtcactgttaagcggcgccctttttcttgccttttcattaaatttttattaaatattcatattattgtatttattataataaaattttgtgatatactttaaacgatatatttattattcggttcggaggcacaaattgaaaagaaaattttctgctttactttttttaataatatttgtattttccggttgttcatccggcaaaataaccacctttaccctgccacgggaaactatgcctacaaattttgacccgcaaatagcgtcaaacccggaagatttacttgtcatagccaatatatttgacggattgtttgaaaagcgcaacggcgaaattgtacataacctggctgaaagctgtgatatttcatccgatggcaaaacctacacaataaaaataaagcaaggcagcgtatatcacgccaaaagctcaaaaagcgaatttgagggtaaagccgtaactgcagatgattttgtatttgcattgcaaagagtggtaaatccaaaaatgcactctccttacgcctccgatttttcaaatattaaaaatgcacagtcgattataaacggcggagatgtaaattctttgggcgtttatgcaaaggatcggcacactgttgttattcaacttgaaaacccggactacaactttatcgaaaagctatgtcttaccgccgcatacccatgcaacaaggaatttttcgaaagttccggcggtacttacggattgagcgccgataaaattttgggcaacggcccctttaagctcagttacatagacgatgccgccgcaaccttggtgagagttgatgacgacaaaacatacctgcaaagaataaggatagaaaaggtttcacccgacgaacttgctgcgtcttacgaaaatgaggatataagctgctattattccctttccgaagttaaaaaccctgcctccggcacctcggtaacggaatttaacagcatagtaaacacacttgtttttaatgcaaataaaacagagttaaataatgaaaacataagaaaggccttaggctggtatgcttacggatttgaaaattccggtgcaaacccgcaggcggtatcccctgcctattcgatttttccgggtacaaccgttcttaacggcagtttgataaatacacagtacaccgtacaaaagcgtgggtatctaagtgcagaaccgaaagagctttttcaaacagggctttcggagacaggtcttggaaaaattgaaaaccttacggtgcttgtacccggtgacagcgcatattcaataatatatgaaaatataaatcagctgtggcaaaaaaatttgggtgtattttttaagattgaatacctgccttccaatcaaataaaggcaagagtgagccggggagatttcgacatagcctttttgccgttaagcggcgaaaacgataccccatacggtatattggatatatttacaccatactccggccgggtggcaaactcggtagccatggctaaggcggacagtacaaacctcagtttaaattatataatcgacagcgaaaatacaataatcaattcagcattggcggtgcctatgggcagcgataaaaccacacttgtttacaggtcatcgttcagcgatatttatgccgacccatacacaggtgtaatcaaccttaaaaccgcaaaagcaaaataagtttgatacccctattagggtattttgcaacttgatatcataagttagtataacttattgttttaaatgacaaatcttgaaaatttgtcatttttttattgacaaatatacccccgggggtatataatatgattatgaaaggaaataccctatggggtatagtgagctaatgggtaatattgaaagaaaaaaccatgtcaacgacgacattatcaaaagactttcaaggattgaagggcaagtaagaggaataaaggatatgggcgaaagcggccgttcctgtaaagaaattctcacacagctgtctgccgtgcaaagcgctgttaaacaggttgcaaagcttgtaatgcttgaccacttggaacactgcgttgtggaaaatatccaagacggcgatatagaccttgaccgggctttaaaagatatttcggaagttgttgaccaattttcaaaaatgaaataattataagaaaggatgcatattatgagcacacacaagttatctatcacaggcattgactgtgcaaactgtgccgcaaaccttgaaaggcacattgcaaaaattgacggtctcagcaatgtttccatcaattttatgggagaaaaacttatatttgactgtgatgatgcaaaatatgacgagatgataggtaagataaaggctgttatcgacaaggttgagcctgacgctgttttgggcggtgataaaaaacctcggcaaacaaaagaacatcatcacgaacacaaccacgaacacggcgaagaatgtggttgcggtcacgatcaccaccacgaacacggtgaagaatgcggttgcggtcaccatcacgaacacggtgaggaatgcggttgcggtcacgatcgtcaccacgatcacggtgaggaatatggttgcggtcacgatcatcaccacgatcacggcgaagaatgtggttgcggtcaccatcatcaccacgaacacggtgaagaatgcggttgcggtcacgatcatcatcacgaacacggtgagaaatgcggttgcggtcatgatcatcaccacgatgaaccggacgaaaatgccaagtttgttaagtgtaaaacagaacttacagatgttgactgtccgaactgtgctgaaaaattgaaaaatgcaatcagtgaaattgatggcatttacaatgtctcggtaaatcatattcgggagcgtttgatttttgtttgtgaaagtgaaaaagccgaaaagttgattgacgaaatcaaaaaggttgctgaggacgccttacctgaggcaaatgtaggcgaaattctttcaaaagaagaaaccgaaagaccagaaatacactaccacgagcacggtgaaagttgttcttgcggccatgaacatcaccatgagcatgaaaaattttccggcagaagccacaaaatgagtatcacaggcattgactgcgccaactgtgcaggcaaccttgaaagacacattgcaaaaatcgagggtctcagcaatgtttctatcaactttatgcaggaaaaattgatgttcgactgcgacccggataagttccctgccctcttggaagaaatcaagaaatgcgtcgacaaatacgagccggatgcggttttgggcgaggacgaaaagtctcacagtcatgaacatcaccatgaacacggtgaaagctgttcttgcggtcacgatcatcaccatgaacataaagaaatttccggcagaagccacaaaatgagtatcacaggcattgactgcgctaactgtgcaggcaaccttgaaagacacattgcaaaaattgagggtctcagcaacgtttctattaactttatgcaagaaaaattgatgttcgactgcgacccggataagttccctactcttttagacgaaatcaagaaatgcatcgacaaatacgaaccggatgcggttttgggcgaggacgaagctgttcagtcccacagccatggcgacagttgctcctgcggacatgaccacacccatcgggaagtggatgaaagcaaaaagcagcacacaggttcctgcaaatatataataaaaggtcttgattgcgctaactgtgccgccgctcttgaaagacggatttcggaacaggttgactgcatctccgatgtaacacttacttttatgaatgagaccttgtcatttaatgtaaccgaaggcagcgaggatgacgccgtaaaagaaattcgtcgggttatcgacgacagagaaccgggtgtgacaatagaaaagttcacacaggaaagagaaaagaaaataatcaaaaagcctgaacacaaaaaagaaaagaagatgattcttttctctgcaattcttcttgttttggcaatagttcttaaaaatataatgccggagggcaccacaaactttatcgtcagcggtattgtatttatgatttcctactttattgtaggcgcacctgttttgaaatcggctttacgcaaccttaaaaagggtcagtggatggacgaacagttccttatggcaatcgccacagttggcgctatcggcacaggtgaattccaagagggcgttttcgtaatgcttttgtaccaaatcggcgaattgttccaggctattgccgttgaaaattcaagacaatcaatatccgaacttatggatatcagagccgacgaggccaacattaaagtaaacggcaatattaagaaagttccggttgaagatgtttatgttgacgatattatcgttattcgccccggtgaaaaagtacctcttgacggcattgttttaagcggttcttcaagccttaacacatctgcccttacaggtgaaagcttgccgagagatgtgcaagtcggcgatgaagtaatcagcggttgtgtaaatgtacagggacttttggaagtaagagttacaaagccggcttccgaatcaaccgttgcaaaaattttggatttgatggaaaattcatcaaaccgcaagcggaacacagaaaactttatttccgcttttgcaagatactacacacctactgttgtttaccttgctttgttcgtatcatttgttgttccgggtattatggctcggttgggcaacggcagttatctttcacttttgcctgacttcttccatcgcggtcttatgttccttgttgtttcctgtccttgcgctattgttatcagtgttccgcttacatacttctcaggtatcggcggtctttccaagaaaggtgttttggttaaaggaagtaactatcttgacgccttgacaatggttgacacagttgtatttgataaaacaggtacaatcacaaaaggacagttctctataacaaagattgacagcaaaattgacgaaaaagaacttatcaaacttgcggcttatgccgagtacaactcaacacaccctatctccgcagctattgttacatcttacggcaaagaaaatatcaatcctgcccttataagcaaggttgatgaaatagccggtcacggcgtaaaggctgttattgatgacaaagaagttttggcaggtaatgcaaaacttatggctacaaacggcattgaaattccagaagttgacactatcggtacggttgtatatattgcggtcgataaagcttacgccggttatatcacagttgccgacacaatcaagcctacaagcaaacgggctatggcggctctcaaagccaacggtataagaaatacggttatgcttacaggtgataacaagaaagtcgccgacgctattgcagaagaatgcggtattacggaagttcacagcgatcttttgccacaggacaaagtaagcgaatttgacaagataagcaaaacaggcaactgtgcttatgtgggcgacggcattaacgacgcacctgttcttgcaatggctaatgtaggctttgctatgggcggtttgggcagtgatgcagccattgaggcggccgatatcgttattatgaatgacgacttaacgcttatagcagaggcggttaagggcgctaaaaagacaagaggcattgttaaatttaacattgtgttctctattgcggtaaaggttcttatccttgctttggccggtttcggtataacagataatatgatgattgccatattcggtgatgtaggtgttatgcttttggctgtacttaacgccataagagcattgaattgatccgatatttaaaatttaataaacgctatataaaatatggcgactgctttaaacggcagtcgccttttatattgcttttaatattgattgtttatatttgtttatatttgattgctcattgtggcttgattttaatttatccctaccggctataagacaataatctataaggacgacagtaccttgttgtccctgtgcaagggaaaatgtcacgccataggcgtgacaaaagggttgtcaggcaacctgttcacatcaaatcccggctacaaacaaatattctcaatcttcacatcagccttggctccactgtgcaaggggagctggcggcgttagccgtctgaggggttgttttgcaattttaaaccgatgacggttttacagcggaaagttatttcaaacaaccctcccggtgttcgctgaacgcacacaccaccctcccttgcacagggagggcaagttttgctgtctgctcggcttgttattttatagaggaaaacaaaactaaagcgtttgtttatacaatctctcagtcagctgtcgctgacagctctctttaccaaagagagccttgctctgtggattatttatatcaaatttcggctacaaacaaatatccccaatcttcacatcagccttggctaccttgtacccatagggcataataggtgtcaacaccttgttgtccctgtgcaagggaaaatgtcacgccataggtgtgacaaaagggttgtcaagcaacctgtttacatcaaatcccggccacaaacaaatatatttataaaataaatccgtaggggcgttcattgaacgcctatgcaaaccgcaggtttgcacataaataatccgtttacatcaaaccccggctacaaataacaaccccaaaaatcaccctacaaccccaaaatcaacaaatcaaaaacaacttagtctataatatctttcacatattcttccccggcatgcaaaactttctcgccggttttcttggcatttttcatcattcgtgtggctttgcggttgtccgcaaggcaaactgcccctatggtaacggcggcggcgcccaaaattgcacccaaagccatatttcttactgtttcttctttttcataattgcacatactaacacctctaaaatttatttgttagtatattgcccttaaaagcgccaaatatacggttaaaagtaaaattttcacaacaaaacacccccggaccgtcgggtaagtccgggggtgtaattcagtcaattacaaattatgcaattttaaaaatcgcttaatcagtcttctttattcttttttctcaaaagaacaaacaagcaaatcaatgcaacaacggctataacaaccggaacaaccgggaatgaagaacctgtctgttcccgtggctgtgaagatgcagaacttgaatccgcaactttttctgctgtgcgcacgatagcgtagcttgagaagtgacctgttgagattatcatataaccgtcaacatattctgaggcaaccgctgtaagtttgccgtcgccgcctacatagtaaacagtgtattcgtcggctgatacgccttcggcaggtgtaaacggaactttaatcgttgcaacaccgccgttaaagtttgctatgtacttgccgtttgaataaatctgcaactctacaacaacagctgtatcgtagttatccaaggctttcttttgtgcctctgtaaggcttgcaacttctgtcttaacagcacgaatttcaatgctgtcaccctcggcctgtgcataaacggctttaagtgtttcgttgtcaagtttaacagtggcgtctgtaagttcaacaatcaagtcggaaccgttgtccataacagccttaactgcgtcttttgcaatttcagtgcttgttacgctctcgcctgttgcgcttgcaatcggcaatacaaccgcttcgcccttttcgcctttaacttcgtcgataaggtctttgtcaactgttgccttttcgtcagcaacctttacattttccttaactgcgcttacaacttcttcgctccgctttacatcggcaacagatgtgtcagcctttgtggggttggcgttttctttggttgaagatgtattgcttgaagatgaagaattatcctttacggctgttgaaccgctgttagacggtcttgttgctgtacctgtgcttgctgtggctctaacaggaatttctttctgccatgcgccgccgcagtaatcgcaaatagcctgctcaatgcctgcttctcttgctgttgcggcttttacaactttccattcgccccagtggtgtcctgttgcgcctattacaaggtctgccgccttaacttcgttcttgccctctgcgtctgtaaacagcttaccgcatctttcacattcgtaatgagccttaacgccgtctttttcacaaccggcggctacttctgcaacaaactttgtcttgtggtttgtggcgtcaatgtcgattacaagagtattcttatctgtaacttcttttgtgcctgcttcgtcctcatagagcttgccgcatgttgaacattcgtagtatgctttcatgcccttttcggtgcaagtagccttaacttcttcatgttttgtcatcttgtgaccaagagcagaaagtttgatttcgtctgcacttatctctgttgtaccctcggcatctttgtatgtcttattgtcatgtttacatgtccaatattcaacattgccatcctctgtgcatgttgcagctttggcggctgtgtgttccatatcgtgaccgagtttttcaataacagtctttgttatttctgttgtgccctgctcgtcactgtatgtcttaccacaagttccgcatttccagtatgctacattaccatctgttgtacatgtagcgtcaacggcctctgtatgggtcattgtaccgtgtgtaaggttgtaaaccttgtgtggcgtttgtgcctcattatcggctttgtattcaaatacacacttaatctgtggagctgaaacaacattgtcattaacacattctgtgtcgataaaattcaatgattttttactattatctttaaatgtaatagtagtattctcatctatttcaagatttggaattttattttctctttcatcaaggttaataccataccaagaatttacacctactgtaacattgaattttccactgaccttaacagatgagcctgcaattatcaacggtgcgccactaccagatgtaccatgattaatagtaacatctgtcaattctacaagactgctgttataaacattaagtgcatgcttatttttactgtttgttgttattttaacattattaaacttaacggttccgtccgggcaattaacttgcacaagtgatgcattgttgccatcaccattaaagtttttaccggcaaatatacttttaccctgcccgtcaatggtaacaggtttagtgatattaaacaacttatttaatgtagctgtcttttcaagttttatagtctgacccggttgggcagcagcataggcatcttcaagtgatggataaatagtgtcgtctattgttgcagcaataatttgatttagcgtgtaatagccattaacagatttccatgcatacccatatggcgtaaaagaagctccgggttgtttattgaatttaccacctttaatatgtatattttcaggtcttgcattgccataccgccataccataccgtcacgtcgtcccgaaagtgtatacttatttatgaatgtaccgtcatttacagtcaaatcgccataatttccattaaattctccaactactaaaacatatgggcttttccaatttggttttgtagctgattgtgtaaacgtaccgttatttatagttgctttaccataaaccaatattacagctggatagtctccttcatcaggaaggtgagtaagttcaaattgtccaccatttatctctaaaatggaattttcttccgatttaacaacatttaatccaccggtataagtaccgctgtatattttcaaattgcccagaaccctgatcattgacgagccgtcattaccggctgttgcggtaatattttccaaagtagccgtacctataatttcaatgttgtaatacgatgcaccgcccttaactgaaccgttcttaattgtaacggtagcaccatttgcaacggttattgtagctttaccggcaccggtatttgtcaaagtcttttctttaagatcaagagtaatattcttgtcaatggtgatgtcttctgttgtatcattgacaagagtaacagtctgaccggccgtagctgcatcaatggctttttgaagagacggataagcaatactatctatcatagcaacattagacccaggcatcggcccatctgttgggtctggtaatcgtgcctgtctcatcatccgaccttcgctgttctcatcgctctgtgaccgaggttcattagtcttctgttcgtcagacttttgtacatcagccttttgttcgtcagacttctgttcatcagacttctgttcgtcggacttttgttcatcagccttttgttcgtcagacttctgttcatcggtcttttgttcatcagacttttgttcatcaacagtctcgtcttttttggtttcaactatttgagtttggctgtcggaaccggtctcgccgtccgcaaatgcggcggtaggaaccatcgagaaaatcatgcttaaagccagaatgcttgccaaaatttttcttttcattgacacttctccttttcaaatttttatggttttagatgtcaaaatttgcactttacccgactgcccataaatgggcgtatggtaaataatgacatttatgtacctatctatataatatacaccaactatcgacctgtcaagtaggagtggtaattttgtctgcttttgccgaatttgcccgaaattttttatctttttgacggcaaaaaagatataaaaatcaagccgattatacatgtttcaacccaagagctactccgccggggtaaatcgcccctaagattgatatttttttatcaatccccgctattttgggctttaaatatagctatttgtaaccgaaatttgatataaacaatccacaaagtaaggctctctttggtaaagagagctgtcagcggtagctgactgagagattgataaacattttgtttacatacgatattgggttgtaagttcgagtacaaattaggttgtcttaccaaggtcaatccctccgatttttctaacgaaaaaccacctccctttaccaaagggcggctgtgttgtggatttttggggtcgttatttgtagccgaaatttgatataaacggattgtttatgtgcaaacctgcggtttgcataggcgttcaatgaacgcccctacgatttaa

SEQ ID NO: 3874 - DNA, 12370 bp, Unknown
  16S sequences of unknown bacteria
tacttgttatgttacccctctctattcttcctgtccactttttatgctaacaccacagcatcattttcgaggcatggtatacggaaacagaggataccgaaggaacttattcagaagaggaaatcttaaacgaaggatacattatcgatcatggtgacggcacttacacgtttcatcttggtgatcaatctatgccactcgactccccgcacattccagggtttgaagaaataaaaataattaaaaagtgaggtgattattaaatgaaaaaaatacttattattttgtgcttatttatactttttccctctaattggatcattcacgcatctgttcaatatccctcagaagaaatatgcactttagcaaataaattagaatggaaatatgaaatgatcaacggacatctttataaaagattatataatgctactttacaaaaatgggaaaccgattggatcttagtcaaatgatatcgtttagatcaggttgaatgatgttcatcatcggatgatctaatgaaaaaagcaggcagatttatcgtgatcgcgcttgcttttttttggcggtcaaaaccgattgcatttgtagtttcgttcgtttaaaataaaatcgtaaggagtgatgatcatggcagaaacccatctcaccaaaagagaaaccgatgccatggagatattctgggctcatgatgaagatctgtccgccagagatattcagcaatatcttcccgacatcaccgtcaattctattcagcctgtgctgaaacggcttcagaaaaaggaatacattcacgtttccggtttttctcagcataccaaatcgctgatgcgggtctatcgcccgttggtcagcaaggcgcagcatatcgtttctttgatggaccagcacacgtcgcaggagatcctcctgctcatggtcaagcagtgcaaggacaagactttcctcgaagagctgcaagggatcattgcgaaaaagctgaagtaaccaaggcgctgaacaaaatgaaaacaggcagatcacacggatatccacgtgtgcatctgcctgtttttgctcgtttgatcaataggtcagcgttttgatcttctcccaggagaactggggatcgccgaagtgtccgtaacaagacgtcttggaatagatcggcttgcgcagatcgagttcttccaggatgttgcctacctcgaagttgaagttgtttcggatgatctgcagcagctcctcatcgctcttcactccggtgccgaatgtatctacgcacagggagaccggttcgctcttgccgatggcataagcgacctgcacctcacagcgttcagccagcccgttggccacgatgttcttcgcgacataacggcaatagtatgctgcgctgcggtctaccttggtcgggtctttggaggagaagcatcctccgccgatgcggcccatgccgccataggtatcgcagacgatcttgcgtccggtcgtgccggaatcgccgaagcttccacccacgacaaagcttccgctggggttgatcagaaaccgcgtgcgctcatcgatcagctccgcttcgatgcagggacggatgacctcgttcatgacgatctcgcggatctgttcctgcgacgcctgcgcagaatgctgggtggagacgacgatggtgtcgatccgggcgatcttgccatccttgtactccacggaaacctgggtcttgccatccggcttcagcagcggattttcgcggcgcaccttggtcagctgacgcgccagcttgtgcgcataatagatcggagccggcatgtattcatcgctctcattgcaggcatagccgaacatgatgccctgatcgcctgcgccgatcacatgatccgcatggttgaccgcatgatggatctcgctggactgcttgttcacccggatcatgaccgtgtactcttcctcgtaaccgatcttgcggatcacgtctttcgcgatctgcgcataatcgatatgtgccttggtgtctgcctctccatagatcagcacgaagtcgtccttgatcgtggcttccaccgccatgttggaataaggatcctgacgcagcgcctcatccaggatggagtccgcgatcttatcgcagatcttgtccggatgaccttctgtgatgctctctgatgtgaaaatgtagtctttcattccgctctcctttcgctatttcataaaaaaatcttcccgcgacagagaagatgaccgatatctatattctcttatcgctgtcagctttaccaccttatatgatgcgtcatacaggttggcgtggggtcaaacgagctgactctctcacccatctcttgataaatagcaggtatattaaagcacacccttatccaaaaagcaaccataaaacaacggatcttgcgatcgctgtctcctttccgccgggaagaagttcactaatctcgttttgcggctataatagagaatgaaagtgaagaacaggaggaatcgtgatgaacgtactgatgatcaatggcagcccgcgggtaaacggcaataccgccatcgcgctgcgggaaatggaacagatcttcaagctggagggcatcgactgcgagtgtgtgcagatcggcatgcaggatgtgcgcggatgcattgcctgcggcagctgtgccaagaagggaaaatgtgtgtttgacgatgtggtcaacgagctggcgccgaaatttgaacaggcggatgggctcgtcatcgcctcgccggtctattatgcgtcagccaacgccacgctgatcgcttgtctggaccggctgttttacagcacctcctttgacaagacgatgaaggtcggcgccagcgtcgccgtcgcccgcagaggcggatgctccgcaacctttgatgagctgaacaaatactttacgatcagcggcatgccggtcgcgtccagccaatactggaacagcgtccatggcagagaggccggacaggcggcgcaggacgaagagggactgcagaccatgcgcgtcctggcccacaacatggcgtttctgatgaagagcatcgagctgggcaaagagcagttcggcctgccggtcagcgagccgcatgtgttcacgcacttcatccgttagcggtcacagagaacggcatcatccgaaaaaaaagcacagtgtaccccgacagatacactgtgttttttcatgcgctgatctcgatcagcttcagctcttccagcagatccagataatcctccagcagatgacggcatggcacgccgctctctgcttctgtacgcgcgatgacgccttccctgctcatcctgccgtcgatccaatatacgcagagcacttcgcacagctccttctgtaatgcgccggcatggcgtttctcataggccatgactttttccagcgcgtccgtctcttccagaaaaagctcgcgcagatcatgcagcggcgtgcggaacgtgcgcacatataccgaagagctgccgtcatcctgcggcagttctgccgggcacagacggcagatccagtcgatctgttcctggatcccctgcgcatccgggcaaaactgcgtgatgctccgtgcgcttcggcaatgatgatccttcagcacggcgagcatgtcgttcagctgctcttccgtcatctcctcccgcatggcatggcggaccttatgttcgatctgcttcatcagatgtgtgcgctggtgcaggaagatgagccggacatcctccttcttcatgttgcacagcgtatagacataagatgccgcgaagaccgtagagaacttcagcacatccggatcgatgcgggacaccgtgtcgctgctcgtatgataatacagatcgggcatctgccccagcatcacgcaggggatgcggacagatggatcgctgaggatatagtgatcgctgcccagcacgaactcttcttccttggtcatcacgttctggatcaagacatcttcccggcaggcagcctgcgcttttatttcttccaggagcagggaacccagttccccgcatatggatgtgcaggcataaggaagatgggtcagggtgatcggaccgttgatgtcatcttgtctggcgccgatcatgtccaggttgatggcggcgatgtcgtctgtccatttccggccgtcatacagataatggaatgtcccggtgaattccggcacgaggatcatcttcacgcctttatccaaaggcggcagctttcctttttgaacagcgtcatgcaaggcgatcatcgtctccatcgcaccgctcacgccggatgcgttgtcattggcagacgcataaggatgacacagatgcgcgcagatgagcacgttctcctcgctttgtccgggcagatgcgcttccacgacctcgatgcttccttcatggatctcagcgtcgatccaggcttctgccttgggataaggcgaatcacattctttgcgtgcatagcgttcccgctgcagctcgcatgccgcatgcagccgggcggaaagccgcggcgagatgacaaagccaaatgccttgtgctgctcatggtaatcccaccagaagccggtatagtttacggtatccggcagatcctgcggcgagcggtaaaaatcggtctcattgagataatcagaaatgatgcccagcgcgccacggcgttccgttgcccagcggtacttcttcacctgctcatgcgtaaacaggatcttcccttccagatcccactgcgcatattcctgctcgctgctgccgcgagtcatctccacgatctccagaggatgaccgcggtaatcacaggcgatgctctgcgtgatgatctggatcggatcatcatcataatctgccagatcgagggcaaagggctcgatcagccggcatgcgccgccatgacagtcccactggggaaacagccggtatgtccccgcataagcatgttctttcatcgggtaagaaagcacccgcgcatcgatgccgtggctgctgagcgtccgcgcgcacgcatgggcggcttccctgtagccttccgtcgtctggatccgatggtgtcctgccgtctcattcagcatccgcatcagccgcttctctttgatctcttgtttcaatatctgtatcgtctcttgcatacgatccctcctgctgtttgttattatcataacgcaatgacagagagaaagaaatcctttcttcctcctgcatcaaaaacagcgaggatattccccgctgtttttgatcatgagcgttccaggaacgcttcgtcgttttctttctcttcttcgctctcgtcctcttcgatcgtctcaggtgactgcggcgaacggcagagcacataggccgtgatcagcgaagcgatcggcacagtgagcacgatgcccagcgatccgcagatgccctgcgcgatctccatgctcaggaagttgctgttgaacagctgattgaactgcacgtcataggaaagaaagacgagcagggtcaggaaggagcttccggtgaacgccaagatcagcgtattgcacatcgttccgatcatatccttgccgatctcgatgcctgagcgcaaaagctctcttgaggtcagcgcagtattgtggcgatacacctcatacagcgaggagacgatggacatgccggtatccatgatggcgcccagcgaggagatcagcacgcccgcaaacaagatgtccttgacgcgcaggcctgtggattcgccgatcaggatcagcccttcgctctcttctgcgctgaagccgtccagatgcatcatattggacaggatcaaaaagaagatcagcgatacgatgacgccggccacggtggacacgatggccgcgtaggtcttcttgctctggccattgagcagcagcagcgtcacggtgacggagaggatcgcgcacaagatgctgaccgcgatcggagaatatcccgagaaaaccatcggcagcagcacgcagacgaccagatacaggctgtatgccagaccgaggatcgccttcacgcccttgcccttcgcgatgagcacgatggccaggatgagcacggcgatgccgaatgccatcgggatggagcggtcataattgtacagcgtgtaatatggctcgatcccttccggctcatcgacattgatgatgaccgacatgccctcgctgacttcgcactggtgcgtattggagacatagttggtcacttcgatctcttctccctggtattccccttcatccagccggatgatcagatcctgcgtgcccacgttgatgtcaaggtcttcttcataggtcaggttttctgcagtgacctgcatgaccgttcctttcacatattccagcgtggtgctgttaaagcggctgtatgactccatgccgtatgtctgaaacagcatagcgccggcgatcgtaagcaggatgatcacgatcacccatcggttatctctcagtttctgcatttcaagcatccttcctaaaaaatgaaatcaatagcgaagagctctccccgctattgatcgtcgtgttcaatctgtatcgcgcagactacgctttgcgtcggcgtgcggcaatcgccacaccagctgcgcccaggatgagcgctgctgccgctgcactcgtgcctgctgctgcggtgtcgacgtcgtctttgccatcggccggcttctgctcatcatcgccgccctggccgttgtcttcgcccggatctgccggatcctgcgtggtcgctgcgtcatatgcgctctgcagtgccgtatatgcttcgttcaccgcatcctgcgttgccttctcatcggccagcacgctcttggctgcttccagcgcgctctgcagtgcctgccactcttctgccgtgcagtctgcctcactcacctgctctgccttctccacaagtccttccagctcgctcttgtctgtgtcgatcttgttgatcgtgaacgtatccagcacttccatcgtatccatgtagtatgtcgtcatcgtgtaggatgtatccgtcacatcgatgtcggtgatcgtccggcggtagctctgatccatcactgcggagtatgctgcttccggcgccttgatgtcatagtacttacttccgctcgcggagttcgcggtcagatacagcacgccttccggattcgtcacttcgctctgcacgccctgggaatcatccggcgtcgtgccattcatcatgtatgttctcgtgtatacgtggtcatggcccatcagcaccacatcgatatccagctcgctgaacatcggcggcagctcttcgcggcgctcgatgatgtcgccgtcatctacgtgggatgccgtggagtatacagagtggtggaatacgaccgtcttccatctcacatccggattctgcgcgatcgcgctctccaggaattccttatgctctgccgtagagcggttgttggagttgatcaccatgaacagcgtgttgtcatagacgaaccagtagtccgttcccgctgtcgtcgcaccgagctgcgtgctctcattcggcaggttgaagtgctcgttgtatgcggcagatccgctgtcgtggttaccgatcgtcgtcgcgctcgtcagataggtcagcgcatcgttcaggtagccggtgtactgcgtctcattgttgttggtgttgacctggtcgccggcagataccaggaaatccggattcagctgtgcgatggccgtatcgagcgtctcatcccagcctacggtatcggtctccgtattgcctgcgccgatctgcgggtcaccggcgaggatgaagctgaagccctcatcgaagtcaccggtctcaaaggtatagatctggctgacggtgtcgccattgaccacgcggtacacatacgctgtgttttcttccaggttggtcatggttgcctgattgctgtagaatcctgcatcgttggtggcgatagaagtcgcagcggcttcgttatactgtgccgggaacaggccgtcctgcatatcagactgctttgcccactgcacgctgcctgccgtatcgacattcgcataccaagtcaggtttctgcttgtctcatctgatccgaccatcaggatcactgacttctgcacggtctcgaacacctcattgcggttggcgttcaaggattcgaactcaaagtagatatctgagcttgtctcgcggtcgttgtgcagttccacagcgatcacgttttcgccctcgacgagatattcctggcactcctctgcgctcagtgagatctcgtgttcctccggcgcaccctgtccgtgaccggaataatacaggttgtccccatcaggctgtgcgctcagattggagaatacctcatggccgttgatgtagacggccgcttcatcatcgctgtagaatgttccgctcagcgaagtgatctcgctgatattttccagcgtcacgctcgtgcggaagaaataggtcggaatatctttgttttcctcataatactgattcagcagcaccgtcggcatatagccgctcacatccgcaagttctcctctctttgccccgaacttgccggctgcttccttccatgcgctgtcatcaaatgtgcccagcgtccatgcgttcagcgcgcctccggctgccggatcagtgttgtcatccagatatttccagctggttccctgatcgatcatgaccgtcgtatcctgcgcttctttcgtgtcctgcacttctgcatggaccggcgtaaatggctgtgtgttcatcagcacgcttccgcctcccaggatcacggcaagtgatgcaagggaaagcttcgctgcagtgttctttttcatacctctgctcttcctcctgtttacacgccttattttagggaatccaaagtcaaaatcaatagaccttacaatgatttgacaatttaaaaatgttcgtaatatttatgacatatgcacgttaatcctttgttatatccatgtaaaatctcaaggtgtctgcacttctgccaggaataaaaaaagccccatacctttcggtacgaggcaaaattattgattcaattagatgctgcgatctcccagcatactaatcttaacacctacaaggtcggactttcagtaggaaaagtgtcggtattttgtcggacttttatcggactttctaaatttcataacccattgtttcatcttctctcgcagttgccagaaactctttcagcatgggaattgcattgccccacagggacaacccaaaaagcataacagcttcttttttgcggtcataatagatgctgcgctccatatccattatttccagcatctcagcttctttatacttaaatctgctcaaataacacttggagagtatctcacaatataaatctccccgacaagggtattcccgaattcgtcccatagcattatccaccagttcaatgatccattttgtttcaaacaggctccggattttttcttcaaaacgttctcttgcttcatcaggagcaaaggtttccagataaatcagtgctccatccaaactggtaccacaggtacaaatcaaatcatcatagacttcttctgctcttcccattgtagaccagcagacatcccgataaatggaaagaatcagcctggaacggtcatacaaaactttttcatccacttgctgcatcctgcacatcatacgaatgctatgtaaagcctgagtattattcctgctcataaaaaactcctttcggttctatttcatatacaaattcctttctaagtccactttcagccaaagggaaagaaaatgccgaagcatggacagaataaccagtacatatcatgttcaaactgtaagacacaatataaaaaccagaagttacagtcggaacttattgactaattgcaacttccgatatataataaaagcgaagttaaacttctgtttccaagttctattatatctattttcagaagtttgtcaatgaataatcggaagttacgaataaataatttcatagaaaggaaggaaaggacatgacatttggcgaaaaaataaaggaggctcggttggcaatgaatctttctcagacagaacttgcccagttaaccggaatctctgaacgctctctctacacctatgagcagttgggaacactccctcgaaaaagcaatatcagaaaattggcagaagccttgcatatatctgtttcttatcttttggacgatgaggaaaccgacaaacaaagccgtatagatgaagatatgttcctcgctgaagcacgaaagcagtttggttccaaaggtgcaaaggaagctcaggaagtattgggacgagtaagttctttgtttgccggtggcgatctagatgaagatgccaaagatgtgtttttccaggcgttgatgtcggtctacatggactccaaaaagaatgcaagggaaaaattcactcctaaaaaatacagaaaacataagcaaacggaatagcagccattaagtcagacctcactcgcagataactgttttctgtgtccgattgggaggtgaagcaagtgagaacggcagcacgcattattgaaacagttgaaaaactgataaaaaaatatgacaccagagatccttatgagctttgcaaatgtctgggaatcaagatccatttttatgatatggagaaaaaattaaaaggatttttcttctatcagtccagacaaaagaatattgttattgacagtaatgtgaatgatatattggaacgtatcttagttgctcacgaattaggacacgctgtgcttcatgctcagattgccatgatgaaaggatttcaggaaatggaagtattggatggcagctcattggaagaagatgaggcaaacttctttgccgcagagttgctcttagaagatagcgaagtattagagcttttgtccgaatactctttctttgaaaccgcaaaacagctttacgttcccgcagcactgctggactataagttcagccttctgcacgaaaaaggtgagctggtaaatcccatgtacatccggaagtcagatttcctgaaagatgatcttggagattatgacgatacaaaccattttgaatacgaataacagggggtgtttcaaccatgttagataactctaaaataacaagtacagatgagctggaatttgctgtattctgtatcgaaaatattgccattaagctgggaaaaaatgccgaagaagtttatcaggcgttgactgaaaaaagcgatatcttgaatagttatatcgtaccggagtatgagatgcttcatacccaaggtaaggactatatcgtagatgatatcatcagcttaatggaagaaaggggtatccaattatgattttatatcatggctcctatctggagattcaaactccggatttattacattccagagaaaatgtcgattttggacgtggcttttacacaacacctctttacgatcaggcagtaaagtggtgtgaaaaattcaagcgtcgtggcaaaaacggaattgtttctcgttacagttttgaggaaaaggcttatcaggaacttaagattttgaggtttgaaagctattctgaagaatggctcgactttattctgaaatgcagaactggaaatgatagaacagattatgatatagtgattggcggtgtcgccaacgataaggtatttaataccgttgagctttactttgataatctgattgacaaaaaagaagcgatccgccgcctgcgctatgaaaagcccaacttacaaatatgtttccgaacgcagaacgctcttgatgagtatctgcactatgaggggagtgaacagctttgaccgccaatcctattttattacaaaaaaaatatgcccgaattatcgagcaattttcggaaaaagaaaacctgtccttggatgatgccctgagattcttctatcgctcaaccatttatcgtctaataagtgaaggcgtgtctgatctgcattgtatgagtgatgagtatttgacagaggaactgattttcgagtataaagagaaaaattaagatggttccaaatttataaagcagacctgtgccgagtttatcaggtctgcttttgcttttgaaaagtaaaaccatcttggtatctcacaaattggcaagcagtgtaaacctgtacaggttcactcattttctcgaatttccctttgggtcattcttcgcaaatttgcttgttgggggagcatccccaatcccctttgaacgacatcttcaatgtcggctgcaccttcggttttagagagtatatttttaatggatcaccgattcgattttgtgttatgaatgtttctaagatcgccaaaagaggtgggtgttgtgctgatttacacattttccagacaccgagaagtatatcaaatttagaatttttgaaaaattggagaaagtgttttatagaacttgtcagtgaagtggtaaactaaaactggacacaggggtgcaaaaactggacacgatgatat

SEQ ID NO: 3875 - DNA, 5316 bp, Unknown
  16S sequences of unknown bacteria
cgatcgtcaaaagcctcaaaagcccgttcagaaggctcccgaggcaaagcccgaccccaaggccgagaaggaatttgaaaaggcttatgaaaaggccaaaaagaaagaaaaggtccacgccgagagcgtcgctcccaaccgcggccccggcaccgtccgccacatcgacacccgtacctctcaggtcgagcttgacaagtacaacgaaaaatacaccaatcttgctcccgagcgttccgaccgcgatacctcgggcagaaagcagaagataaatcagcgttccaaggattaccgccgctcgaagcagcgcaccaaggtggagaccgaggccgacaagcttcgccgtattcagcttgaacgcatcaaaaagacccccattaaggtcaccatcggcgacgaaatttcggtcagcgagcttgcaagccgcatgaaaaagaccgctgcagaggtcataaaacagcttatgaagttgggcgttatggcgtcggtcaacgaaattatcgactatgacaccgccgcaatcgtcgccaccgaaatgggcgccgttgtggaaaaagaggtcgttgtcaccatcgaggaccgcataatagacgacacggtggacaacgaggaggatctcgtgcccagaagccccgttgtggttgttatgggacacgttgaccacggtaagacctccattctcgacgcaatcagaaagaccaacgtcacctccaccgaggccggcggaattacccagcatatcggcgcataccgcgtaaaatacggcgacagggacatcaccttcctcgacactcccggtcacgccgccttcaccgccatgcgtgcgagaggcgccatggccaccgacgttgcaattcttgtcgtggccgccgacgacggaattatgccccagaccatagaggccataaatcatgcccgcgccgccaacattcaaatcgttgtggccattaacaagatggataagcccggtgtttccaccgacaagataatgcagcagctcaccgagcacgagctcgttcccgaggagtggggcggcgacgttatatgcgttcccgtttcggctcataccggcatgaacatcgacaagctgcttgaaaacgtgcttcttgtttcggatatgcttgagcttaaggccaaccccaaccgtcccgcaaagggaactgtcatcgaggcgagacttgacaagggccgcggccccgtcaccaccctgcttgtgcagaacggaaccctcaaaaacggcgacattgtggttgcgggaacggccgtcggacgtgttcgcgtcatgaccgacgacaagggcaacagagttaaatcggcaggtccttcggtacccgtggaaatcaccggtatggccgaggttcccgaggccggcgacgccttcgacgccgtaagcgacgagcgtcttgcccgtgagcttgtggagcagcgaaaagccgcagccaaggaggagcagttcaagtcatttaagaccgttacccttgaaaacctcttcgatcagcttaaagagggcgacgtcaaggagcttaacatcatcgttaaggccgacgttcagggctcggtcgaggccgtccgtcagtctcttgagaaactttcaaacgacgaggtcaaggtcaaggtcatacacggaggcgtcggtgccataaacgagtccgacgtcatgcttgccaatgcgtccaacgccataatcgtcggatttaacgtccgtcccgaccccgttgcccaggcgggcgccgagcgcgacggagtggatatgcgtatgtaccgcgtaatttatgactgcatcgaggaaattgaatcggccatgaagggtatgcttgctcccaaattccgcgaggtcatacagggaagaatcgaggttcgcgccgtttacaagatttcttcggcgggcaccattgccggctgctatgtttccgacggtaaggtcacaagaaacagccaaatccgcgtcgtccgcgacggtattgtcgtggccgaggataaaatcgattcgctgcgccgctttaaggacgatgtcaaggaagcggcacagggctatgaatgcggtataggtcttgaaaagttctccgacattaaagagggagatattttcgaagcctttgttatggaagaataccgcgactgaaattgaggtgaaaatattgccttctcaaagaataaacagaattaacgaggatgttaaaagagagcttgcggacattttccgcactctcaaggatccgcgcattgcaccccttgtgtccatcgtcagggtggaggtgtcgggagatttgtcctatgcgaaaatctatgtcagcgctctcggagccgaggacgcgacggaaaatactgtaaaggggctcaaatcggcctcgggatatataagaaaagagctgtccgaacggcttcacatccgcaaaactcccgagcttaaattcattgccgacggctccattgctcacggcgccgacatttcaaggattttaaaggatatagaggactaaaatgaaaattgatttggaatttgcaaaaaaactccttctcgagcgggataacttcaatatttttctccacgcaagtcccgacggagacacggtgggaagcggctttgccctttgcacggccttaagacggctcggcaaaaaggcaaatgtgctgtgcagcgacgaaataccgaagtcctattcgttcataaccgacggatacgtgtcttgggattttgagcctgagacccttgtttcggtggatgttgccgatgcaaagctgctcggaaaatatgagcaaaagggctcggaaattctgctgtcggtggatcaccacgggctcaacagggagtttgcaaagtacacctttgtggacgcttccgccgccgcaaactgcgaaaacattttaaagctcttaaaggccataaatgtcgaaatcgactcctatatcgccgcttgtatttatacgggaatttccaccgataccggttgctttaaatattccaacacatctcccgaaagccatattatggcggccgaaatgatgggctacggtattgatttttccgaaataaaccgcataatgttcgataccaaaacaagaggacgcatgaaaatcgagggccgtcttatggaacagatgaaattctttttcgacggcaaggcggcttttatcgccgttaccgaacagatgaaaaaggaagccggcgtgtccgacgacgaccttgagggaataacctccatgccgagaaaggtggagggcgttcttgtgggtgtcaccttcagagaaaaggaaaacggcgttttcaaaatttcggtgagaacccatgcccccgtcgacgcggcggagatatgccgaaaattcggcggcggcgggcataaccgtgcggcgggctgcgccgtcgagggcatgacccttgaacatgcggaaaaggaattcgtccgcgttatcggggaagtgctctgatggccgacggaattgtgctcatagataagcccgagggctttacctcctttgatgccgtcgcagttatgaggggcgctcttcacaccaaaaaaatcggccatacgggtactctcgaccctatggcgacgggtgtgctgccccttcttgtgggcaaggccaccaagctttgcgacattatgccggtcaaggacaaaaggtatgttgccgaaataaaattcggcatgaccaccgacacccttgacgttaccgggaaacttaaaaaggcggtcgaatgtgacgtgagcgaaagggagttttgcgaaatactgcccgagtttaccggggagataatgcaggtcccgcccatgttttcggcaatttccaaaaacggagttcgcctttacgagcttgcgcggcagggaatcgaaatcgagagagaagcccgcccggtaacggtctattcccttaaaaatctcggaaagaccgaaaaaaactcctttgcccttgaaatatactgctcctcgggaacctatatccgcacccttgccgacgacatgggacggcggctgggtgtcggcggatgcatgaaatctttaaggagaacaagcgcctgcggctattcgatcgaccgctgcattccccttgaaaaggcgagaaacatgacccccgagcagcttattctgcccgttgacacggcggtggaaagctttcctcgggtgagggtctcggcggctcaggccaaaagattttcaaacggaggacagctcagtctcgaccgccttaagcttccgaagaatcccgagggtatttttgccgtaacggacggcgaaaaaaccgtcggtctcggtgaagtgtgcgccgaaaagggacttctcaacatcaaatgtttgttttaaggatttaaaatgcagattttaaaaagcgtacaggattttgataaaaatttatgccccgccgtggctgtcggcacctttgacggagttcattccggtcataaaaaggtgcttgaaagcgcagtcttgtcggggcattttcccgttgcacttgtcataaacagaaaaaaggataaaaacagccctcccgccctcacaacaagagagcgcagaaacgagcttatggcaaatctcggtataaaatgtatccttgacattgattttgaggatatttattttttgtcgccggaagaatttgtcgaaagagttttggtgaaaagtctcggcgccgtaaaggtgtcctgcggctttaattttaaattcggaaaaaacgccgccggcgatacggcggttttagacaccctttgccgtcaaaagggaatggaacttggggtcatttcggccgaaagctttgacggaaagcctgtttcctccacccgaatacgaaaggcaattgaatcgggaaaggttggtaccgcggcaaagatgctttcaagatacttttcctttgattttcccgtggctcacggcgacagaatagggagaaccctcgatatgccgacaataaatcagatttttcccgagggatttatacttccgaaagagggggtatacgccgtcaacgtgaacatagacggtgaaaattataaaggggtctgcaacatcggaacccgtcccaccattcaccgcggcgaattccgcgccgagaccaatatcatcggattttcgggcgacctctacggaaaaagaccgagagtaagtcttgtaaaatacatcagaaaaacaaaaaaattcccgtcgctttcggaacttcgagccgaggtggacaggaatatcaaatataccgaacaacttgaatttgagggtgatttgcttggataaaaaacgaattgtcatcaaggtcggaacatcctctctgacctatgaaaacggtaaactcaatctcggaagcatggagcggcttgtcaggattatcgcc

SEQ ID NO: 3876 - DNA, 22895 bp, Unknown
  16S sequences of unknown bacteria
ccggaaatcggcctgtactgggagaaggccgcctatgaagaggcggaacacgccgctaaatttgccgagttgctcggcgaagtcgtaaccgattccacccagaaaaacctgcagatgcgggtagaggccgagtgcggcgccaccgagggcaagatgactctggcccgccgcgcgaaggagctgggctatgacgccatccacgacaccgtgcacgagatggcgaaggacgaagcccgtcacggcaaggcgttcgagggcctcctgaaccggtatttcaaataagataaaaccgcataaataaagggctttcggggtattcaccaattcaggtggataccctttatttttgtccaaaattgaggatagtgtgtaatttggcatgaatttttcttttaaaaatagtcgctaaattatcaatgctacaaagctatattcaagtagcttttcttttatgtaaaagtatagtacaatatccccaatatattttgattcgcaagaaaaacacagactattgtgaactccgtttgggtgttctatttacataaaccgtaaatgattaaattaaaaggagtagttgtaaatgacccattgtgatgtatgtggtaaaagctctctgttatccgaaaaattaggaaatgcccacatttgtaaggtttgctttatgaaagtgaacggaccgttctggaagtacagaacatacgaaaagtttgatgatgcgaccaaacaacgtaccaaagctcttgaaaaggcaaaggcacaaaattttcccgaatcagtattagagggtattaacactttctttgatgggcaaataagaggcatgatgaaatgcgatggttgtgggctgactgttcaaaccttgcatcctattggtgcaggtaaactgtgcaaaaagtgtttctctaaaatcgacaaagatggttggaataagaaaaaatgcgattttgaggacaacacagaagttgaggaagtgcgaaacaaaaccctgcaaattgctcgcaagcaacaattccccccgataataatagagggcattaacaaacattttgaaagtatgattgaacaaggcttgttttgctctattgatggcgatgaggaacaaatcttgcgagtttatgatacccactgtattttgataactaatgaggattttgacattaatgaagcatccaagagatacggcgctgctcgcaagaacagtcaacctggggaaaatttgatttcctcaaatacggttgtcaaggcagcacgtagttttatgacaggtggaattgtaaaagcaggtataactcttgcaacagatgccgttgcatcaaccgttattaaccgtattcctatcaaagaggaatttactgtgcatcaaggtagttacagaatagagtatcgggacatcggtcatgtggagtataaaaatgtttccgatgaagaggatgcggttggatatatccgtttccaaaacgcatatagtcaagaccgcagcgatgatattgttttcttgtttagtagtaaagagaaaaaagcaaaagaagcctgtcgttttatcagtgataaaataagagaggcacacaccattccaacgcaactcaaagaagtgcctgtatctgttcggcaagcccccatggttgaccccattgagcaaaccaaaaaattcaaagaacttctggatatgggcatcttaacccaagaggaatttaatgcaaagaaaaaagaattgttgaacctgtaaaaccacaggaaaaggcacaacttataacgtaccttttcttatgctctgcataggctttataaccgtacaattggcggacaagggaacaaagcagaggctttgttcccttgtcttttctggacgaggacggtataattgaaagacgaggaggggaatgtatggtccggaaagtatccaagatcacgtgtgcggcgtcgttcctggtgtttcttgcgctcgttctttggttcggcatgcggctcggcaggatttggctgtttagcccaaacgggccgagtatcgcgattatcggcggcgccgatggacctaccgcaaagtatctgatcaggaccattatcttcggcgacccgctttttatcgccgtcccggtttcgtttgccttgtttgtggtttcccttgtggtatggctggtcaagcgatctcacaagccgtaatgcagggcggggttggggaaacgagtgccggccggcggaagactcccggatggaggttttcggcatgccaaagcggccgacgggcttgtcggccgcttgctttttcccggatagattgagatcaggggtcgtcgtgccggtatttttcccgcgtggcgatcccgccgcggatatggcgctgggccttgttcacctccaagacgtggcggacacggccatagagctgtggattgacgttttgcaggcggtcggacacgtccttatgtacagtcgatttggatatatgaaacttcttggcggcggcgcggaccgtcgcgttgttttcaataatatactcaccgagttcgatggctctttcttcaacggctcctttcacgtgtatcaccccttgcagttacttgctaccattctatgcgccgcctctttcgagtatgcgccgttttcagcgggggatcggcgtgcacgggggcgcattttcgccggcagcttccgatcagagtccggatatgggaataggggggcggacgcgatacagggaaaaggattgctatttggtgcgtttttctcaccgcggggatgaaaaaaccgataaactgccagaatttgtcaaaggacttgcctttctccggaagggagtgtataatgatatctatacaagccaatacagaatccggtattgcgccttcctgacggactatgagccgtcgggtgcgggggcgccgttgttttcatgtggttttcgcgcatcaacttggaggtgtcaacgtggccagtgacctacattgccatacgaaaatatccgacgggtcaatggggatcgaggagctgatcgccatcgccaaacggcggggcctgtcggctatttccgtaaccgaccacgacaccaccgccgccgccacacgggcagtcattatcggccgccggcaggaggtccgggtgatccatggggtggaattttccacgatcgacaaggcccgcggcaacgaggcacaccttctgtgttatctgtgcgacacacccgaccggctggagggcctctgccgccggacaggggaaagccgccgtcaggcggcgatggcgatggtgcgcaaggtgatgcggtattaccccatcacccccgagctcatcgtcaaatgcgccaccggcagcaccaacatttacaagcagcatatcatgcatgccctgatggacgcggggtacgcggattccatttatggagagctgtaccagaagctcttttctcccgaaaccggctccgccctggtggagcccgaatacccggacgttaaagaggtgcttgagctcatccacagcgcgggggggatcgcggtgctcgcccatccggtcccttaccgcaacgaggagctgctggaggagcttaccgggctgggcctggacggggttgaggtctggcacccggatcagagcgagaccgattcggcccggctggccgccttcgcagcggagcacggcctgctgacgacgggagggtccgacttccacggtatgtatacacccgcggcccggccgctcggcagcaccgcagcgccagacgaatgcgtcgaggccctgctggcgtttaaggataagaaaaagaggaaaaacgcgtgaggcagccccccgttttcgtttgcaacgaggacaggcggctgtgccgcgcccatattctcccgaaaggaccggattggagatggcctatacctatactccccgtggggtctgttctcgcggtataacgttcgacctggaggacgggacggtgaaaaacgtccggtttgaagggggttgcagcggcaatacccagggggtggcccggctggtggaggggatgcctgctgaggaggctattcggcggctggccggaatccggtgcgggttcaaacccacctcctgccccgatcagctcgcccaggcgctcagacgggcgctcgacacgccccctgattcgagaggggacactggggcggacgcggagaccatggcaccgaattcgtgacaaaggatggagtcttgtatggccagacaagaagacagcgatatgaaaatcgtcccggacggggcggtggaaatgcccgaaccggctgaagacagcgtggaggccatggcccgcctgctcgaccgtgaaaagaaaaacggcaatctcagcaaggcgcggcggctcggtgcccggatggcggaggaggtcgcgtcggtcgagggatattccacggcggccggcggcccggcggaaaatccgtccctgctgcctcagcgccggatcctgatggcgtttgccgtggaggtcgggctggatgctttcctgcccaataacctggtggcgcagtcggcgcagaacgtgttttacgataccctgaagatcctggccccggatttttacgacgacctgcaggaatccggtgccttctcgttttattatctctgtgtgcgggacgggcgtcaggtcgaacggcgggtgggagaaaatttcgcctccctctgcggccggccgggcagcgaatcctacgcgcgcatgggggaggagctctattcccgcttcatcgcccaggtcaagcgcctgacctgtggggaacagttcaccttcgtccaggaggatggcggaaccccatgaatatcgtcaaaacccgcccccggaacggcttccaggggcgggttttccatgatatgagggctgggctgagggcattatgtacatgtccctccccagcggctgccggaggggcttttccatgcgcagcgctcctttctcgcagggggaaggggatgggaatcccctcggccgccggggggaatgccatgggacaaagccgcccctgttagggggggcctcgccttcgtccacgatctgctgcaggacctcgatcagatcctgcaggctgttcagcgtgacgttccgggataggatctcgtttttcaaatcgatggacagggattcaaaccggctttgcagggcggggctgacatacgacatacatatcacctcgcggttagtctgcccggcgtcccgcctctccattcgtccgggaggtcatgtccgtttcggcgtctcccggaccggaaccacgtcacggaacaccgcacggtggcggcgggagagggccttgtccagatgctggcagccgaaaaaccaccggctgtattccacgtgctcttcgagctggttgaaatagatgttgagaccgtccagccgggccccccggctttccagcagaccccggcatttcccagaaggctcatgggtgaggatgtaatccacctttttgccggcctgcatcagggtttccagcccgtggcgcatctcggccggggagggcatctcttcctcccaccaggctccggccgccgcccgcagttcgcggtcgggactttcgccgccgccgaaggtgaaatagctctccccctcgagggtatacagttccccccgcagcagatggataaggttgccgctgatgacctgcgccttgcccccattccaatcggtgacaggataggcgttcagcagctcgaaattttcatgccgtccatcgagaaacagcacggtatatcgctttttgccgatttttctgagcagggcctcttctttttttccgcccttccacaaaaaaccgaaatcgccgcagacgatcagggtgtcgccttttttgaggcggcggaaggtgggatcggaaaaacgggcatactctccatgcaggtcgccggtgacatagaccatcgcggggctccaccctttcgaaaattttggaaaaccggttcaaagaccggccgagatatgctatactagtcttgaatagggtactcttttattatatcaaaagttcggggaatgtctatgaagaaaatcagatttacggcgtttttcgtctgtttggttgttttaatggggattctggcggttcctgccgccggacaggtcctctatccctatcccgagacggagggcgaccgggtggaatccgcgtcggccatgctggtttatctgggcaccactgccgcggacgacgtcatcctgtatgagaaggaggccgacctgccctattcccccggtgcgctggtgcgggtgatggtgggggcctatgccatgaaggcgatcgaggagaagtcgctcgacctggacactgtacaggggacgtatacgctcgagatgttcaattccaccatcgcgggcaccggccttggcaactgcaacatggcgttcggcgagacctggacgctgcgggatctgctgaccgcctccatggtcacgacagccgccgacgctgccctgaccatggccgtggccgtcgcgggcagtgaggccgcgttcgtggccgggatgaacgagctggcggcggagctcggctgtaccggctcccatttcaccaatgtcaccggcctgcacgaccccaaccaggtgatgacggcccgcgacaccgtcaaaatcacccgttatgcggcggattatcccgccctgcggaatatgatggagctctcccagtactccgtcaaccccgtcagcaaggggtccccacgcagctggcccgcttccaatgaactggtccggtcggtctccccttactacaacgccaatgttgtgtacggacgcaccggatttgccgacgaccggtactcggtcgtggccatgggctcgaaggccggatatgaatacatggcggtggcgctcggcgcccccaaaaccggagacggggacaaggcgggcgtccactaccgtgacgtatcccgcctgctcggctgggggttccgggatttttcttacaaaaccctgttgcgcaaaaacgagccggtcggccggattgatgtcggcctgtcctgggaaaccgatgcggtcgcgctggtgccggtcgcggatttttctaccattgtcgcctcgggggtggatgcgtcccaggtcatccgggtggtcacgaaataccaggaaaccctgaccgcaccggtggaaaaggatcaggtcctcgggaaagtggaactgtacttgaacatcgaccagaaaatcggggaggtggagctggtcgcggccgagggggccaaacgcagcgacctgctcgccgcctgggagaaattccgcgcatttctgcgctccccctggttttacgcgggcatcatccttgttgggctgctgctgatcgggtatgtcgtcctcaacatcgtgcacaaccgcaaccggcggcgccagggccgcaaaaaggtacggcggttcaagtaaagaagggccaggaatataggggtggcttccggatgatctcgattccgtccggaagccatcccttcatggagaggggcttccccgtgaaaagcattggattgcgggtctgtccgttttggcggccgcaggagcccttctgttcgtcttcctgccccggtcccgtaggacggccgtaagaacaatatccccgccgttgccaacgcagcggcggggatacgtcgtcttatgggggcgggaacccgcccggcagggagcgcttaccggaacagcgccaaaaagcggtcccagaagccgggggccttcaccgtctcgggaggcgggtccggttctttcggccgttttatcggctcggtggccatcgcgaactgcacataggccgtgtcggtatttttagaagagacaaacgagaccggggaaaaatcgcccgggtcgtagtccgccagcagccggtcaatctcggcctgcaggatatccggcagatccgccgtatttgtctgcatgtcgtgcgttccctcgcggagcgcccggcctccttcggccagctcgacgatcccgtctcccagggcttccagcccggtgtgaagcccgccgtagccctccgccatccgtccgccccccgtcggcataggccgccagtcccgcgtcgaaggccccgtattccgccgagagggcggacaggccctgggctagctgttccagcccctctgccgagtttgacccgcccagaccctcttccagcccgtccgccagctcacgcaatccggcggtgattccgtccaggccggggttatccggcgtcccgtccccacccacgataacagtcagggcggctgcgagggcacccatcccgtcccggatactcgtccgggtttccggatcggcggcggtataggttcccttggcagcccgggaggccgcgtacgcatcgagcagcttttggagcgccgcctgggcgggagccttgccggattgaccctgctggcggacggcggggacgccggctttcagaacgatatgatgcggctggtggatctgatcgtttttcagcacgatgccaagctcgacgacgatacgaaggggtatatcctcctgtttgccgtccgcggctgtattgccattctgcaaaaatggctgcaaaacggggcagccgagccggtctcggaaatcgcgggactgatcacccggctgtcgctgtatgggaacagcgcctatatggacccgaattaaaggtccggacagccggggtcgctggatcttcgtccccggattccgggcggttcgcctgcaaagtggcatgtatcgcagaaaaagccgcccatccgcatctgcggacgggcggctttcagctgctggtcaatcgcttacaaagggcatcagggcgatctgccgggcacgtttgatcgccacggtcagctcccgctgatgccgggcacaggtgccggtgacgcggcggggcaggatcttggcccgctccgacacgaaacggcgcagacgggcgacatccttataatcgatggtgtcgatcttgtccacgcagaagctgcacactttgcggcggcctttgcgtccccggggacgctccggacgctcgggtctttccggtctgtcagccatggctggcggcctcctttacttcaaaatgatgccgtgaccccgtccaaaacggggacggcggaaatcatcgcgatccgctcttcggccatcccttgttttagaagggaaggtcgtcgtctcccacgatctcctcgaaatccccggatcccgtgttctggaaggccggggccccctcgttgtactgcgggacttgggaatcgtaccgggagccggaggacgtgccgtcccgtttgggttcggcaaagaatacgttgtccgccaccacgtcgaaggcggtgcgcttgttgccgtcccggtcggtgtactggctggtctggatcgacccctgcaccgcgacgagctggcccttgcggaaataccggctgacgaactcggccgtgctccgccaggtgacgatgttgatgaaatcggtctgtttttcttgtcccttgggctggtaggtgcggtctaccgcgatgcggaagctgcacaccgacactccggagggggtctggcgcagctcggggtccgcgacaaggcggcccatcaggcatacactgttgagcatctcacaccctccttacttgtccttgcggacgatcagggagcgaagaacaccgtcggtgatcttgctcacacggtccagctcggccgggaactcgggcgtgctgacgaagttgtacagcacgtagaatccgtcggtttcgtcgttgatgggatacgccagccggcgtttcccccactcgtcgacctcgccgagttcggcgttgtcggcaatcagggttttgaacttctccgccagtgcggcgacgccttcctccccagaggtcatcgaataaatgaagacggcctcgtaggaacctttgacaatgggcatttggttgcacctcctcatggtctgatggccccgcttcagggaacggggcaaggatgtcggccctctttgactggattcggtctgttgttggacagacccctcccgtcaaagacgctaaaatagtataccagccttccccggcggcgtcaagggttttcccgggaaattcccgaaaagaggcggctgcgggggccttttccgttaaattttcctttacaaaagggcgccgaaccgctataatgggtaagctaaggatgcgaaaccgaccgaacgatggaaaggcgcgggtatacatgctacagtttgaagaattgcggcagcggctggaggggctctatccccagatccaggatctggccggcgccatcggcctgccccagatgaaacgggaggcggaggagctggacatgaaagccgccgccgacgggttctgggacgacatggagacggcgcagaaggtcacgcagcgcgccgctctgctcaaggacgggatcgaacggtatgaaaagctggtgcgggactatcacgacaccctcaccctgatcggcctggccgacgaggagggggatctctccgtgctggaggaatgcgcggccggggtgggaaaggtagaggaggcgctggatgaacagcgcctcgccaccctgctgaccggcgaatacgatgcccgcaacgccatcctcaccttccatgcgggagcgggcggcaccgaggcgcaggactgggccgagatgctctacaggatgtatacccactggaccgaacgccacggctttagttataaaatcctcgattatctcgatggggatgaggcgggcctcaagagcgccagcattcagattaccgggcagaacgcctacggctttctcaagggggaggccggggtccaccggctggttcggatctcccccttcgacgcctccgggcggcggcacacctcctttgcggcggtggaggtccttcccgagctggacgacagcatccagatcgagattcggcccgaggatatcaaaatggatgtgttccgttccagcggtgccggcggccagcacatcaacaaaacctcttccgccgtccggctgacccatattcctaccggtatcgtggtcgcctgccaaaccgaacgcagccagttccaaaaccgggatacggcgatgaacatgcttaaggccaagctcctcgagatcaaggagcgggagcacctcgaacggatcgaggatatcaagggcagccaggcccagatcgcctggggaagccagatccgctcctatgtgttcatgccgtatacattggcgaaagaccaccggaccgggtatgaaatgggcaatatcggtgctgtgatggatggggatatcgacgggttcatcaatgcctacctcaaggccgcggcgaacggcaccttgggagccccggaggaggcataacccggcggtcaaatctggaatccgcaaaatttcaaacgtgaagacttttctgagcttcaaagggcagccctgaaccgctgcgtccgattttcggggcggtttatctataaaattatgccccccagaccccgggggcctcgggccccctctctgtatgacgtaggttcaggtgccggcgtttacgccggttttctctttaataaacatcgactcaggccatgctgtccgaccagccaccatacaataaagccccgtccccaaagatttgggaggtatatataaacccaggcggatagaccgcctgggtttgtctgcatcccgccgggcgttacgataccccggttccatctggagaacggaggccggccttctcaatgttggccaggtgctcctcatacgtcacagcgtaataatagttggcctcggcgtcgttgcaaaaatacagataatcaacgtctgcgggggccaaggcggcccggatggctgcgaggccgggggaacagatgggaccggccggcaggccgtcgatgcggtaggtgtcgtaggacggggcgaaccgcgcggcaccgcccggcagatagggctcgatctgtttttgcaggaaatcggtggtgctgtccatctgcagccgcataccatcccgcaggcggttgtacaatatcccggcgattttgggcatttcgcttgttttagagccctccctctggataaccgaggcgataatgagaatttcgtccaccgaccggcctgccgacgcggcctcctgccgtatggcggaggtgatgcgtttttccgtgttctgaagcatgcggcgcagcacccggtcgggccgttccccgatataaaactcataggtatccgggaagagatacccctccagcctaaaacagcgccggctgtcctgcggcatcgccgcggccagagggaattcgctgagatccaaagtgtccgaggcctccatcagcttggcgaccgtggtcacgccgccgtcttccagcttctgaaagattttggtcagggaatccccttccttgaaggtgagccggaccgtctcggccctcggcggctcggtggggaccgccgtcgtgggcggggaagaggccgtgggcgccgaggacggcggagacgaacgggtcggctccggctgcgtcggtgtggggatggaagtggggaccgtctcaggatcgggggatggctcccaaggcgaagtgacatcggaggaggccgatggcaggccttcgctttccgatccgtccggagatggagtcctgcggcagcccgccgccaaaaccagcagcagcgccgccatgcctgccaaacaacgtttcatctgcctctccctttccatgccggtgcttccctaattcctgccgcgttccggatttgtgagacaggccggccggcaagtcctgttccggaccggtcccgtttgctgttttcttccgcacgcgggtgagatacccattcagtatactcttccttccggcttttttcaagccgctgcggcagggcgggatatgccgcctgtccgggcaaaatggagattgacatacaggcatagcaaatatatactgaaaatatgtggaacatatgatttttatggatgcctgccgttgttgaagacgccttaggcggaattacgccgtatggcacccgccgggtgtggatgaaaggatgcgatgtgttgaaattttttagccggtgccggattctctcccatgtcatgaccgggatcagcgtcgtgatggggatgctgatcctgtttgagctgctgccattgcacgattacgacgaccgcgcgttgctttttctgatggcgcgcatccttctgtttgtcctgtccgttttttccgtgatcctgctcaaatgcctgatccgggacgcgcaggaggatttggaagccgtcatgcggtatcgtgccgggggcggcatcaccggcgatgaggacagggccgggacacctcggggatatggcagataaacagtgcggggccgctccgggcggccccgcttctttttatgaaaaacggcggtttgccggaggggctatccggcccgcctgcccatgaggtaggtgccgaaaaagagggccgcggataccaggacgatggtcggaccggccgccacggcgttgagataggacaggcacagcccgagcaagccggaaaagagggaaaatatcagggcaagggccagatagctccgcatgctccgggcgacgttgcgggccgcggcggcgggcaggatgagcatggcgttgatgagaaggagccccacccactggatggcaagcatgaccaccaccgcgatcaccacgacgaagaggttgtcgagcaggccgacgggcagacccttgctcctagccagggaggcgctgatgctcacggcgtggaattgattgaagcagagcagccaaagcactgccaccacgccgagagtgatccccagcaccagaagctggcccgacgagatcgagagaatgtccccgatgaggaggctttgataaccggaaaagccgccgcgggacaggatgaccagccccagcgccaccccgcaggaggaaaacaccccgatgacggtgtcggtcgaggataggcgggaatggcggatgcggttcatcagcaaggcgaacgccaccgcgaagagcaccatagccggccccggctcggccataccgaagatcaccccgatccccaccccggtcagggcggaatgccccagggcgtcggagaaaaaggccatgccgttgttcaccacaagggtgccgagcaaggagaacagcggcatgacgagcaggaccgccagcagggcacggcgcatgaaatcgtagtcgaacagggtcagcagcgcatcaagcataacgcccctcctctccggaaaaggcggcagcgaaggccggggcggcaaacacctcgccgggtttgccgtaggcgagcaccgtcttgtccagcagcaccacccggtcggcggcccggcggacaaaatccaggtcatgggacaccagcagaatcaccatatcggctgtttgtttgagatcctccagcagggaataaaagtcccgcagccccgcccggtccacccctgaaaccggttcatccagcacgagcaggtcgggcatgggcagggtggcgaccgccaacagcacccgctgcagctctccgcccgacagccgccccgctggccggccgagtagatagtccgcccggaaccgggcgaaatgctccgcgaatttccgttcgatccggcggcttttgggcaggaaggcgggataagcggaagtgaaggccagtgccaagtcgtacactgtcgcgggggatccgcggtccagatttagggattggggcacatagccgatgcggggcttgcccgccgcaggagccccgtcatggccgctgaaatccaccttgccggtatgggggagttctccgagaatggctttgagaagggtggacttgcccgccccgttccggccgatgagggcggtcagctcgccgcagtgggcatggaggctgacatcccgcagaagggtttccccgccaagagtcaccccgatgtgttcaattttcaggcagtgcagtccgcagtgttccatggctatgccgccttcctgtatgggatgaagcacaaaaacctcatcccccgttttcgagcgcgcgcaggttcgactccatcgcgtccagccaccggacggccgggtcagcccccgtcgagggcttcaccgccgtatccagcaccacggtccggctggaagacgcataatccgcgagataggcgtactccaccggatactgtccgtcgtagagcagcagcacgtcccggccccgaagcgcgtcggccgccgcggccagttcccctgccgaggcgccgctctcttccccgatggagagcgcggccgtcacatgcagggataggtcggcggccaggtaggccgccgaatcgtggaaggttgcacagtccctcccggccagagcctgggacagccgggaggcgcgcacctccatctcccggacctgtgcaagatacctctcggcgttggcccgataggcggcggcatgggcgggatcggcctcggccagggcatcccgcaggttttccacctgccgggcgtaccgggcggggctcatccagatatgctcgttgaccgcgtgggcgtgttcctccgccgtctcgctgccgtcgtgctcatgtgtatgcccctggccctccagaagggggatcccctctgatgtgtccgccacccgcaggtcgggcagctgggccagggcggaggataggaatgcctcggctccggctccgttcaggaccaggatatccgcctccttaagagcgatcatctccccgggcgagagctgataatcgtgcagacacccggtttggggctgggtcaggcaggagaccgtcaccccgtcaatccctcccgccacctggagcgcggccgtatacatgggataaaagctcgccatgacagcgaaaccgtcctctctccgggtccggtactggccaagcagggcggtgatgccgatggataccgcggcgatccccgccataagcagcaggacgccgccgtacagccgtttcataagccgccctcctttagaattattgcaattcatttgcaataattctatcccattctctcataaaagtcaagctgtctcgtattccccctattcatcacttgaaaaatgggggaatggggtgcgtatatgaaggacgatacgcgtatctggaagcaatattgttcagaacaattcttcaaaattgcagggcggtgtggttttctctacgtccagcttacagccggcagccggacaccgatgccgttttataccggaagtgccgcctccggcgacagagaagcccgaggcacggctgcaaaaccggccatcggtcgtgaaaaagatgattcgttcgggtgataacgctgccgccggttttccccccatgaaaaccggcgttgatgccgacacctaaaccagtgccatacagaaaggaggactgaggccctctggacagggacacccttttgtaaactataaaatccccaccggatcttttcatacgggcaacctgcccgcggcgccaaggccgggcatggccgcacaggcattccgtccagtccatacagcgcaccttaatagacacccgcctgcagctcctgtaggcgggtgtctaaacaatacggccgtgtctctatccgtttttctgtgcgtaaagaaaggcctccacgctcttgctgagcagcaaaaacaggcagcccagcaggcagaataccaggtgggcggccatggccgccacggggagcggatatagcaccgccggcgtataaacggcgccgcccagcggcatggaaggaaaatagagcccgccctgaagcaacatgtacagggtcagcgggacacccagcccgaagccggcgatcagcagcccctttacccacctcacccccatatacagggctacggccaaggcggacgaaaccacgaggggcggcaaacagcggtattccagggataccaataacccgtcggcaacgatggcggccgcgatcagccgggtgaggaccatcccccggacataccgcatgcgttgccggtcttcgaatacctcgagctccctctccggttcccgaatcttcccgatggaatccaccataaagcccccctcctccgcacggccgcataggcgctaaatgctccgcatcctcccgccggcgcggcctcccggtatcagacgttgaagcggaacagcaccacgtcgccgtccttcatcacgtactccttgccttccgaccggaccaggcccttttccttggccgcggccatcgaaccgcaggcaatgaggtcatcataggcgatgacctcggcccggatgaatccccgctcgaaatcggtgtggattttccccgccgcctgcggcgccttggttcccttggtgatcgtccaggcccgcacctcgggtgcgcctgcggtcaggtaggaaatcaggccgagcaggcggtagctcgcctggatcaaccggtccagcccggaattttccagtcccagctcagataaaaataacgctttttcctcgctgtccatgtcggcgatctccgcctccatccgggcacagatgggcagcacctccgcatgctcggcggcggcctgctccattacccggcggtaatgcgggttggcgtcggcgccttcgccggaaaaatccgcctcgctgagattcgcggcgtaaatcacgggcttcgccgtgagcaggtgcgctcccgccagcagggccgcctcttccggagaagcctccactgtcctggcgggcaggccctgctccaacgccgcgtaaaccctcctcaggaattccacctcggcgccgagggatttgtctcccttcatcgccttgaccgtccggtcgatccgccgctcgagcatctccatatcggcgaaaatcagctcgagattgatagtctccatatcccgggccggatcgacgccgccgtcgacatggacgatatcgtcgtcctcgaaacagcggaccacatggacgatggcgtccacttcccgaatgttggcgaggaattggttgcccagtccttcccccttgctggcccccttgaccaggcccgcgatgtccacgaactcgatgatcgcgggggtgatcttctggggatcgtacatctccgccagtttctgcagccgctcatccggcaccgccaccactcccacattgggctcgatggtgcagaagggataattggcgctttgggcgccggcattggtcagggcgttgaacagagtggacttgccgacgttcggcagacccacgataccgagtttcacagtcgaatcttcctttacagcgttttccatacgggggatgtgggacgcccctccgcctgacggcggacgcagcgggacatcacgcctccgcgtcccgtccgcagcactttttgtatttcttgccgctgccgcaggggcagggatcgttgcgccccaccttctgggcggctgttttccggacggtgcggggccggtcggtgccgtcggcggaggttgcggtgggtttcgccacctgttcccgcttgggctcctccttctgccggatctggacggtcagcatcagccgggcggtgtcctcccggatcgaggcgatcatctggtcgaacatatcgaagccttccatgcggtagagcacgaccgggtccttctgcccgtaagcgcgcaggtggatgcccttgcgcagctcctccatgttgtcgatatggtccatccagtaccggtcgaccgtcttgagcaggaccacccgttccagctcccgcatcaggggcccgtaattcgtctctttctcctcgtagatcttcatggccttatcgatgagctgttcggtcagctcttcccgcccgagatcctccatctgctgcgcgtcgtaacggaaatcgtcttctgtggtcagccagccggcgtaatactcccgcaggccgtcgagattccattcctcatggtcatcccccgcggtatactgtgccaccgtcgcgccgatcgattcccggatcatgcccacaaccgactcccggatgttttcgccgtcgagcaccttgtcccgctggccgtagatcagttcccgctgacggttcatcacgtcgtcgtactggagcacgtcgcggcggatgccgaagttgcgttcctccaccttgcgctgcgcgctttcgatggagttggtcagcatcttgttctcgatgggggtatcctcgtcgatgccgagcatttccatgagatgattgatccgctcaccgccgaacaggcgcatcaggtcgtcctccagcgagagatagaaccgggacgcgcccggatccccctgacggccggcccggccgcgcagctggttgtcgatccggcgggattcgtgccgttcggtgcccaggataaagaggccgccggcctccttgaccgcctcctcctcggggcggatctcctccttgtacttggcctccagctcctggaaggtccggcgggcaccgaggatctcctcatcgtcggtttccccgaacccggtggattccacgatcagctcctccgaaaagccgaggcggcgcatttccgccttggcgaggtattctgcgttgccgcccagcttgatgtcggtgccgcgcccggccatgttggtggcgatggtgacggcgccgatcttgccggcctgggcgacgatctcggcttccctgtcgtgatgcttcgcgttgagcaccacgtggggaacgcccctttgcttgagcagcttggaaagatgctcggatttctcgatcgaaatggtgccgaccagcaccggctgctggcgctcgtggcactcgacgatttggtcgatgacggcgctgaacttccccttttcagtcttgtaaatcacatcggagagatcgttgcggatcatcggtttgttggtggggatctcgacgacgtcgagcttgtagatctgctggaactcggtctcttccgtcttggccgtgccggtcatgccggagagcttccgatagaggcggaaatagttctggaaggtgatggtggcgagggtcttgctttcccgttccaccttgaccccttccttggcctcgatggcctgatgcagcccctcgttataccggcggccgaacatcaggcggccggtgaactcgtcaacgatgatgacctggccgtccttgaccacgtagtccacatcccgcgtcatcacgccgcgggccttgatggcctggttgatgtgatgcagcagggtgacgttgtcgggatccatcaggttttccactccgaacgcctgctccgcctttttgacgcccgactgggtcagggtggccgtgcgggccttttcgtcgacgatgtaatccccctcgacggtatcctgctcctccttggcgtccatctccttgaccttggtgattttcagggtcttggcaaaatggtccgcctgctggtacaggtcggtggacttgtccccctggcccgagatgatgagcggggtgcgcgcctcgtcgatcaggatggagtcgacctcgtcgacgatggcgaaatggtggggccgctggaccttgttttccttgtagatcaccatattgtcccgcaggtagtcgaagcccagctcgttgttggtcccgtaggtgatatcggcggcgtacgcctcccgacgggcgttgttgtccagatcgtggacgatcagccccacgctcagccccatatagcggtagaccttgcccatccattcgctgtcgcggcgggcgaggtaatcgttgaccgtgacgatgtggaccccttccccggacagggcgttgagataggcgggcagggtggccaccagggtcttgccttcaccggttttcatttcggcgatccgcccctggtgcaggatgataccgccgaggatctggacagggaaggggcgcatcccgagcacccggtcacaggcctcgcggcagacggcaaaggcgtctggcaggatatcgtcggtgctttctcccatttgcagccggtcccgcagcttgtcggtctgggccctcaattcctcctcgctcatggcgcggtaggtctcctccagccccagcaccttgtcacaaagcggctggatccgcttgatttcccgtttgctgtaatctccgaacagcgacttgatcaatcccaatgttggtcacctcgttcactatttccaggttatccgcttcaaacgcaaaagcctatatgtcctgattttatatatcataccataaaccccgccccgtgacaagttgaaccgtaaagaaaaggcggaacagacaggaaacaggcgggagccctctcgtctcccgcctgcttgatatatggcatatccactcaaccggatccttggggatccgcctcactgggcagctcccggttgatggtgtccatgacataacggaccagattttcccgctgctccgtgtcgagctgccggtataggaggatgaaaatccgttcatcctcctgtaatcccgataggatcccctccgatgccggctgtgccggctccggcccgcgatcccgcacgggggctgcgtgaatggccggtgtctcgatccccagcaggtaatcggtgctcacatggaagatgctggctatccgccgcagcgtgatgaggtccggattggtcttgtctgtttcgtaatacgcatacgttgaacgatctatgttgaggctctgggcgatttccttctgagtcacccccatctgcctccggagcatgcgcaatcgatgggcaaataccgagcgcttcatcttgttggcgtgcatactatcccctcgcttgtaggttcagtataccatctgtcgtccgaaatttcattaccgctttttgccatgtgacaaatgttcacatcatccggcgaagcccctcccgcaagatttttgagaaaatcggcctggcctcttgacgaatcgagaacgggtttgctataataatcccgttcatctggcgagaacgcttcgttcaagggatccgcctgccggtttttaccggaatggcccgtatcctccccatttgctggtgtggctcagtcgtgtagagatgctctacctcctgaccgcatcctccctgtttgctggtgtggctcagtcgtgtagagatgctctacctcctggccgcatcctccctgtttgctggtgtggctcagtcggtagagcagctgattcgtaatcagcaggtcagcggttcaagtccgctcaccagctccaaaggaaaacacccaaaaaccttgcaatcatgcgggttcacgggtgttttcccttttttgcgttattgtctgttttgggcggttaaaaccgatacgttactacggggttactacgtctttttttaaccagctaatcaatttttttaattgcttcgagaagcgttttggccgactgtgaaatatagtgattaatgtcaacagagaaatcggtgtgccccatcaatgctactatgtcttcctctcttactcccgccgccgatagggaggtcgagaacctgcgtcgtgtcgcgtgaggcgttaagagcctcaccccgatctgttcgagcgccggtcggtaatgtttatctcgaaaatattttgttggcattggcgagccgtcgggacgacaaaagagggttttcccattgacctcgacctgcctatctataatcctctctatggatgccgatatggggatgatgcgatttttacccgcatcggtttttattccgccaatgagaaccttgaccccgtccacaacgcgtagacttccgggagtgagcgaaagaaactccgatatccggaaacctgtgctacacatgacgtatatccaatccgcatacggaacgattccgacagcctgcttgattttttcaagttccaaatcggtgaaacagtctttcgaggatttttcttttttaggcaaaatatcaaagcaaaagtgaaataaccctgtgaaacagcgcaaaagcccgcatttccctcagaaaaaagaccccaattactacgattttactacccagggatgagctttgatacgaagaaaagccgggaaatgcaaagttacggtgaaaacgcgaagccgtctgccccacagcaggcggctctcgaatatcctcaaatcgcacatttgcggcactgtttccttacatatataatagaagcacaaaggag

SEQ ID NO: 3877 - DNA, 19282 bp, Unknown
  16S sequences of unknown bacteria
cgaggaaatagcgcttgaggcgcttgtaccatttcgtgccgtcgggatagggctcaccgcagctcaaacccttccactgctcttttatgaggatggcgatgatcgcgcctgctgccggcctgagcttggagacgtcttttaccttgacctcatagcacttgcccttgtcggggagcttcacggtcgtgaggagcatgtccttcttgcccgtgttctcgttttcgaagttgcagtgcccgttagaaggcgagccgtgcatttgccacagcatcccctcgataaaatagtgctcgaagatcgtgtgcgttttcagcatgtaggtataacgctctacgcgcacgtcatagtgcagggccttgttgtccggcttgatgcggatgctctcgccgccagtgtggctgaacatcttgacttgtgatttctcggactcccagtcgctcgtgacgtgcatgaacagctcgccgtcgtcgtaccacatgtcaaaatcctgtttgttttcgactgcttgttgtaccgcatcgacgggaaagtagaacttcttgaaggccatgcaaactcctcttcgagcctcttgacacagtgtcgcacgattataccgcaacgcgtggtgctagctgcgggcgccaaaacgcgtcttacagttgggtgcaaatacgcgagattcgtttgagctcaccgcgcgcttcctgtagggtagcaatgagtgaaaatgccacgagttgtatatcgatgcgaaaggatagggaagcgatgaaactcggttctaccgttacgcttgtctacagggggaccctcgaagacggaacccttttcggaaaggccgatgccgatgagcccatggtgttccagacgggcatggatctggtcatcgatggcctcgagaacgagattctcgagatggagaagggcgagaaaaagacattcactgtcggcatgtacgatgcctacggagagcacctcgatgacttcacggagcgcgttccgctcgaaaacattccgtttggcgacatcgaggttggcaagcgcgtttggatgatcaacgatgcgggtgagaaggtggcggtgacggtcgcggcggtggaacccgatgccgtggtcttcgacatgaaccatcctctcgccggccatgacctgaccttcgaggtcgagattctcgacgtggaagatgcccccgagaacttcatttccgcgaaggagaaggcaaagctcatgggacagaacaaccaggcaatgggctttggcggagaagacggcttcacgatgatgtagccgctcggctttcaggtaagaaaaagcgggctcccgatttctcgggagcccgctttacattgcgctggaaaatcaccttatagggagatgaagttctccggagactggctgtaggcatccatgacgttcttgctgatgtcgccatagcgctcgtagtcgaactcctcggaacggcgaatcattgcattgtccatgacctcgttgagcgccttggtcttgatggcgtagtcctcgaggccgggcatgcgaccgtcgagctcgatctgacggcgcttgtacgccttgtcctcgatggagtcgcccgggatgaccgcgtagtaatcctccggcgtgagggtgtagttgcgcttgtccgcgtaggcctgcaatgcggaatcttccttcaggctctcgatggcgcggtagtcgacgtctgcgtagacctgctcgggcgtctgcccgcgttgcctgcagaagtcctcgacctgcatgccgctgcgccggcacatttcctcgaaacgcatgcgcgcgttgaacttcgccatctcgacgaggtcctcggggagctcttcgaccaggcgggtcgcaagctctttgcagatgacgtcttggtcagcgagcttttggacctcgcggttgttcttgtacatgttgaagcggacgtgcacgagcagctcgtcgacgctcttgacttcctcgacgtgctcgtcgacccatttgtcggtgagcttcggctcttcgccgtccttgcacgcgttcagctcgagccagcgcttagcctgacgacggacctcttcctcggggattttgacctcgggcgcagtgacgtacacggggccgtagtcggtcagggtgaaactcaaattggccatagccatccctctcatttctagctgataactcagggtattttacgtgttcttgcgcgtgtgcgcgagggcaaggaaacaaggttgcaaacctgttgccagcatagtcaactctaccatgaatagagtccccaataatttattctccaagtaaataatcacggtttgaaataaggcgtcaccactatcctcaacactgctaatattgagctgttcgagttctgagaggcccgttgccccagacaccttcgagcactcttctagcaactcggcggtaagttttcctaacctatttgaggaaaaggagtaacactatggcatatggtaagcagtggcgtgtcgagcgtgaagacggcacagtagtcactcgcagcaacacctggtctcctccgggatctcaccccgttggatacggtgtcaaggtcgttaccaaggatggcaagcttgtccgcatcgaaggcgatgacaacaacccgattaccaagggccgcgtcaacgctatgaaccttgctctccgcgagtacacctacagccctgaccgtgtcatctaccccatgaagcgtgcctacgaagaccgcggcaagatgaagtgggagcgcacctcttgggatgaggccatcgacacgatctgcgagaagactcgctacttccaggagacctatggacctgagtccatcgtctgctttggtggtactggccgcgaggcttgcatctactactacgctctgacgttctccgtcctgcagtcgccgaactgctgctacacgcagtccggttggtcttgctacggacctcgctgctccatttctgactacgtcctcggcgcaggctatcctgagctcgactacgctggtcacctgcccggcagctaccaggacccggcttacaccctgtccaagtacgttgtcgtttggggcaaggagccgcttccgtccaacggcgacggtttcttcggccactgcctcgtcgatatgatgaagcttggttccaagatcatctccatcgacccccgtatcacctgggttggcgcacgcaatggcaacatcaacgtgcagcttcgtccccagactgacactgctctcgcactttgcctcatcaacctcctgttccagaacgacgagtacgatcatgacttcgtcgacaactggatctacggtgttgacgagctcaaggagcgcgttgctgagccgacctactcggttgagaacgtctccaagatcacgacggttcctgctgagaccatcgagcgcgttgcccacatcatcggcaccgagcgcccgatcggctgggcttggggtctggcgttcgaccagaacaagaacggcgttcagatgtcccaggcattcatcatcctggctgctatgtgcggttctatcgaccgtcctggcggactgaccctcggtcccccgtccgcactcctcggcaagtggcgtatggagcagcgtggcgctatgtccgacgacgtttgggcaaagcgtatcggtgctgccgagtggcctggcctgtctaccggcatggctaccacccagcctgacgagactctcaacaccatggaatctcatcagccgtatcagctgcgcatggcttggttcaacagctcgaacttcctggctcctacctgctctgctcagcctaagcgttggcatgatgctctgtgcgagtccatcgagttctgcgttatccaggacctcttcctgaccccgacggctatggctgttggcgactacttcctgccgatgtccacctgggcagagcatgatggtatcgtcctcacccactatggccgcaacaccgtcttcatgggcccgatgaacaaggctctgcagactggcgagtgcatgtctgatatcgagatctgcctggtcttcggttctcgtctgaacccgacctggtggccttggtacaaggctgctggcgacaccctcgatgcttccacgctcgagatgggtcagtacgcacctaccgtcacgagcgagactcgtggcaagctcgacctcgacgccctcaaggctggcgttgagagcttcttcgacgatcagatgaaggaactcggcatgaccttcaacgatctgcgcgaagagggcctgtatcagcctggcgcacatggcttcgaatacgagaagtatgccaagggcatgctccgcttcgacggccagcctggcttcaacaccattacgggtcagatcgaagcctactcgattctttacgaatcctggggcgaggatccgctgccgtactacgaggagccgaactacagcccgatcagcaagcctggtctcgctggtcagtatccgctgatctccacgtccggttctcgtcgttacagctccttccattctgagcatcgtcaggttccgtccctgcgtcagattgatccgtggccgtgggtccagatcaatcctgagactgctaagcagtacggagtcaccgacggtgactggtgcgaggtctacaacatgttcggtgaggctcgcttcaaggctgagatcactccgatcatgaagcctggcatcctgaactgcgctcatggttggtggttccctgagcaggacggcgaagagcccaacctgttcggtgtttggaagtccaacttcaacagcctggttcctcatcagaatatcggcaagctcggcttcggcgctccttacaagggtgttatgtgcaacctcaagcgcgtccgcagcctgaacgaggactaatcagaaaggaagtggcctaaatggcagatcagaagtacgctctgctggtagattacacgttcttctccggcaaccatgccgcagagatcgcctgcaaagaagagctgggtcttcctctcgatcagttcggtatcaaggaagtccaggttggcccgttcaagaagggcgagggcaacgacggtgacgactgggagtggtcgtacatccccgttcctacctccatcttctctgagcactggggcaccaacggcgacaaggccggtcagcgtccgctggctgtccaggtcgaggaatccgcttccatgtactacggtaccctggaagagatggaagccaagatggcagagttcgatcgcccgatggttctgttccagctgtaaatctctcttagttttgcagtaatatgtactggtcgcctcctcgttatggggaggcggccgggactatgagttgataaacaaggaggatcgatatgactcgcgatgagttcattgagcttgatgctactgagcaggctgctaagctcaacgaggccgttgctgctggcaaggataaggccggtgcaatggaggagtttggtgtcactcaggctgacatcatgaagtcccaggtcttctgggttaaggataagttcattgctcgtgcatggggcggatacacctccaccaagcgcaccggcaatgaggctggcgacaccgctacgggtgttggcgacagcgatccttccaagggttacaacggcatttaagccttgttcctacagctctttgaaaagtccgttgcttgcagcggacttttctttatgattcgaatgaataactgtctccattaaaatactttgaatcttgagtagtaatggaaacagttatacaatagcgtgcgttgaatgcgatttgagtggctgtgccgtttgaatcgaactaccaaagaaaggttcggtgttatggctactgaacaagagattctagcagaggtcgaagagctcggcaggatgactcccgagcaggaggatatcctctatgcgatttcgctgcgccaagacgagcttggtcgccagcagaccaacaagttctacaaggacgtcgtcggtagccccatctaccagccccttatcgatcgcgaactgcttaccttcgagacgtacaaccatggcgccaacaacgatcatgccgtcgtcaacctgattgttactctcaagggcacccgttactgcatcatgttcagcgacgagatcaacgagcgccgtaaattccgcgccgacggcgtcttgaaggagaaccttaagaaagaggccgaggcagctgctcagaagtagtctttgctctatttttcatgttgcctttgaatgcgctcgctctgtgcgggcgcattcttttatcttgcggcttagattcggtccttcccgcgcgtgtcatagcctgtcttgtttgcctataatcagtgcggcatgtatccgcgtcgagttgaaagcagctggtcaatgcaaaacaaagctctcaagaaggctctggagtcatttgatgaagtcgagcgtcgatatgtgcgagccctcgaggataaggggctcaagttcgccgagcgcggcagcgatgacgctcgttgcgcaaagttgcgcgatgagcttcgctctaggggtgcgacctttcgaaatggcggcgcgagcatccaggttggctggctgtccaaagcctgcgtagaatgcacgggcaggggagggagcgagaccttttccacgacgttcaggtgccatcgcgattgctacttctgcttcaactacaatcttgccgattacgacaagttcgtcaaagaaggctgtccctgggagtccgagctgaaagacgcctatgatttcaacaagggcgagatggcggcgttggctttgacaggtggggagccgcttctcaatctcgacgagagcattcgcttcctgaaccgtgcccaagagctgtttccgcatgctcacaagcgcctgtacacgtcgggcgacctcttgacggaagatggcgcgaagcgcctccatgatgcgggactcaacgagatcaggttcagcatcaaacaagatgatcccgatgacctgcgcgaacgcgtgctcgcaaatatgaagatggcaacgaggtacctcgacgatgtcatggtcgagatgcccatcgttcccggcacgcgcgctgtcatggaagattggatgcgcaggtttgcggacaatggcatcaggggcatgaacctcctcgagttctgcttcccgttccacagctgggaagagttcgataaacgtggctttaccgtgcgaaacccgcctttcccggtcatgtacgactatgggtattccgggggccttgccatttcgggcagcgaagagctcgccttggagctcatgctgtttggcattgaagaagacctcggctttggcatgcactactgctcgctcgagaacaagcatcgcagcgagatgcgccagaagaacgagccggcacgcaacgtccatccgatcttccagttcgacgaagaggatttcttcatgaagaccgccaaggtttacgggccggatgtggaaccagccaagctcctgctgggcgatgcggggtgcagcgagttctattacgacgacgaggaggattcgctcgcttttgctccgcgcttcctgaagttcctcgagggcagctccatgcagcctgcgctcgcgttcaacgtcatggaatctgccgatggggagagttttctgcgtgaagtcggcctgaagctcgtcgagaaatgacgctttcaaggcattgtgactgggacagctctaagtgtacccataagaaattacaaattacatcattctaatagttacagttgtatataatcgaatcggacatggagctgtaaacgatatctgtgggccgcatgcgcgcccccggtcagaaaggtcgctgacatggcactgagcgacgccctcgtttccctcgatggcatgaccgccacattcggcggttttgggcctactccgcaaaaagacgtctcgaagacggtcgaggaggttatggccgcctacgagaggatgaccaaacagcgcgaggatcgccttgcgtacttcgcacgtcaagaagaactcacttcggaagagcgggatttcaccgacgcagacggcacgacctggcattacgtgctcttcgaccaaaccgaggcgcgcatcacgggtttcgaggccgatgccccgcgcgtcgtggtcccctctcaaatcgaaggcacgcctgtcttcgccatcctgcccgacggctgtgcgcacaaccacatggtggaagagatcgtctgtgccgattgcattcagaccatcggggccagtgccttcagggattccgcgcggctcaggcgtctcgtgctcccgcgtttcacggcgggcttcgacaggacgtggattcaggcgtgcccgcgccttgaggagctcgtcttgccgggtatgctcgagcgggtggatgcaggggtgttcgagaactcgggcgtcaaagtgctctctgtcggcatcaacgcctcggagttcgcgccaggcatgttcgagaagggcaatctcgaccgcatcgagatcgacgaggacaacccgcacttcgtgaccgatggcgaggccgtgctaagccgcgatgggcgcgggtacgtcgccttggccgtgaactgccgctcgtatgaggtgcctacaggcgtcgagcatatcgccaagaaggcgttccagggcatgaacgacctcgaggaggtcgcgcttcccgaggggctcgagacgatcggcgattatgcgttttgccgcaccgccctggcggaactcgaagtaccggacagcgtcacgaccattggcgagcacgcgtttttcaaggcaaaggcgcttcggcgcatcgcgcttggggcgggtgttgccaccatcggcgtcgatgcgtttaccgacacggcactcgaggagctgcgcatcccggcctccatccgcgagctcgcctatccgctcgtcaatcacacgggcctttcctgcgcgggaaatgacgccacgttcactatcgccccagacagcgaggtcctgttcttcgacgaggcaggcgggctgtaccgcagggcggacgatggcctgcacttcgtgaagatgttcgcgcaggatgtcgtggagtacgagattctgccatccacgaccttcatcgatgcccaggcgttcttcaactaccttacgctcgaggcagtctcgattcccgatagtgtggtcgaggtcggccgtgcggcgttttccggctgcaagaagcttcgcgcggttcgtctgggaaactccgttaagaccatcggcatggacgcgtttctggacacgtcgctcgagcggctgcgcattccggcgtcggtcgagtctatcggcgcgaaggcgctcatcacgaacggcgcccaccatggcaggcaggccccctcgctcaagtcggtcaccgtcgacgccggcaacgagcgcttctacaccgtgccggggctattgtgcgagaggatcgacgactcctcgtcgcgcatcgtgctgtacacgggcgaggtcgcgagcctgacggtacccgacgatgtcaccgagatagcctcgtacgcgttcaacggtacgcgcctgctcagcgagctgttcatcagcacgcacgtgtcaaagatcagcatgtgcggtctcacggtcgattgcgtcatcgagcacctgcacatcgacctcgaagagcccgtcgaagggcacgatagcttcgacttgcatttccccgataccacgcgtgccgcgatggaggtgtcggttgccttgggctctgcctaccacctgaacctccccgagattctgcggcactacgacaacacgatcgtcaatacctacgacatcggcacgaatacgctcagcgagaacctcgagctctaccggcaggcgcagctcatcatcgagcgcctgaaggacccgatcttcatgaccgactcgaacaagagcatgtgcgacgcgttcatggagcgcgaggcatgcgccatctgcgtcgatgcggcgcgccacgacgaccgcgcgatgatcgacgacctggtcgcgctggggtatctaaccggcgacaacatcatgcaggcgatcgacgaggtgggacgcttgcaggatgcggcgatgaccgggtatctgctcgagataaagcgccggcattttggcattggctctttggacttcgacctgtaggaggtgaacatgccttcggtacccgaaatacgagacaccaagctcagacgccacaaagaagaggacgtcttgggcaaagacatcatcgacgagcttcgcgtgcagcttatgctcaagttcaggttcctcgacctcgcgctgtggaggatggacctggttcccctgcgcgcaggcgcgcgctacccgatggcaacggatgcgaacgagatcatctacgacccgccgcgcgtcatcgcgcgctaccgcgagtcgttcgacgaatcggtgcgcgactatctgcacatgatcttgcactgcgtgttcaggcacccgttcgacaaaagccacaagaacaaggaagcgtggtggctcacgtgcgacatgattgtcgagggcgtcgcgatggatatgtgcggcgaccgcttcgtgagcgcagacgatgaagcccgcaagctggcgttgagcgaaatcaggatgcttgcaggcagtatggcgccaggcaaggtctacaagctcctgctcgaggcggtgctcgctcccgagggacaggcgtttcgcggcattaccacggacaagatcaacgagtggcatgcgctgttcgagcgcgacaaccacgaggcctggcctgcgaacgccgacccgagcgagaaaagcgaccagacggagccgggctccacggaggagatctcgcaaaacgacgagaatcccgacgaggggacccaggacaagttcctcgacacgagcggcggcgagagctccgaccaaagcgacaacgaggaccaagaccaagagcagcagaccatgcaggcgatgctcgaccaggacgcggacgactcgcaagacgactccgacgatgcggataacgagccctccgacgattcgcaggacgacgggcacgacggaaccgacgaggtgggcgatcagtccgaccagggcggcaaagatgagacgatggacaccgacgaggacagaacttccggtgacgacgagctcgacgaccgcggcaaggacaatcggacggaccaaagcgagcaggactggaaagacatctccgagcagatcgagatgaacttgcagacgttctcgagcgaatggggcgaccaggcgggaagccttattgccaacctgcacatcgcaaatcgcaaagtggtcgactattccgagttcttgcgcaagttcatgacgctttcggaggagatgaagatcaaccaagacgagtttgactacatctactacacctacgggctggacgtctatggcaacacgccgctcatcgagccgctcgagtacatggagacgcaccgtgtccgtgaattcgtcatagcaatcgacacgtccgaatctgtgagtggcccgcttgtgcgcaagttcctcgagcacacgttccagatcctcaaggaatcgcaggactatacgcgcgatgtgaacgtccacgtgatccaatgcgacgcgaaggtgcaggcggacaccaagattaccgacctgcgcgacgtagacaagctcatggagggcttctacatccgcggcttcggcggcacggactttcgccccgtattcgactacgtcgactcgctcaagaagcgcggggagctgaaggacctcaaggggctcatctactttaccgacggctacgggcagttccccgagaagatgcccgagtacgagacggcgttcgtcttcctagacgaaggcgaacgcgagacgcccaaggtaccgccttgggcgatgaaggtcctcatcgacgaagacggcatcaacaggttcaagacgaccatcgtcaagtgagctacaagtcacaggaagggacttgcgatatgaacattcaagcggcaaaagaccaggtaaaagacactgtggaggcgtatcttgccaaagacgatgccggcatgtacgtcatcgaccccgtccaccagcgccctgtgttcctcgtgggcgcgcccggcatcggcaagacggccatcatgagccaggtcgcgcgcgagctgggcatcggcatggtgtcctactccatgacgcaccacacgcgccaaagcgcgctcggcctgccgagcatcgaggaaaaggagttcgacgggcacacgtacaaggcgtccgagtacaccatgtccgagatcgtcgcggccatctacgactacatgagcaacacggggctccgccagggcatcttgttcctcgacgagatcaactgcgtgtccgaaacgctctatccctcgatgctgcagttcttgcaattcaagacattcggcaagcacaaggtgcccgatgactgggtgatcgtgtgcgccggcaacccgcccgagtacaaccgctccgttcacgagttcgacatcgtcacgctcgaccgtctgcgcgaaatcgacgtcgagcccgactacggcgtctggaagaactacgccaaggagcaggggctgcacccggcggtcacgaccttcctcgaggcgaagaacgactgcttctacaaagtggactccaagccgggcggcggcaagtccttcgtgacggcgcgtggctgggaagacctcgccgacatcatcgccacctacgagcagctgggaaagccggtcaaccgcgacctgttcgcgcagttcctcaaagacgaggacatcgccgaccagtttgccgtgtactacaccctgttcgagaagtaccgttccgactaccaggtgggcaagatcttgtcggggtacgcgaccgacgccatcaggaagcgcgcgaaggaggccgagttcgacgagcgcgtcgcgcttctgagcctgctgctcgacgctatcgcgggggaatgcgcgaaggcgctcgaccaggagggcgtcgtgctcgatctgcgcgatgtcctgcgtgaagtcaagtccgagctcctcgacggcaagacggtcgacgagaccctgcatccgcgcatcgaacgccgcgagctcgagcttgcgcgccgtatggacgccggcatcgcatcgaaggcgttcgtgcgcaaagagcgtttcgtgatcggcaagctgcgcgccttcgcggcacagtgcacggccgagaagacccctggtggcgacactgcgttccacacgctcgagcgctgctacaaggccgaagtcgacaagatcaagccgctcgtggatgccgccaacgagaagatcgacaatgcgttcgacttcgtcgacgactgcttcgccaatcgcgagatgctcgtgttcctcgcggagctgacgacgcgtcagaccacgacgaacttcatctcgcactacggcaacgagaagtactacgcgcataacgaccagttgcaggtcgaccagacgcgcacgagcctttccgcgcgcatcaaggggctcgacgaagacgacatcgtccgtccgatcgacgaggtctcacagtcccacatcacgtccgtcgacatgagcggttccgtcggcttcaggggcggcgatgcccagacgcctgtgaaggccgaaggcgagatcacggatgcggagcttgccgagtactacagcggcaagcagttcgagtacggctttgcctcgatgagcaagatgaacctgcttgcccacaccatcaagggcaagcgcgtgcttgacgtgtgctgccgccgtggcaagggcgtctacaagttcagcgcgaagatcgccccgggtgggcacgtcatcggcactgactggaaccccgactacatcgacgacgctatcgccggcatggaccgcgcctggcacgacaacgggctcaaggaaaacaacatggagttccgcgtcgcgttccccgagaagctcatcgacgcgggcatcggggacgggaccatggaggtcgtctacatcaacaacgtcatgacgctgctctacgaccaggaacgcgccctgcaagagtttgcccgcgtgctcaagcccggtggcctgctcatcctcgagacgatcttcgccgaccgtccgcgtgacgaaaaggtggtcgaggcggcgcgtcgtatcggcaacagcatccaggcagcgcgcacgcaagacgagaacttcgcgtggcttgccgaggcgggctttggcgacccagtcgtcgaagaggcatacgacgtcgcggcgaaccgcgggttcaaggcgagccacacggtcgagacggtgccgggcgacgaggacgtgaagtaccaggcggtctcggtctacgtgcacaagaagtagctttctgcccctgacggactggctatactggaaccctggcatgcgattgctgccggggttccttttcttatggaggcgtatatgaagctgctggtcatcggcgatagagcccgcaccgagaagttcctgcccgatttgcccattgtgggagagaccgagcttgtcgtcgtggaacgcggtacgagcgacgaggacatcttgcggaaggcggcagatgccgatgcgattttggccgatgcgatttctcctgtgtccgccaagctcatagacgggatgcccaacctcaagatgatccactccgagggcgtcgctttcaacgcgatcgacggcgaggcggcggcgcggcggggcatctacgtgtgcaacaaccggggcgtcaacgcggtagctgttgccgagcagacgctcctgctcatcttgggcgttctcaagcacgtcgtcgaaggcgatgcggccgtgcgcgcgggcaggcagatcgcgtacaaggaacagctcatggtgagcggcatcgaggaactctccggcatgaccgtcgggctcatcggctttggcgctatcgcgcgtgaggtggcaaagcgcctgaacgccttcgatgtggacgtcgtctacaccaagcgccacaggctcgacgaggccgaggagcgtcttttgggcgtgcgctatctcggacgtgccgagcttctggctgcaagcgacatcgtgagcgtgcacgtgcccgtgacagccgggacgcgcggcatgatagacgatgcgttcttcgcccagatgaagcaagggtcctacctggtgaacacggcgcgcggagagatcgtcgacaacgaggcgctcgtgcgggcgcttgcgagcggaaagctgagcggggcggcgcttgacacagtcgcgcccgagcccgtagccgccgataacccgcttgtgacattgccgcccgaactggcatcccacattctgttctcgccgcatatcggtggcgtgacgacgaacatgttcaaacgcgcgcatcgttgcgtgtgggagaatcttgcgcgtgtcgcccgcggcgagcggcccgtgaacgtcgtcaacgggctgtaggaggcttgttggcctgctagtggatgccgagtagctcgcggtagagcgcttcgtcgtctgcgccgaacacgtcgaatacgacgtcgattcccgcctcttcgtgggcggtgagccagcgcgccacggtgtcgatggcaagttgcgcggcctcgcgctgcgggtacccgaacacgcccgtgctgatgcagcaaaacgcgatggaacggcaggagtgcgccagcgcggcctcgaggcagctcgtgtagcagctggcgagctgtgcgcgctgcagctcgcttggtgcgccctgcacgatgggccctacggtatgcacgacgtagcgtgcgggcaggttgaaggcgtcggtcacctttgccgtgcccgtcggttcctcgtgcccctgtgcctgcatgagctcggcgcactgctcgcgcagctcgacgccggcaaaggtgtggatcgcgttgtcgatgcagtagtggccgggcacccagcagccgagaatctgcgagttggcggcgttcacgatagcatcgacctccaggcgcgtgatgtcgccgcgccacaggaaggcatgcggtaccagtggggaaggggttgcgtcggcgcacgtcgcgatgccgtcggcggcgatgagctcgtgcaggacatcgtcttgcagctcgtagaactcttggctcgcgtgaatcggctcgcgcgtgttcacgagcgctctgaacagcttccagagctcgtcttgcgtcgcgtgctgcgtgggcttctcgaaacgcgggccgttttgctgggcgttgcgctcgtcgatgagataggtcacgagccgtgcgagtttcgatttcacaggagatgcctcgattctgccgggaaagggcctgggtacagtataggccgagataagcgatgcggccccgcagcaccaaggtggtggcgaggccgcatgtaagcgcgaggtgtgcgcagggctacatgatcttgacgacccagccctcggggccttcgatttcgccgtcctggatggaggtgagggtctcgcgcagcttcttcatgacaggaccgacctcttccatgccgcttgcgaagacgtacttcttgtcgccatcgtcgacctcgccgacgggggagatgacggcagcggtgccgcacataccgcattcggtgaactcgccgttcgtgacttcttcgaacttgaccggtcgttcgacgacgttcatgccgaggatgtcgcgcgcgacgacgacgagcgagcggcgcgtgatggacggcaggatggagtccgtaaaggacttgggaacgacgagcgtgccctccttgtcgacgaacaggaagttggcgccgccggcctcttcgacgtaggtacgggtctcggggtcacggtacatgttgtcggcgtatccgttggcgtgcgcctcgacacccgccttgagcgacatggcgtagttgaggcctgccttgatgttgccggtgccgtgcggtgcggcgcggtcgtagtaggtcgtcgagaccttgacgggcttgacgccgccagaatagtacgggccgacgggggtaacgaggatgcggaactggtactcgtcagcgggcttgacgccgatgacgttgccggtcgcgaccatgaagggacggatgtagagcgttgcgcccgagccgaatggcggaacccaggcggcgtttgccttgacgacctccttgaccgcctcgacgaacttctccttggggaaagagggcatcatgagacgggcggcagagtcgtacatgcgctcggcgttgaggtcgggacggaagcagacgatgtcgccgtttttggtggtgtatgccttgaggccctcgaagacctcctggcagtagtggaagatgcccgcgcattcggaaagcgtgagggtgtggtcggtcgtgaggccgccttcttcccatgcgccgttccggtagttgcagacgtagctgtaatcggtcggctgataggcgaacccgaggctgccccaatcgatgtttttcttttccacggacaatcatctccagtgctttgatgtcaaaacgaactgcacgaaattctactactgcagtcgagtatagtgtcgtgaattcacttcaatttatatgtcgttcggtcgtattgcgccgcaggctgcgcgggaacagtggcagcgccacacatcccacgcatctcatgcgcgctgggaaacgtccttcttgcccctgagcccgtaatacggggaaagccagaacagcagcacgatcgtgagtgcgaaggagacgagctccgcgacgatgacggagtaccagatgccgtctgctcccatgacgagcggcagcagcaacacggctccgacttcgaagacgagcgtgcgcagaaatgcgatgagcgccgagacgaggccgttgccgagtgccgtgaaaagcgatgagccgtacatgctgatgcccatgaagcacagcgcgaacgcgtagaccctgaacgcatggaccgtgagcgcgaatagtcccgcatcgtagccggtgaatatctgggcgagcggggcagcgagcagctccgcgagcgcgaacatcacaatgccgccggatgcgaccacgcgaaggctcttcgcgagcagactgcgcatctcgctcgtgttgcgcgcgccgtgctggtagctcatgagcggggcgcatcccatgcagtaaccctcgaatatcgctgcaaagatcataaacgcatacatgatgacgccgtacgccgccacgccgtcttctcccagaaacgccatgagctgcagattgtagacgacgctcaccaccgacatagcgatgctcgccatcatctccgacgagccgttggcgcaagtcttgcccagggcgcgcaggtagagtgcggggcgacccagcttgaggtagctttcgtttctgcgtgcgaagtagaagagcggagccaggccgccgacgtattccgcgatgaccgtcgccgccgcggcgccggcgactccccagccgagcacggcgacgaacacgaagtcgaggaccatgttggaaaggcccgacgccagcgtcgtgtacagcccgaccttgggctttccggcgctcgaggcgagcacttggaacgtgtactggagcatgaaaagcggtagcgagagcatcgagatgcgtccgtagagcacgcagacggggagcatgtcgccattcgcgcccagcaggcgggcgacgtcttccatgaacgcgaagcccacgagcgcgagcaaggcgccggcgcccaacgtgacgtagacgatcatcgagaagtaggcgttggcacgcgcgtcgtcgccctctccgcgcgtcttggcgacgagcgcgcttccgccggcgcccatcatgaagccgagggtacccaagatcatgatgaagggcatgatgaggttgactgccgcgaaggcggtcttgcccacgaagttcgtcacgaacagaccgtcgacgacgctgtagatggaggtgaacaccatcatcgcgaccgatggggcgacgaaccttagcagcatcggtacgctgaaatgctgtctcatgttgaccatggctagatgctctcgattccgtcgagcgcctggacgagcctgcgtgtgtagacgtctatcacgcgggagagcagctcgcgttcgtcttcgtcaaacgattcgaggacggcgtgctcggcttcgagcacgggcgcgattgcgcgcgcggcatatgcgcggccggcatcggtgaggtgcacgtgcgtgttcctgcccgtcccggcgctgatctgcagcagcccgtcgcgctgcatcttgtgcacggcggagttcacggtctgcttgccgtcgtagcagcgctcacagagttccttttgcgtgcaaccgtccccatacgcgaagagcgtgtacaggatgtcgaaggagctcggtgagagatggcagcgcttcgccgtacggtcgtaggcctcgtcgattgccttgacgttcatatcgaaggcgcgctgcagctcctggatgtcgcttggcatgcctgttcctttaagtccgaaatcatacttgctagtccgaaatcgtacttgagggaattggacctgtcaaatgtgcactgcatgtagaaaggccgcgaaccgagatgcatcttctcggtccgcggcctggaggctgttatgcgtggcgtctagttgcg

SEQ ID NO: 3878 - DNA, 2676 bp, Unknown
  16S sequences of unknown bacteria
tttacatttgaattactcagcagagatagcgccggtcggacaagctgcttcgcaggtgccgcactcaagacatgcatcagcgtcgataacgtacttgccatctccctcagaaatagcgtctgccgggcactcgcttgcacatgttccgcaagctacacactcatcagaaataacgtatgccatgattgtatcctccttatattttacgtattagatctcgttggaaatctttcattcattgtaatacaaaacgtcggattagacaagtgtgaaatctgttttagggtgtatttctgcagagacatgggttagtttagccttttccaagaaacggacttgccgtttctgggaagctatactctaggaatcgcttcgcgaaccctatcgttagatttgcggcgcaaaaaacgcgccttttccaagaaacggacttgccgtttcttggaagctatattatgataaactcagtaccgcactgtggtttatcagtttgataaaaggtactcagaattggcacagcacttgtgcagacactatactgtacatggaatttacaaaaaacggaggaaatgattatggcatcggttacaattacaaaggatatgacgattggagagctgctcgatatcaatcaggggctggcaccggttcttatggctggcgggatgcactgcatcggctgcccgtcttctcagatggagacgctggaagaggctgctgctgtgcatgacattgagattgatctgctgctggcccggctgaatgcatttctggaagcgctggaaagctgaggggaaagagaagcttaacagagatttaaaagtatctttaaaaaattgagataaatttgcttgtattttaccgggaaaagtgtaagatgagaccggaagtgaaaacagaagatacaggtggaagatacggatatggaagaaaagagaagcggagcgcttcatgaaggcaataaaaaatccggagggcaggcacggaaaaccagtgcaccgcgttccagaagagaaaaggaacagatctggctggagcatctgaaaaaaacgatgtcaccggcgcagtatgaagcatatgtagaaagagagaaaaagcggcgtttgatgaccggcattggaatcggagcaggcgctgtttttttcctgcttctggcaggatcgatcggcggacgtgtggtgcacagcctgaaaaagccggcatcagcaggaactggagcggctgtggtgcagacggagacagagacaggggaggtcagcatttacgctgaagccgatgcgacgcttggaagcaccggatgtgtgctgctgcattcgccgtttatcagttcttatccggatgcggagggcaattatgatttttcgtcgatttttaaatatattacgtcatattacagtgcaccggattttatgacctgcgagttcgaaggcactttatcgggatcagattattccggttatccgaattttaagtcgccggatgcgattgtgaaaaacgtgcaggacagcggcgtagatctgcagatgctggcaacaaatcatgtatatgatggactttccacgtcctttcatcggacgatggaggtctatgaagaaaatcagatcgcctataccggcgtgcgcgagaaagccgaggataaaccgtattaccttgcagatgtgaatggcatacaggtcggcttcctagactatgtatatgagacaaagggcagtggcgcggatattaatggtattccggtcagctcggatgatgtgggattgattaatacgtttgactacgatgcgctggatgatttttatgcggaggctgatgaacggatccgggacatgaaaaaggagggcgcacggtttattgtggtcaaccttcactgggggacggagtatcagctgaaggagtcggagcagcagcgggaaattgcgcagaagctgtgtgatcttggcgtagatgcgctcattggcgggcatccgcactgtctgcagccgatcgatgtctttcagagcgcagatggaaagaagcagatgttctgtatcttttccgttggaaatgcactttcgaatcagagaacttatctgatggatgagatgccgaccggacataccgaggacggcgtgatggtgacactttccctgcatcagaacaccaatggcacggtggatatctccgggatcgatttgttgccgacctgggtataccggttccagaataatggatcgaagtattatatccttccgctggatgatgtagatacccttccggagaagaccggaatcactgatcttggcgaccagccggaggattcctatgagcggacgatggatgtgctgggagaaggactggagaaggcgcgtgcagcttttgaacgcagataagcattcccccgcttcaagtgtgcgaagcgactgcgtttatgagcaagtagcgaagccaggtcctgtcagcagagcagcagggatgcagggatggattgcggatgtccgctttactgttaatacagtagttccgggcttatctgggggccgttgcgataagaacgagacaggcagtagttttacgtgattcagggcgtaaaattgctgcctgtttttttactataacgcattgtctcgcccgttgtttgagaaaatacttaaatgaaaaactaaattccagctgtggattatctcagtaactatgcgg

SEQ ID NO: 3879 - DNA, 17294 bp, Unknown
  16S sequences of unknown bacteria
gggaagctcccccgcgctatccgtaaagtcggcgcccgcttgccgagcggcatttttttcgcggcaaatcggatgcccgaaaagggactccgcctcacgaccgtccggcattttttcgcgcggcaaagaaatttcgcgccgcccaaactaccgcttgacttccctcacggagccgagcgggatttgcgacggaaaaaaccgcgccgcgaaaacgctgtcgcttattttccgccgtatccggtcgcggttttcccgacggaaaagaaagatacgacgccgcaatgttgccgcataccctcttcgcgttcggggcgagcgcggtgagaagggtacgccgcgttaaaccgcaatttttaacgccgcaaaagcattttttactcttttcggtctttgcgtcaaaatggtatctttaaaaggcaaagcccgtttgcggcgccgaaattactctttggctctcgccgcgtgcgctgcggcggcgattttatccgcgaacatgggcggcacttcttcgtaatccaaaaattccgcgacgaatttgccgctgccgcgggtcagcgatctgagttccatggtatactttttgatttccgcctgcggaacttccgcggtgacgacggtcagatcgttttcggtggtggtgcccataatgcgcccgcggcgcttgttgatgtcgcccatgacgtcgccgagataatccccgggaacggcgattttcagcctgtaaacaggctccaagagcacgggggaggcgttcttcaagccctccttgaacgcgagcgccgcggcggctttaaacgccatttccgagctgtccacttcgtgatagctcccgtcgtagaggacggctttgagtcccgtgacggggcagcccgcgagcggacccgagaagaggctttccctgagtcctttctcgacggcggggaaatactgtttgggcacggcgccgcccaccacttcctcgtcaaagacgaagtcttccgcgcacggctcgaagcgtattttgcagtgcccgtactgtccgtgaccgcccgtttgtttcttgtacttgccttccgcctcggcggtggatcggatggtttcgcggtaagcgattttcggctccgtcagtttgacgtccacgccgtagcgcgccttgacctttttcgccagcatttccaattgcgtgtcgccctgcccgccgatgagaatttcgcccgtttcggcgttcttttccacggagaaagtgtaatcctcttccgccagcttgctaagtcccgcgaacactttgtcctcctctccctttttctcggacgaaaccgccataaacagggtgggcttggggaagcggatggggtcgaactttattttcgcgttctgatcgcagagggtgtcggaggtggcggtgacgctgagtttgttcaccgcgcctatatcgcccgccgcaagctcggcgacaggctccgtctttttgcctttgagcaggtaaatctgtccgatgcgttcttccttttcggcgtttgcgttccagacgacgctgccgctctttaaagtgccgcggaatacttttaagtagctgagcttgcccgaataggggtcgatgacggtcttgaacacctgcgccgcgaggggcgcgttttcttcgggaagaacgttgacgaccttatccgccgcaaggtcggtggcgagggtggtgactctctcgttagcctgcggcatatattcgacgatctcgtttaagaggttgatgacgccgcggttttgcagagcgctgcccgccatgacgggaatggtgttgacggaagcgatgccgaggcgtattccgtggacggtttcctcgtgcgtgagggaacccgcctcaaagtatttgtcgagcagtacctcgtcgttttcggcggcggtttccatgagattcgcctgcatttcttccacctgcgcctttaagtcgtcgggaacggggatctcctcgacgccgtcctgcgtgaaacgatacgccttttcctgtaaggcgttgatacagccctgcatcttgccgttttccataatggggatctgaatgggcgccagcttgcccgcgtatttttcctttaaagcgcgtacggtgccgaagtagtcggcgttttccttatccatgccgttgatgaagatgatgagcggctttccgagccttaaacagtaatcgacgacgctttccgcgccgatgggaagcaccccgttcgcgccgatgacgagaagagcgccgcccgccgcgcgaagtccctcgtggcgttcgccctcgaaatcgtagaagccgggaagatcgagaagattgatcttgacgcctttccacattaaataggcgcaggcggtatacatggacattttcttggctttttcgaggtcgtcgaagtcggtgacggtggtgccgtcgagcacttttccctgacggtcggtggtgccgccattaaagagcatcgcctcgcaaagggtggtttttccctcgccgctgtgcccgatgaccgcaatgttgcggatattttctcctgtgatacccatataaaaagtcccccttgtaatgaaattttaaagtttgttatccgcaatcgataactgtcaccattatagtatattcggcgggaattttcaagggggttttgaaaaattttttgaaaaattttatcgaaagcaggaacgcggggggcaggtgtgcgttgaacttatgaatattgtcaaataggtggagcgatatggctcgaaaaggagcttttcgagagaattttttgaagggcggagaacaaaaagaaaacctcgcacggagctttccgtttgaggttataaattgagtcgatattttttgcaaaagaccgcgtattcttctcgaagcattttttcgacgcccgcgtcaatttcttgctctgtttttccttcttttttccattgagaaacggcttcttctcgtcttgccgcaaaagtttcgcttttaaatatcgcttctaacagcgcgtccgctgcttctgcccgagcattcttttcgttgtaattgagcaattcgttgggagattcttccaaatatgcgcacaaaagtaaaagcattttataatttggttctcgttctccgcttacccatctgcttattgtggtttgctttacgtgtaataattccgcaagttgcgcttgcgaaaaacctttatttttcatcgcttgggcaagacccgttcctaaaatagaccgttttgtagatttcattttttcacctttgaaatagtataccaaaaaggaataactctgtgtttatttatgccaaaacgtcataaaaatacttgactatgccaaaacgtcatgatataataaactcatacaataatcaagcagaacttttttgggtaaatatcggataagaagataaaatgaaaatatgttgttttggaataattaaatatttttatggcagttaggaatagttcgactcgacaattttttgtcctataaaaaaacgtaacaagtgttgctagtaactcatgatttttgtaaaaagcgatgctataataaacagtaaggaggagccgcaagcgttttaaaacggcagataaattttgcggcgtttcgtttctcatgaaaagggatttcagtcaggtattgcgcgaatttttaaaggacaaccgcatgacgcagattgcttttgcccgcgcgataggggcagacaaagatcaggtgtcgagatggctaaaagggcagtccgctccgaattattgggaaattcaaaaaatgtctaccgtatttgacatttccgccgattattttttgggactgagcgaaagttactgagaaacccgtcctttgacataaactcggttgacaaacgcgcgcaaaggggatataatctaaggcgacggcgcggaaaaagggaagttttcaggctctgaacgagaagaaactgcaatttctatttcggaccgggaaacaaagggcttgcgccctcgaataaaaaacggacggcggattcgtcggggacggtttatggaaggaagtcaggagcggatttatttcgatcatgcggcgacgacgccgctggacaaagacgtattcgaaaaaatgcgtccttattatacggagcttttcggcaacgccgattccccgcacgctttcgggcgggcggcgatgcgcgcggtggatagcgcgcgggatacgcttgcgcagcttgtcggcgcgcagccgaatgaaatttattttacctcgggcggcacggaaagcgacaattgggcgatactcggcggtgcgtacgcgcagaaagagaaaggcagaaaacacgtcgtgttgtcctcgatagaacatcacgccgccctttcggcgggggaacgtttggaaaaagaaggattctccgtcacgtggctccccgtaaacgaacggggcagggtagagccgagcgagttgaaacgggcaatttccgaggatacggggctgatttgcgtcatggcggcgaacaacgaaacgggcgttattcaaccttttgcggaatgcgcgcggatcgcgcgcgaaaacggcagcctgttttttaccgacgcggtgcaggcggctccgtatcttcccatagacgtgaaggcgtggggggcggatctgctttccttttccgcgcataagttttacgggccgaagggcgtcggggcgctgtatatccgccgcggcgtaaagatcggacggttgattgcgggcggcgagcaggagcgggggcttcgcggcggcaccgtcaacgtgcccgccgtggcggggcttgcggcggcgtacgaaaagaacgtaaagggaatggcggaaaataacgcgaggattgccgcgcttaaaaagctgtttttgaaagaaatatttgccaaagttcccgccgcgacgctcaacggcgacggggaaaattgcctgccgtccattgtcaatctttgttttgaagggatcgacaacgcggcatttctgtataacatggatttgcacggcgtggcggtgagcgcgggaagcgcgtgcgcctcgtcgtcggtgaagccgagtcacgtgttgacggcgatggggcttgacgaaaggcgttcccgttcgtccgtgcgtttcagtttcggcagggacaacacggaggcggagattgtccgcggcgcggctttgactgcgcagatcgtcgaaaaactccgcggctttgcaaatcgctgacgtctgcccgactttgaaaagaggaaataaagtccgctttttttcggggcggctatattgtatcctaaggagaaaaataacatgatcaaacatatcgtctgtttcaaattgaaagacaaaacgaaaaaagaggaagcgaaaaacctgcttctttccatgcgcggcaaggtgccgacggtgaaagcattggaggcggggacggactttctctcttctccccgttcctacgacgtgtttttgagcgtcgtcttggaagataaggcggcgctggacgcctaccaaagcgacccctatcacgtgagcgtggtaaagaaattcatgcacgcggaagcggaaagctctgtggcggtggactttgaaatcgaggacggaacgattgtgaaaaagtcgtaaaattttcacgattccccaaaaaaaattagttgtaactctttactaatcgcaaaaaatgtgatataatacgggtatcaatgaaatcggaggtatgaatcatggcacataaaattacggacgaatgcgtagcctgcggcgcttgcgcggatacctgtcccgtagaagcgatctctctcggtgattctggtatttatgtggtagatcccgacacctgcgtcgattgcggcgcgtgtgaggacgtttgccccaccggtgcagtcaaggccgaataagccctgaaagctccgtgcggcttttttggcgaatcgcacaaacgaaagggacgcgggggaactcgcgcctcttttatttttgaaagaacgcccggcggcggaaaaacggaggaagatatgcggcttgccgaaacggaagtcgtcgaggagttgctcgtcgataacttaaagatcatacaggatacgcggctgtatcgcttcacgtccgattcggtgcttttgtcccgtttcgcccgcgcgaaatcgggggatacggtggcggacttctgcgcgggcagcggaatcgtggcttttcatttttacgcgctccaccgcgcaatgaaggggctttcgtttacgctttttgaaatgcaggaagaactctcccggctttctgaaaagacggcggcgcttaacggcttcgacaatttcggtttttttcggggcagaattcaggatattcccgacgaataccgcgaaaaattttccctcgtcctgtgcaatcccccctacgagcgcggcggattggaaaacgacgactataagaaagcgatctgccgcaaagagatcaccgtcacgctcggagagatcgcgcgggcggcgtccaaggcgcttaaattcggcggacgcatcgcgctcgccaatcgcgcggacaggctcgcggaggtctgctatacgttccgcgaggcgggaatagagatcaagcgagtgcagtttgcggcgggcagggcagagatgaagccgtatctactgctcgcggagggcgtgaagggcggtcgtcccggaacggagatactgcccgtgctcgtcaatcaaaaagcagggacgcacggcgaaacaatcggagaaaaaaacaaatgaaatttgcgtttctcattttgggaagattcgccgcggcgcgcgacagggcacagatacgcggcggcgtgcagatcgtcggcgctgcggatatagacgaggcgtgcgccgccgtgcggcggctctgtttcgacggggtcggatgtatcgaactttgcggcgcgttcggcgccgagggcgcgaaaagagtgacagacgcgacggaaaataaaattcccgtcggctatgtcacccatctgccctcacaggaagagccgtatcgttcgtcttttttaaggtggcgaaaaaagaaaggaaaatccgaaaaaaactgcggaaaattcttttttaaaaaccgcctgtttcccgtgaaacgcaaaaaaagcccgaattaagtcgaaagggcgcgtttttcgccgtgggaaaagaaagataaaaaacagcgtgttttcggcaaacgccgaaggggaggaagagatgatatcattcgtggcgacgccgataggcaatttaaaagacattaccctccgcgcattggaaacgttgaagggcgcggacgtcattttctgcgaggacacgcggcacacggtgaagcttttaaatgcctacgaaatcaaaaagccgctgtttgcctgccataaattcaacgaaacgagcgcggcggaaaaaatattgcagctgtcgcgcgagggcaaagacatcgcggtggtatccgacgcggggactcccgtggtgtccgatcccggcaatatcgtctgcaagaccttgcgggaggcgggcgagccgtacactttgatcccgggcgcgtgcgcgttcgtcgctgccctggtgctgtcctcgctgcccgccgatcgattcgcgttcgtgggctttctccccgataaaacgagcgagaaaaaagcgcttttggaaaaatataaggatctcgacatgacgctggcgtttcacagcgcgccgcaggatgtagagaaagacgtcaaggccatgtacgaggtgttcggcgagcgccgcgcctcggcggtgcgggagatcaccaagattcacgaagagagcgttcctttccttctttccgaggggcttgcgggcgaaaagcgcggggaatacgtgctgatcgtggagggcgcgggggagaaggtcaatccctggaacgccctttcggaaaaggaacacatccgccgttatatggacgagggattggataaaaaggaagcgctcaaacgcgccgcgaaagaccgcggcgtttccaaatccgaactgtatccctttgcgctcgatttgtagacgagtcccgccgcagaaaattttacgcacatagaaggataaaaaagagctttcccaaagcggaggaaggctttttttatttgagaagcgcgccgaacgcggcggcgcgttttttgagcgctttcccgccaagaaagaacgcgcgggggacggaaaaagaagcggcgctcgttttcgaaaaagaccacgatggggctttttcgcgcttcctgtcagatggataagtcgctcttgtcgtttccctaagcgtccgaaaaatgtcgcgaagtcttttcgcgctttttttacaaacgcaaacggcgcttgcctctttatttaaaaagttgcgtaaatttcccctttctttatcccgaaaaagaaaggggacgtcccaaaaaagttcccgtcatgcgaagtgcgggggacgcccgcggacgcatggcgctttttcccgatttccccgcgcttttttgaaaaagcgcagaacttcgttttctaaatttcaaagcactccaagactttttccttcccaagtccccgtttttgcttaaaccgtttcgagttcttttcttacccaacgtaaaaaggacggattttgcacatcctttctatatcgtccgcgccaaagcgttttcagcgcacgctttctctcacggcaagccgtcgcagtctatcagggcgggacgaaagggcgcttttctgctgaaaaaataaagaaacattatttttcgtgaaaaagtaacaaaaagtcataaaaatatatgataaaaatattgacaggcgcttgacttctttgtgaaaagcctttataatacagaaggaacgtgcgcagaggcgaagcatttgcgggcgtaaggcgtatataaattctgtctgtttccgcgtgacatacgaggcgcggggaagggcggaaagtgagggcaaagcgttgcgccgtctttgcgaggtcgattgcgggctgcgacgagaaaaaacttggaattagagaagaggaagaaaaaatgagaagaaaattaaaaaacaagatcgcactgttttccgcgggggtgttaggcgcgggcgcgctgttcgctctggcgggctgcggcgccgtgaaaatcagcgtcggggaaacgatcgcggagggcgaaaccaccatcatcgcccatcccaccaagacggcggccgaatacacggccaaggaaaacgcctatattttggcgggcaagctgaaaagtctggactcttaccgttcggacgtagagggaaaagtcgtcgccatgggcgggctttataaacagacgatcgcggacgttcatatcaagagcggaaaggaatcgtatatggaggctctctcctcctcctccctcgtcagcgtcggcaagcaggcgttcttcaccggggataaagtggtgatgcgggactccgataaaaaggattcctttacggtgacgacacttcaagaataccgctccaagatcggctgcgagcccacggcgctctctaactatatcctcaacgaggaaacgatcaaaagcgcggaactcgtttcccgttcggagggcacgtatacctgtcgctacgagatcgaccccgtaaaaggcacttcccgctatgcggtgaagatgatgaatttcgggggactcaaagtggcgcccgagttcgaaagctgcacgatggagctgacgttcgacgaagactggaatcccatctctttaaaagcggaagataaatataaaatcagcaaatcctttctcaacaacgtatcctgcacgtcgacgctgacggaaacgttttccgagatcggcaaggacatggaaattcccgacgcggcctctttccgcgcccgcctgggcgacgacgtcacggatatcgatcccgacgacgtggagaaagacgaactcaccattctggctgacgcccttttaaatatggatttgccgggcgggatcaagatctgcggcgaactgacggcgaacgaccggggcagcttgttgttgtccctgcctgtggacggctggctctctttcgacatcgaaaagctcgcctcggacggactctcgtccgcgttccgcggcagggtaagcacggaaattggaggcgtggaaacggaattcctctatcccggcgacggaatgttgtacgttcgggtgggagaggccgcgtatcggtacgcgattccttcttccgaatcgggaacggaactcgacgacgtcctgcgaatgttccggctttcggcggagggcggtcagggaaacacctatgcctatcgcctgacgctcggcgaagacctcctcgctcccgccaatgaggcgatagagcttttgacgagttctctccccgacgattcgccgctgaaagggctggcgataaacgaggtcggcgctctgatctccatacatagacaaaacgaaaaagacgcgggccgcattacgggcgtagaacttagcggagattttggtatcgcttccctgagcgcgcaggtggtcgccgcagaagcggcggaaaccttgccgaacgaagaagcgcttgcgaagtacgaagcggtggacgtcgaagatatggcggcagtgttaaattccgttttgaagatggcgggcaatctcgtcaacttcaacgtgagtatccgcggggaattgacgctcgaagcgggagcggaccgattgctttcgttgccggtgaacggctgggtttctttggacgtggaaaaactcaccatggcgggactttcgggaatgttctcgggaaaactgagcaccgaagttttgggagtccccgtggaattactctacgcgggcgacggattcctgtatgtgcaggtgagcggtgcgaagtataaatattcgctgtccgaattagaagaaaatatagatataggatccctgcttagcatttttaagctttccgtgacgaacggaagcgacgatataaaggattataaactttacgtgggagaggaagcgctgacggcgttaaacgaagcgctcggcgccgtgacggagtcgctccccgcggactcgccgtggaaaggactttcgttcgacgaactttctgcgtccctttccgtctataaaaaagggaatgatcccgcaaggcttgcgggcgcgcagctcgtcgcggatttgggcgtcgcctctttgcgcgcggacgttatcgtgcaggcgggcggggaggctttgccgagcgcagaagaacttgcaaaatacgaggaggcggagtttgtcaccctttcctccaatctgggcgcgcttttgaaaatggcggtcggcgttgccgattttgactggtcggcgggcatgaatttcaccctcaacgtggggctggactcggacgccaacggcaactttatgatcattcccctgcccgtccagttgcagattttgcccgaggaacttttggcgggcaacgtatggggctgcttccgtatgcacgtttcggcgggcttgggactgtctatgttcgggcttcccgatatggaaatctactatgacaacggaactctttacatagtcaacacgacgaagacggacgacgggaccgtatatgcctcttccgtgtcctccgtggacgtcaaaggcgcgctggcgggactcgcggcggataatctcggcgctattttaagcggaattttcggcggctcggatacggacatcgtcgctttcctcgccgacgcggtgatgagcgcgcagctcgaagtcgtttctttggaagacggcactctgcgctatcagttgaatgcgggcgataagctcaccgccttgctcggagcggggtacggatcgatttgggacgcgctgaacgcggcggatattccctcgatggaagcgttcaagcccctcttgatgatgttcttcaatttcgacatcgacagagtttgcctgcgcgcggactttaaagacggcgctctgagcgccttgtccgtacgccttaccaacgacgggacggcgccgttgggcggcggagaggatttctccttcgtggtcggcatgatgatgggagaacaggcggcggcaggggaaatggacgaatcgttcgcctttttgacctcgtcgctcgcggcgtacgaagagggcgcgtccgtgcgggaaaagctcgcctctctcgcagcgaacggcgtgcggtggctgggcgattcctacggcgctttgctggacgaaacggaggcggcgtataacgcgctgtccgaggcggcgaaaatgaccgttgcggactatcctcgtttggcagagctgcgcaaagagtggacgcagctccgcgcccctgtatctcagctttccgcgctcttgggcgaattgaagacgtacgacggcatggcgggtatggaagtattggtgggcgcgattctcgaacagtccaatccgattttcgatgcgctcgacgaaagacagaaggaatatttcggcgattacgccgtgaaagagtatttagcgatccgcacgaagtacgaaaagaacgtcgccgtgcccgaactgaaagcggcgatcgataaactcaaccgggaaacgtacggtacggcggcgcagcttttgaaggcgatctccgccgcgcagacgaagtacgacggattatatgaaacgagcaaagagctcgtcgataattacgataagatagaagcggcgcgcgccgtgcagaaggaaatggcgaaagaggaactgaacgcgcagataaaagagcttctcgcgaaactcggcgccgtaacggagaaaacctcttatgaagagatgaaggcgctcagacagagcgtggacgccgtcgcgaaagcgtatgcggcgctgtcaacggaggaacaggccggaatctccgattataaggcgtttcaaacggcttccgcttctttctcggaagtcttgaaggagcgtttccgcgcggcggtaaaagcgctcggaacggcggacgccatcgtaaagggcgacgatacgtatgcgaagattgcggaggcgcaggcgtggaaatccctgctgaataggacggaactttcggcgctggaaacggaaacgaatattcttacggcttgcgcgaataagcacctggcgatagaaacgagcgaagtggaagaaaaaatttccgccatcggcgaagtgacgctgacggacgaatgctatcagaatattttaaaggcgcgggcggcgtacgaaggcttgcgcgaggactatctcacctggatttccaatcgcaatagtttggcagaagcggaagcggactatgtgaagctttcgatagacgcgctgaacgcggaaacggcgacggaaagcgaagtcgccgcggttcgcgcgctgtacgattccgcgatcgccgcctatgagaacgcgcccgcccttcacggctccgtcgtcagtcgtttgaaggattatcaggcaaaactggaagcgctggaacaggcgttcgcccccgccgcataaacgaaaaacgaataaaattcggacgttttccccgcgtaagtttacgcggggaatttttgtgcggaacgccccgcaataaaatatagcgcgccggctctgtcgtcagccgaggactttaagaatcggcaaagctatataaaaaagctcccatgtaccgaacggaatgtaggctcgcaaaccgtatacgaagtaaaactacataggaggacgttagaggagaaattcagctttacacaacacggaaatatcaatgtcctcgtgtatttgcgtcaaaagatcatagaaaagtcctatttggtgtattgaggagagatagagagaaaacaaagataattttaaacaagattgtaagcggtggacagtcttgtgtgtcgtttaaacaccccgctaatattcgtgccgtttagggcgattcttaatgcgttttagtgggggagattattaaaatcttgataaagctgcaacgaagcccgggagtatttctacctaaataatagagagaaaaccaaaaattgatttggggaggattaaaaatggaagtcagaagaaagaagagattgaaaataataatacctctttgcgtgtgcgcgatactgttaattgggattgttttatatctttttttgccgccgacgagaggcaagtacaggttagaactgcaattggattatcgaagcggtgaagagcggggcacggcgttgagcggctccgagcgaaaaacgttggaaacaaaaacaggcgaggaagttcatttttcgggagaactcatcaatgggacggcgcgttggcagaaagcggcgtttgcggaaaccgaactgttaaaaatcacgatatatcgcggagaggaaaaggtttatgaaaaaggaagcgatcgcgggacttcttacacctttccctggagggtaggttgcagatgctattccgagtatagactgtacttttcttatgcctttgaagaagcgggaacgtatacggtgacagcgtcctcgaaattcaaacaaatagggaaaagttattcctatcagacggagccgctgacagtgatcgtaaaatagaaaaagagaatcccccgcaaaaattttgcgggggattcgaataggcggctgtataaatttcgttaaaggcgcacccaggtgtttaacgaacgcttaaagataagatttgagtttcttttcgaatccctcttccagcgcgatgagttctttcaaaagcttggtgatttcctcgtcgtcgtcctcgggcttttcgctgagagaggttttgagagaggtgatgcccatcaccgttccctgaatcatcatttccgcgatgtgcgcgcgggaattgtctgtcagcgtattcatcttgatggaaccccacatcatcgcctttttcatgggattgggttccttgacttccagcgctttatcctgtgcgatacacgccgctctgcccgagattcgttcgtactcttcgtgctgacgcatgatctccgctttcaattcctcgtcgtccacttcgggcagaatgtcggaaatagattccaacgccaactgacaattgcggtaaatttccgctaaaatttcttcgctcttttttgcttccatagccatttctcctttttatcaacagtttttgcacattctcttggaaatatgcaaaagaaaaagagcgtttttgtcccttttgcttccgttttataaaagaaaaacttctgaaaccgcaaaaaacgcttgacggaaaggcgcggagtgtggtatagtatatttcgagccgacagaaacgggcttttttaagcgtaattcttaatccatgagaaaagcgcgccttgggttcttcgagactggaaagaggaggtaaaaaaccatgtacgctatcatcgaaaacgggaacaaacagtataaggtggcggagggcgacgtcgttcgggttgaaaaactcaaagcgaacgagggcgaaaccgtttccttcaacacgctgatgatttccgacgagaacggtatcaagacgggtgcggaagctgccgcggtcaaagtaaccgctacggtcgtaaagcaggacaaggacaagaagatcatcgtcttcaagtataagtccaagaaaaacgagcgtaaaaagcagggtcacagacagccctataccgcagtcaaaatcgaaaagatcgagctttgaggttttgagtttgcaacggctccttttagcgatagggaacgcacaggagcaaaaaatctaaataaggagaaataaaaatgatattcatcagtttattcgctcataaaaaaggtaccggctcttcccacaacggaagggacagcgaagccaagagattggggcccaagcgcggcgacggtcaggcagtgcttgcgggcaatatcctcgttcgccagagaggcacgaagatccatcccggcaccaatgtcggcatcggcagcgacgatacgcttttcgcgctcgtcgacggtgtggtgaggtacgaaagattgggcagagataagaagaaggtcagcgtttatcccgttgaggtcagcgccgcggccgccgagtaaaaacaactttatcaattgtcgcccgactttgcaaatttggcagagtcgggttttttattgtatccctcggcggatagcgccgtataaaattccgcaaagttcccgcctttccattgtttggggaaatagaagtctgagattgcaggataaagggatagaattttctaatcttgaaatcatagagcgctttttatcggaaaaacgttgaaaacgaaacttttacgtgctataatgatactaccgccaagcggaggtgaagagaatatgataaagaaaacataacgtaaagagaggaacgcgccgccttgcggcgttgggcgcgttgatggcggcggtctgccttgttccctttgcgggacggaaggaaaatgtgcgttcttcggcggaaacatacgccgtcgacggtatcggcttttccgtgaacgtatttaagcgcgaatacggagaatttgacagtcagttctccattctcgacggggattatatcgtaagcggagaaatgcccgtgacaaagtttgacggattcggcggaacattcaacggcggaaaaagctataaaacctatgctgcgctcgcaaaagacgtcagttccgactatcacttttcccacgccgatcttaacggcgcttacgcctttttggcggaggcagacaaagccttcggcggcgttttatccatcgggcaggaaacggagccttgggacagcgctttttatttttggaaagaaagaatggtgtctttctatacgcttagattagataattctaatggtttttttatcgactattataaagaccatctcaatccctattttctttttgctttggagcaaataagaacgggagagataggctacgaggaatttttcgattcttacggcacgcatctggtgacggaggttacttacggattgcgaacggtgggttactacggagctttctgtcaggggggctatttggacgaaacggcgcgtcagcagctccacgaatcggcggaaagcgcctatgacgcatatgcggaggggaaagaaggattttggaatcttcccgaaaacgttgtcgaaaaatataatctatccacagtcggcagtttccgtaaattaggggaaacgtccgcggaggaaaaggaggaaataagaataaggtacgaggatttgcttcccctgtataaggcgttgcccgaaacttatgccgatctcgcggagccgatgaaagccgcttttgcggaatacgccgccgcccatacgcaattatacgaaaattccgtcaaaaaggaaagagtggaaattcgcgttccgcagtcgaaaaacgttccttatgcggggatcgccatacaaaaaatgctcgtgacgatcgcgggcggcgttaccttctccacgtatgccgtctgcgcggtcgtcctcgtcgcggcttctgttctcagacgctgccgctcgcgcagggaaaagaccgacaaccgtcctccccgctcaaaatgaaaaaagtttggaaaattttttaagaaaagacgct

SEQ ID NO: 3880 - DNA, 32347 bp, Unknown
  16S sequences of unknown bacteria
atgccgatgtggtaaagccattcacggcaaacctcctcacctgtgcagtcacgcatagcctttttaacatactgaccgggcttgtttgtgttaagtgaataaagccaaatcaaaacagagttcttgtcctgcgatttaaactgtggctgacggttgattgtccatgaaagataccagttttctgtgctgtccttaaccgttacgataccgcctgttgtaaccttgccgtctcttgggtcacgcttgcatacctttataatgtgctgaatgatctcctcgtttgatgtttcaatcgttgcgctcatccagtttgtagcgtctatatcactgcaaaatacatcagggttgccgaattcgccgtgctttgcctgccgtgcaatattcttccacatatcccatgattcgcccttgccgttttcaataccggagaggtcaggtgcatgagtctgatcgccgtagcaagatgtatcggtgcaacaaccgtttgttataaatacaaggtcgtcttcaatcaaatctattgtctgttctttgccgtcttttacatatacgatttgttttgcaatctgcttgtcaccctttgtttcgataacaacatttttaacatccatgccgtattctatcttaacgccgtgggcttcaagatatttaacaagaggtaaaatcatactttcaaactggttgtactttgtaaaacgcaaagcactgaaatccggcaaaccgtcaatatggtgtacataacggcagaggtaacgcttcatttcaagggcgcttgaccaacgctggaaagcaaacattgtctgccagtagagccagaaatttgtctgccagaaagaatccggcaaaacatcggagatctttttatcttcaaggtctttttccggggtgataaacagctttgaaagagccattgcggattttttgtccaatttgaattgcttatcggtgtgtgcgtcaagacctctgcttgtacttgctctgcaaagtgagtagttagggtcgtgtttgttaagccagtagtattcgtcaaggacggtaacaccttctttttcaatagacggcacatctctgaaaacatcccacataacttcaaagtggttgtccatctctctgccaccacgcataaagaaaccttttgttatgtcctttttgccgtcacagctgccgcctgcaagctccaatttttccaaaaggtgaatgtgctcgcctttcatctgtccgtcacgaacaagataaaatgccgccgtaaggcctgcaagacctgtgccgatgatatatgcggattttttgtcaacgccctccggtttctccgggtgagcaaatgattcataagttcctgctgagtaatacataaataaacctcctaaatatttagggtataaccccctgtgtaaactgtttaatttctttttgtgactatattatattttgctctgaacgcttttacaataaacaaaaatattgccgtgataatttttttatcacggcaagtaatctgttaaattttttatcatttttatcgttttgataaattttcggctgtttattgagaaacttttagtctgtccaaggcggccttgatattgccctctaatatcaaggccagcttttctactatgatctccgggtcttctttcatatcgtcctttatccagtccaacataattcccacaaagcaataagaataaactcttgctataaaagccttgtcctcccggcgcacatgcatatcggcagactcctcctcaacaactcccatcaacaggttgtctgttaaaggggttaggtatcgttcaacctgcccacggtcaatacattgatacacattcattataaaaggtttgttgcttttaacctcgttgaaaatctgcaaaagcccctgttgccaagtgtcgtgagtctttttctcctccaatgcctttttggcgtcttcaagacacacccactccacaaggtcataaatgtcttggaaatggtagtagaatgtcatgcggtttataccgcagtcctccgcaatgtcgtttatggtgattttgttaaggggctttttcagcaaaagatttttaagcgattgttcaagggctcttttggttacctgtgacattaaagcacctccgataaatatttattgtatatattttatattaaataaatttatgtgtcaatcttagtatagccttaaaaaatgtgaaaaatatgtaaccgataatcattgtacaacctacaaaacattgactgaaatgtgttatcgtggtattattataaaaagtaaagattataaattaggagtaaattatggcacagaaagtaacaggacctcgtggcactcaggacgtttctccatatgaaagctacaagtggcttcggcttgaaaacaaattgcgttcaatagtcggtcagtacggatttaaagaaatccgtgttcctacatttgagcatacagagctttttttgcgtggcgtaggtgacacaaccgatattgtaaataaagaaatgtacacctttgaggataaaggcaagagaagtattactctccgtccggagggtacaagccctaccgttcgctcggttttggaaaaggggattttaaatgaaggcacacctcttaaagcgtactacatattaagctgcttcagatacgaaaaacctcaggcaggtcgtctcagggaatttcatcagttgggtattgaattatttggggcacaggattacaccgcagatgcagaggttattgcaacaggtgcaaaagtgctgaacgatttgggtatcggcgataaggttaagttgaatattaactcaatcggctgcccgaaatgtcgtccggcttatcaccaaaaactgaaagcctattttgcatctcacagagaggaactttgtgaggattgtcaggcaagacttgacaaaaaccctcttagaattttggactgcaaagttccgaaatgcgcagagcttgcaaaggatgccccggttggcttggataacctgtgcgacgagtgcaaggatcactttgaaggccttaaaaagacccttaccgccatgggcgttgattatgccattaacactaaaatcgtcagaggccttgactactacacaaagagcgtgtttgagtttgtatatgacggtataggcgctcagggtactgtgtgcggcggcggcagatacgacggtttgtttgaggaattaggcggcaatcacgtgccggcagtaggtttcggcatgggtatcgaaagacttttgctcacccttgaagcagagggaaaactcaattttaaagaggaaatgccggatgtgttctttgccaatataggtgaagaagcaaagatttatgcctttacaatggcagaaaaggccagatatgagggactttccgcacagtcggatcttatgaacagaagtcttaacgcacagatgaaatatgcaaataaaatccgtgccaagtacaccgttgttttaggtgacagcgagatggaaagtaaaaaggctgttgccaagaatatggaaacaggcgaaaagaaagacattgaccttgaaaagtcaataaaagaacagttgttttgagaggtaaaataaatggacagaatgggaaatatgcgcagaacacattattctgttgcagttaagccggaaatggcaggacaagaggttgttgttgccggctttatcgcaaaggcaagagaccttggtgctgttgttttctgcgatttaagagatacaaagggcattattcagcttaacttcaacgacgaatgtccgagagatgtttttgaaaaagcaaaaacgttgagaagcgaatatgttgtaatggcaaagggcgttgttgcccttcgtgaaagcgaaaataaggatattgaaaccggcaagatagaaattcttgttaaagagcttgttcttttgtctaaggcagagacagcgccttttgaaattaaagacggcgttaaggtaaacgatgagttgaagttaaaataccgctatcttgatttgagaagaccggaagttcacgagggtcttattttcagacacaagatttcaaaaattgcaagagactattttgacgctaacgattttatcgagatagaaacccctgttttgtgtaaatccacaccggagggagcaagagactatcttgtgccaagccgtgtgcaacctaataagttctttgcgttgccccaaagccctcagctttacaaacagcttttgatgctttcaggctatgacagatacttccagattgcccgttgtttcagagatgaggacttgcgtgcagaccgtcagccggagtttactcagattgatattgagatggcttatgttgacgaaattgatattcagacaataaacgaaggctttatcaagaaagtattcaaagagatgatgggcgttgatgttcaaactccgtttatccgtatgccatacaaacaggcaatggaagaatacggttccgataaacctgatacaagatttgaaatgaagctttgcgatttaaccgattgtgtaagaaatacagaattttcagtgtttaaatccgcaatagagcagggcggcagcgtaagatgtattgttgcaaaagaccttgcggacaagcttacaagaaaagaaattgacaagcttacagatgttgttaagacatacggcgcaaagggtcttgcttatacaagaattaccccggaaaatacaacatcaagctttgaaaaattccttacagaggaagaaatcaaggctgtacatgaaaagtgcggcgcacagacaaacgatgtaatcttcgttgttgccagcgatgataacagtgttgtgtttgcgtctttgggcgcactccgtctgcacattgccaaaaagttccagcttttcgacccgaaccggtacaacttcctttgggttacagagttcccgttgtttgaatggaacaaggacgagaacagatacgaggccgtacaccacccgtttacaatggtaaacgaagaggaccttgacaagattgaatccgacccgggttcttgccgtgcaaaggcttatgatattgttcttaacggtatcgaattgggcggcggttctatcagaatttccaaccctgaattgcagcagagaatgtttaaggtattgggcttcaccaaggaaagaatggaagacagcttcggcttccttatagaggcttacaagtacggcgcaccgccacacggtggtatggcttacggctttgacagactttgtatgcttatggcaagaaaagattctatcagagatgttatagcattcccgaaggttcagaacgccagcgaattgatgacaggcgcacctgactttgtagaacagaaacaacttgatgaattatatattgacttaatcgaaaaaaagtaatatactaatacggtaaattattatcgcacataggaaaagagaggagtataagtatgtattcatcacttttggcgttgttggatgccaatcaggttgctttggtaacaccaagcgaaaatatttggggctatatcggttttgtcgttgtagttgctatgcttgtttgggacagagttaaaaagagcaaagcaaaaaaataattttataaagcaaaaatccgcaggttgcaacctgcggatttttattttgaatttagatagaattattctgcaaagatgtctttgagatgcgggtttgtgttaatgacttttacaagtaccaaacccaaagcaacgcttattgcctcgccgattgcaacggaaactgcctgggcgacaaatacaacaagattaaaacctccgctgatcataacgcaaagctccatacccacaacaagggcgttgagtataataggcggcagggcagaaagaataggcagtccattaaattttatgtttctgaatgtatatgtcagaaatcctgcggaaagggtggcaagggtgccgaatataacatccatccagcccaagatatttgtgccggagaatacccctacaatgtttgttatcaaacagcccaccgaaatgccgataatgtttgtagtaccgaataccggcagcattgtaagtgcctcgctgactctggcttgaaccgtgccaaagctgataggggcaagggcaagactgactacggcgtaaatagcggcaatcattgcctgttttgtgataaaatttgttttttcatttaaattacctctcaaaaatatattaaggcgattattgtagcacaagccgcaatcctcgcctttaaaacaaaataaaaaagtacagcaagaatttggcaattctaactgtacttaaataccgtattagttaaaaagctttggaaatgcgcatgggaaaagctttaaggcccaagcgatcattttttacctgcgtaaacaatagccaagcagtggttgccggcattggtggaaacagccgcaccaagctcaaaagacatgataggtgccacgccgaattctttaacgcaagcggaatacaactctttaccgtattcctcatcagtatatgcaattaaataattatttatatcagaagtacgctgcttgtactgcttaataagatttggtataaccatcttatcgccacgaaccttctgtacaacccgggtatctccgtgatccattaagatgataggtttaagcccaagcacctcgccggcaaaagcagcccgtgcagatattctaccagattttttcataaaacgcaaggaaaaagttgtaagaagtatctccgtgtgtttaaatgtttcctctaaataggcaataacgctgtcggcggtagagccgctttcaatcattttgtctgcctggataatcgggtaaccgtaacccatagagtagcaggcgctgtctataacggttattctcacaccgctgccccgatgctcctcatcaaacatattttttgccattaccgccgcatcgtatgtagcactgccgcctttgtttattgttacaacgataatttcctttacaccccgatgggccatagcttcaaacttttcaccgaaacgcatcattgtgatgtgtgccgtggtaggaatgctttcgcagttttcaagtattttgtaatattccttatttgtaaaatcggctctttcttcgtagcccttgctgtcaacagtcaggtaaaaattaagtatttctgtgtttttcaacttggttttaacaggaatatcacatgccgagtcggttataattcttatagtgtcactcaaaatcaattctcccaatcgtattttgtcaaatgtcccacagattcaaagccctcaaaatcccactgtctgagtatctcatacgtggcgatagcaacggtatttgaaagatttaagctgcgcaggtgccgtaacatcggcaggcgaacacatctgtccgggttggcgtaaagtatagcctcgtcaatgcccttgtcctctctgccgaaaataataaagcagttgtccgggtatttcacatcggtatatctgtgttgagcctttgtagtgaaaagataaaattgagcatcgggattttttgcaaaaaaatcctctgtattttcatacaacgtcacattaagcttgtcccaatagtcaaggccggcacgcttcatttttttgtcgtcaagctcaaatcccaaaggcttaacaagatgcaaatgtgcacctgttgcggcgcatgttcttgcaatgttgccggtgttctgtggaatttgcggttcaaataaaacaatatttattgtattcataattcttttcctctataaaataacgaagaatattatacaccttttaaattgaaaatagaatacttttcacaaaatttaaacataaaaaacgctccgaagagcgtttttttaaagttttattgaacttttgaactttactttttctggaaaagatttgcctttttaagtgccggtgcgataaggtgataaagagcaaccgaaacgataattgcaacaactgcgtttatgcagcttgtgatagcttttgttgtcaaaactgtaacaatagcttcctttgtgctgccgagagcaacctgctgcaagtatgatttacctatgtacaaaagaacataagagaatgcaccgcagatagcagcaataatgtttttagatgttgtgcgtgtaccgcccaatgttgcgattgtgccggctacaaagcccataataaatttgtttataaagctaacccaaaattcaggtgcccaaaggggatccaaaaggtcaacgatggccgtaccgatacctgccgcaagaccgccgggaacaccgccgaacaaaaggcctgccaatacgcacatactgttgccaaggtgaatttgtgttttaccgccaacgcccaccggaataggaatagcgaagaattttgttgtgataaatacaagcgctgccataacgccgatagctgcaagtgtttcaacactgaattttgactttttcataataattacctcttaatcgaataaatactttaacataggttcaatatggacaccatatctgacatctgggtcatctgcataactctgccgtacaactttttcaataaatcttgcggtcttttcacaggctgtgggtaaatcatatccgtttgtgtaatatcccacaagacaagcaccgaacaaatcaccggttcccgggtaagaaacaggtatgtagttaagaggaataaatgaaactttgtcttcattcttcttataacttacacaaaccacatcaccgttatcaagatgtgtgccggttataataacatcacagtactttttacccagttctgcggcaatttcggctatttcttcttttttaaagacctgttgagtataatctctgtccaaaagaataagagcctcggttgggtttggtgttatcaaatcccgttccgtacacaggtccttaaacgccgctatcatatcgtcgccgatagtggagtagagcttgccgttgtccgccattacagggtcgcaaagctttaagccggaatggcacatggtgtaagcgtttttaactaattgcgcttgctgtggggaagacaagaatccgctgtatacacagtcaaattcaataccgatacgccggtagtgttccatacaggcctggcaaaagtctgtcaaatcctccattgcgggcttgcctaaggcaaagtgagcagataaaacagccgtcggcagggcaataacctgagtgcctaaccgtgatattgttggtgttattatccgcaggctgcttctgcctacggtagatagatcgtggatgcacaatgctttttttggtgtcatatttaattacctctgtcattttctgtattataaatcatttgtcataacaaatgttgactattgtgtaaatattaacaaagtgttaaaaaactttgttaacaatttgttcataatttgaattactatttgagtttttcacataaagacaaaacccttgctatcgtatttccggtacggacagttattttgtttgcaatatcagccgaccgtgtttttgcccaccattttgattttcgatagtctttaagattgtaagaccaaaatataaaattgtcggataccaggtgcttttcaatatcttcattttcccgaccaagttgttgggcgatttccggcccggtaaagggcggaatagttaaaatcaaattgtcgtaaatttccttgttgccggtgtgccaccatccgggggcggagcacataaccctttgcagtttttcggcggaaacagcgcatacgggtatatccaacccgaaattttcttttataaaggtggcaatgtgatgtgacaattcggtttcctttttgtgggaagaaagcacaatatttccgctgtttaacagtgtttcagcgtcgggatagccgttttttgacaaaattgcttttagctccttcataggaattttgtttttccgtttatgttgatacctcttaaaaatacggcgtatatcatataaactctctcttttcaaaggcctctacaaaccacggatcggcacattcaaaactcttgccggaaagataggaataacgcttatcctcaatgtggccgaatgttatttttttactgcacaacagctgatattttaactttaatttgcggtttaaatcgttgataccgtatctgccgtcgccgagtatgggcatacctaaatatgccaagtgggctcttatttggtgggttctgccggtcacaagctccacatttaaaagagaaaatctgccgtagctgtccgaaagatgtatttttgtggttatatcctttgacattttatttttcggtttttcggtaattgtaacataactctcacggctgttttttgtcaaaaatgccttatatgtgccatcggctcttgcaggatgtccctttacaacccgaatgtactcttttttcagctctttttctttaaaaagctctaacataaaatctaaaaacacttcgtttttgcttattaaaataacgccgcttgtgcctgtgtcaagcctgtggcacagtttgggttttgtatcggaatttttgtcataataatattttttccgtctgtttattaaagtgtcataatttttaaaatcatcgtcaattacggctatgcccgatggtttgtttacaacaaggagattgtcgtcttcgtaaataatgtcctcatctttaaaacctttgctgaatttaaaagcgtttgatgccgtcagtttttcaaaataaaaatcatctatatataattttacgctgtcgccttttataagcgccgtattcagcggaaccttttttccgtttacctttattttattggcacggagcattttgttttgcaccccgatttttaaaagcgggtatgtgtgccgcaaatattcggaaaggctcttttcatttttttgtataataacttctttcaatttatcaccgccttaaaatagattttatcaaaaacagcgcaacaatacaataaatatttacatttttatcttaaaatggtaaaattctgttaaaagaggtgcttagtatgaattttgaagaagtaaaaaacggatttttcgcaagattgggcgaaagttgctatatggttttggctacaagttatcaggattaccctatgcggagtatgatgacttgccttgtatttgacggctgtatatggatgcagacggataaaaagttcccgaaatatcagcaaattttaaataacaacagggttgcccttgttaaaaatgcggtgcaaattgagggcagggcagagataacaggacacccccttgaaaagcaaaacgaaaaatttgcccggcttatgaaaaagtatcacccggaaagctacaatatgtattcaaaagttgacagtgaagtagttataaaagtaactcccgaaaaagcgatagattggctttatgaggcaggcagtaacgaaatacataatattgattttgtaagccaaaaagaagaaatacaaatttataaaaacggtaaatgatatgttgttatataataatgtattagaaggaattttccgccggcgaccaaacaggtttatagcctatgtggatataaacggcaaaaccgaaaaagttcatgtaaaaaatacaggtaggtgcaaagaactgcttgtgccaggttgcacggtgtatcttgataagtccgataatccaaaccgcaaaaccgtctatgaccttgttgcggttatgaaaggcgatacccttataaatatggattccgccgcaccaaataaagtgtttggacaatgggcaaaagaaaattaccccggtgcaatcataaaacccgaggtaaagtataaaaattcaagatttgatttttacatagagcagggtgacagaaaaatttttaccgaggtaaaaggcgttacacttgaagaaaacggaattgtaaagttcccggacgcccctaccgaaaggggattaaaacacatacatgaacttatcgacgcagtgggaaacgggtacgaagctcggatattttttgttgtgcaaatagaaaatgtaaagttatttaccccaaactacgccacacatcggcaatttggcgaggcactgaaacttgcaagggaaaaaggcgtaaaaatacttgtctacaactgtaaagttacaccggacagtatgtcaatttaccgcccggtggagattgagttataaaaaagggcttagaaaatttctaagccttttttgtttcgttataaataagcgtgcaaaattggaatttacccttgcggtaatctattgcaaagatgtgcttgtattttgaaagcgttgttcttatattattaagtccgaaaccgtggtatgggttgcggtctttttgcacaacataggttttatcttttatcgtaaccggcaaagatgaatttatcacggaaataaaagtttccgactcatcccgcagtattttgatttttaccgatttgtcatcggttttggttgcggcctcaatggcgttgtccaaggcatttcccaatataattacaatatcgttgttgcttatgggcagtttgcttaaatcgtttatttcaaaactcatggcaatgccaagctgctggcctttcatatatttttggttgataattgcgtcaacggttatgttgtttgtatcaataaccattgttctgcgggataccgtggataaaagattttccgtgtagtccacaaccgtttgcgcctgttctctctgcgccatatcgtgtattgtatgtatatggttggaaaaatcgtgggttagttttctctgttgtgaaaacatatttttcaccgtttccacattgccggtttcggtttttagctgctgttcaagaataattttttcctgttcaagttccctttccaaactcaacttatcaaatattgtaaggataaaaatatttgccaatattataccgaaaacatcaatcaaaatggtataggatgttatattgtaataaaaagttatgtttagtaaaataacaagggtaataaagctgaaaattgggaacaacgccgaaagataaaagtattttttctcaaaagtgcttattttcttgtttttaaagcatatttttacgatgtatgaaagcatataagccgtaaattttgatgacagcatagctattacatatacgcttggattagtcagccaactgttgtaatcggcatttaaaattttaaagactaaaaccacatataaataatcaacggcatataacaatgcatatgaaattatcgcaattattgtttttgcccaaattgaatttgagtaagtaatagcgaataagatgattaccaaaataaagtttacaaaaaatgtagttgtattgttattatcaaatataaaattagaagatataaaagttgacaatatccaaaatgcacaagatgcccatttagggatttttgatgaggtatttaaaaatgtatcgccgaaatttcttatggacagacattccaaagttattgcaaaaagagctaaaggatattcaaaaaaatatatcatattatttaaaacctttccgcagaatataatctttttctatactatcgtaatatgtttccgatataggtaaaatttcgccggtaataagataaactttgtagtttgttattttatctatatacgctgtgtttactatgtaacttttttgtgttcttaaaaaaccgcagtcggataattggctttccgtatccgatattttgccgtatatttcaaaagggtcttcatctacaaaaaagaaagacagttttctgcctgtactttttatataaacgatatcttttaaaaaaacttttttaacttcctgcttgttttttaacaccgttgcacttttaaacggtgttttttcttgtacatattcatttaaggcctgttcaagtaatgcgtcaaattgctcatcttcttttaaaatatacgcaaggggtcttgcctggtagcctaatagggcatagttgtaaaattccgaaatatagattatatcggcttttgaatttagctttttgatttttacccctaaatctataccgtttatactgcccagttctatatccaaaaagaacaaatcaaactttttaatatccatatcggcaaattctttcggtttggaaattatggatatatccatttcaaaatctttgtccataaaatattttgttattttaaaagataacccttttgcgtaagaaaagttatcttcacaaattgcaatttgtatcatatataatctttgtaacctcacaaactaatcgcaattataaaccaatatatcggtcacagaacaattaagagcaaaacacagcttggctaaaacatctaaatccgctcgttcaacattgccggaataccacttgtttataacttcgtatctgatgccggtaagtttagctaacgaatatctgctgacatgttgtgcgtccataacattcgacaatcttattttgattttgccgtaatttttatactctataacagagttattattattcatttatatcatccgataatattctatatgtacagtgatataaataatattctcatatatatagtgactatgtaacatataactacatacatagtatgttacataattatacatcataaaaataaatgtttcaatattccgatttcagatttcattacatttcaagcctattttattacatttgctgaaaaatttgtaatttttatgctaatatgataatcgaaaggagaacactatggaaaatgtcgcaataaacattaccgattatttaatagagaaacagctactcaatcctggtaaaaaagaatggtgtgtatattgggttcaaaaaaagatgttaagtttagtaagttgcttaatattttttgcaatagcaatgtataatcacaacgccgtggaaacattggtttttgtcacttcattgatgttgctaagaaaaagaaccggcggttatcacgctaattcatggcagatttgtattttgctttcctctttgttggtgcttgttatgccatatgggttagatttaatatctaacaggggttttgccttatttacaataattatgtcgttttatatcatccaaaggtttgcccctgtcaatcacccggcaatgcacatgaatgtaaaagaatgtgaggaaagtagaaaattagccttaaaaacttttttgacattgttagcggtttcaatattattgttggcagtcggtaaaaatgtattgttatactgtatagtattggcaatgttttgcgacagtgctctcatagtcctcgctaaaatattaagacaggaggtgtgaaatatgaaaataaaagaccatgttaagtgtacagttgctgatatgcttgatatcgtgattggagcagaaattttaaaatggccaccggattgcgcgggcattatgtaccagccagaaagaccggaaacaacaatcgaagataccgattaaataggtattccgtcggaaaaattgctttattttaaaaaaggagaaatttatcatgactaaagttgaaaaattacttaaaaatgttttggcattatctctttgtgtatgtgcaatagcagctatgtctgtaagtgcaagtgcagtcgaggcacgagtagcaggttttggaagctattcgggaagaatagtgcgagttgtttcgtattctgacccgacacaagaactaaatgttttgacaagtaatagtgtatcaaacaataaaaatgttacaacatggcctgtaagccaagcagatgaatatcataattttgttgtttatcgtgaaggtgataccaagtattcacttagagtaagtaaatcgccaaattacgcagtggagctctactacggttcatcaaatatgtataattgcgatgtttatgatgtaaacgcgggaagcaagtatataaaaccggaagattaccaattttcagcatcaacacttaacagttattacagattttatattgctaagaacaattatgcgttggcgaccggttcaaatatgactgttgccgggacatctataaaggatgtaaggtggacatcgggttcattaaatgataataaccaatgctggacaataacggtaattaaataaagcgtaaggagaatatagagaaccgcttcaagtggttctctattaaaaaaatatgaaaaaactattactattggccttaactgtcatgtttatcctttgcggttgcaatggtgaaaacagaaataatgcacagtcggataatcataatttgttttctgcatattcatttaatcaatcgagaatagcatataaaaattctgatctatattacgaggccgatgtcattaaaagtaccgatgctcggatttatgcatattatgatataactgtaacagaccttacaacaaaccataaatcggttctttgcagcagtccacaatgtacccatacagatgaaacttgtacggcgtattatagtttgtatccggagtttataatgtacaacgataataatttaatcgttggtgtaagaacacagtcggaaacgggcgctaatacgggaggaatgacattttacatatccgatttgaatggcgaaaacagaagacttttatacacatctgctgacggagaaacgccgtatggctcctttatactcggtgacgattgtttaatttatgattgctttacacttgacggtgacaatgaaacaaggtatattaaaaaaattgacttagcaacatccgaagttaatactataactaaaatcagcaataatcaaaactttatcggtggatttggcaattatatttacttgcacacatatccggacggtatatcgacgcttacgggcaagcataatgttgatataatagatacaaacggtaatgttgtgaagaaaaatgccattgaatggaaagagagcgaatcaaccgtttcaatttacggaaaatatcttgttgaaacattcaaaaatgagccgaaaatcaaacttaccgatttggaaaccgacacagtagaagaatataacacagaatatcctgttgaggttatttcttttatagacaacaatgttatttgttattcatctgagattgatgagacacaaaaatttttaaccccgatggaaatttcaagaaatgacggcacggcaaaaattgttgactggcgccgtgaggggaacagtgattttgccgttgatataatagcatacaacaatgataaatatttgcttgcggcaaaggagcggacacgacaagttacttatgacagcgccagaccgaatatttctcaaatgccggaaacggtaacagaaacatacactatttatgcgacaattctaaaatcggattatacagcgggcaacagaaatataacatatatagaagagtaaaataagccggcattttgccggcttattttttaataaaagcatttttataaaataaaaataatatatttgtaacaaatacatataaggggtacgccatgtttacaggtatattaagcgttattttgtcaaaaatgttgtttttcgctctccatttggaaagcaaaactctgccaaagcccttgagtgaaaaagaggaaagggcggaatttgaaaaatacaaaaacggagatctgaccgcaagggataagctgatacggcataatctgcgcttggtggcgcatattgccaaaaagtattaccaaaattcacaggataatgaagatttaatgagcataggcacaataggccttataaaagccgtgcaaagttttacatacgataagaatacaagattttccacctatgcatcaaggtgtatagaaaatgaaattcttatgtctttccgaaaacaaaagggaagtgagaatatagtatatcttgatgacaatttggaaattaacaatgattcaagtaaaatatctttaaaagaaagccttcgtgacgattttgaaaccgaggaattttgcgaaaatcgggaaacaaggcgtgagatttccacccttgtggcggaaaaattgcagggtagggaaaggcaaattattataatgcgctacggtatcggcggcacagagcctatgacccagcaaagagtgagcgagattttaggcataagcaggagttatgtttcacgcttggaaaccaaggcaataaacactttaaggcaggaattgaccgctacggcaaacagcagtgattgatatataaaacagaccgcagactttcagtctgcggttttaaatttactcactttttttatatccggtttcaaaatcaacaagatttataagcggttgattatttatatatttttcggcatttgttaagatgatattttgaatgttttccacaatttcttttgcgtggtagccgccggaaatgtggggcgttataacagcgtttcgcatcttccaaagtgggtgatcccggggcaacggctccgggtcggtaacatcaagtatcgctccgccgatttcgttatttttaagggcatcggtcaaagcctgtgtgtctgttgccgtgcctctgcccacatttgcaagtactgcggtgtttttcataagttttaattctttctcacctattatatgggttgtccgccgtgaattcggcaaagacagtacaactacgtctgcggtaggtaaaagttcctttaatttatccatggaataaaccgcttttgtatattggggtttttctttaactgtgcgccttataccgtaaacatcagcacccagtaagtacatcatttgtccaaactgtccgcctatatcgcctaagcccactataagtacattactgccttttattgttcccacagcgcctaaatcttgccatttcccggcaaattgattgtcacgataaagatgtaatttttttgtcatcataaatacggcggccaaaagatactccgctattgcgtggccgtatgcccctgttgcattggttaaaacagttgccttggggtcgataatacccgactttgcgtaaaaatccgccccggaagaatttaactgtaaccattttaaatttttacatctttttaaggtttcagccgacggattaccgattataatttccgcattttcgattttctcatcggtgaatttttctatcttaccgccgaccggattctgataaataatattatattttgtacctaaaattgtatttaatttttttaaactttcgtcgttcattaaagctgaaacaagacaatactttttcatggttttaaaccgttctttctgttttattttacctaaaatatatgacaaattgcgaataaatgcaagccgaaaccgagcaggatttaaacggtttttttgtgccttatgcacaacatattggcgctatgagagcaaaataatgtattggcagtatttactcacttaaaatttcaatttaatatgcacagcctacaaatattctgtctttaaatacttaataattagtacaacttgcataaaatgcaaactttgttaacattttgtacacatatattatttgtaacatattacatttttgcaacctgtaaaatactgtttatttgtattattttacaaaaatacaacaaaaacggcaacggcaaaaatatgttgacttgcataaacaaaagtgtaataattgttacaaatcacaaacagataccgtcgaatgtccgactgcggaaaaagtttttgatttaagcaaattactgaatacacattgtgcagcttgctgcgattattccgtgaaaatagttgacgcatattgtaatgcagtgtgaatattcaaaatctatgatttattgagaggaatttattatgacttggacaccacttatgtgtatcaccgttatcgcaatcacattcgttatcggcgaatacctcagcagagcaacaaaaggctatgtttcgtcaatggtttttgcctgctttatcgctatgattttattctggaccggtagcgtaccgtcagatatcgctgcatcttcaacacttctgacaacattgggtgcttgcggcacagctttcctgcttgttaatatgggctcatctattgatgttgagtctcttatttcagagtggaaaaccgttgttgtttgtattgtaggccttgtaggtcttggtattcttgcgtttaccgtaggcgcaatggtattcggaaaggattattcacttactgccgcacctgttgttgcaggcggtcttatagcttatcagattgtaggcggcgttgccgtagaggccggaagaccggaattgcagggttacgcagctttggttatggctttccagtctatgataggtatgcctgttgcttctttctgccttaaaaacgaacttaaaaagcagaagcgggatggcaaacttacagaggaataccaggcatctaagaaaggcttgaaacttccggaaacaaacattttcccgacagttaaagagacaaacaacacatctacaatgaagttcgcaaaattgggtatagttgctgttatttcttacatgctttcaacatacgttgtaccggcaatcaatgtaaatattatgtatcttttgatgggcgttttgttcagaaagattaacttccttgataagagccctcttacatctgccggcggttacggttacgtcatgctttgtatgtatgctttgctcttcaacggctttgcaactgtttcacttcaagactttatcggtatgcttgcacctatcttcggtatgcttattatcggcgctatcggtattgcaatcggttcttctatcgcaggcaagattgtcggttacaatatattcgtatctatcgcttgcggtgttacggctttgttcggttacccgggtaccgaaatcctttcaaaagaagtttgtgcatctatggatgactttacagaacttgaaaaagtatatgctttggactatgtaatgccaaagatgattgtaggcggctttacaacggttacaattgcatctgttgttttcgcaggtattatcgcaccgatgatttttgcataaaaacaaaaaaatacatatttgacaggctgtttttaaaacggcctgttttttattttaaatgattttcccacaagacaaattatatatcgggcaaaatacaaaattgccttctaaaataaataaaaaagcaaataatatttatttaaaatataaagtagcaaaatatcaaagtataaacttgattttattaagaataaatggtatgataaattcattgatttacaagggcaatcatttgaaaattttatgttaatactgattgttgccaacttttaggagagattataatgaacgaatattacaaaaggtttgaaaaatttgacaagggtaattgcagtaccgttgtaataggtaaggatgcctcagttacaggtaaagttattttgggacacaatgaggacgatagcgacagcattgtcgaactccaccttgtaccgagaatgaaacatcgggagggtgaaacaatttcatttaaagatgccgacgcagttatcccacaggtgccggaaacatattcttattattggtcggaagttcgctgcaaaggcggaatatcttttgccgacggttttgtaaacgaaaacggtgtggcggttgtaagtaactcttgcagaccggcaaaaacacctgttattgacgttgagttgggggttggttacgctataagacgacttattgcagaaagggcagtatctgcccgtgacggcgtaagggtagctgccgaattggttgaaaagtacggatatttttcgggtcgtgcctacacgatagccgacaaggacgaggcttttgtgttccaaattccgacaggtcatgtttacgcagcgagaaaagtaggagatgacgaggttttctacattcctaactggtacacaattcatgacttggatttttccgacacggagcataagaaattctatttctcagacaatgttgttgactatgccatagaaaacggttggtatacacctgccaaagaaggggactattcggatttcgattttgcggcagtttatcaggaacccggcgatacaggggcttgcaataaagaaagacggagaaacgcttggcgaattcttgcgggaattcatcttgaggacgatgaactgagagaattttcaagaaaggcagagaaaaaatattcggcagaggatattaaaaaggttttgcgctcacactttgaaggcggttcggatgatctgtcaaacggatatgaaagaaatccccacagaggcgcaacggtagcaacaatttgcaacggttgtacggttgagagctcaataatagaatttaacgaggataaatatcttacaagaatgttgcgttctacattaaagccttgcacatcgccttatcggccttggtatccggtagctcttacaagaatgccggagggttacagtcagcacgcaccgttggcagcacaggtatcccacttctacgttgatgaaaaggaacttgaatataatccgaattttgcatggtggacatttaaaaatctgtattatgcaacagagtatgactataaaacggctcacgaggttttgtcaaaatcctgtgattatcttgaatcacagtgggaagcacaaaaggtcggtgtcgaagccgcctataatgctttgaaggatacagatatttcggcagcaagggagatacttacttcatatacctgcgctcaggcaaaatttaccgaagaatgggcaggcaaaaaggttgtggaacttgccaatatacgaattttgaaaaataaaaaagattgggaataatcatatatcccatatttcagagggcggcttttgtgtcgctctcttgttttatatcaatttatgttttataatattcgcaaagtatatttttatggtgataatatgttcagtgttataatatccccggcaaagaaaatgcgctgtgacccggacagcttggaatatacggctttgcccgaattcacggaaaaatcagaaaaattgctcaaaattttaaaatcaatgtcttatgccgaattaaaaactctgtggcagtgcaacgataaaattgccggggaaaattttgaaaatttacaagtcgccgacttaaaaacaaatctgacaccggcaattttagcctatgacggtatacggtttaaatatatggcgccggaagttttttcatataaagaatttgagtacatacaaaatcatttatttattctctccggcttttacggagcggtaagaccctttgacggggtgatctcttacaggcttgaaatgcaggcaaaattacaaggtgaggattttaaaaatctatacgatttttggcggggagatatagcaaaatatataaccgatggcagagatacggttataaacttagcctcggacgaatattttaaggcggttaaaaaacatttcccggaaaatatcagagtggtaacctgtgtttttgcggatttggaaaacggcaaactgaaagaaaaaggtgttaaatgcaaaatggcaaggggagaaattgtgcgttatatggctgaaaataatgtacaatcccccgaagaattgaaaaaatttcaaagacagggctatgcttaccgagatgatttgtcatccgacgacagatttgtttttgttcaaaagaaaatttgcgaaaatcacaggttttaattataatatatagtatcttaataaaacggagactttatgaaaaaaatatcaataggtattcttgcccatgtggacagcggcaaaacaactctatctgaaagcttgctgtacattacaggcagaataaaaaaacagggtagggttgaccacggagataccgcattagatacaaacaaaatagaaaaagacaggggcatcacaatattttcaaaacaggcggttgccacatacggcaacacccaattttattttatagacacccccggccatgttgattttggtgcagaggcagagagaaccctgcagattttggattgccggatacttattgtttcttcacttgacgggatacaaaaccacacggtgactctgtggaaattgttgcaggattataacattcccacattcatattcgtaaataaaatggatttgcccggtgcggataagaattttgttgtcggcgatatacgaaaaaacttcggctccgactgtatagactgctcgtccgggctgccttttgaagaaattgcctcctgcgacattaaaacaatagaggaatatcttgaaacaggctttttgaaagatgaaagcgtcacaaatttaatctttgcccgaaaattatttccctgttttttcggttcggctttgaaaaacgaaggagtcgaagaatttataaaattcattgaaaaacacacgcctaatataacatataaagagaactttggcggtaaagtgtataaaattgcctatgaccggcagggcaacagacttacatttttaaagatcaccggcggcagtttaacggttaaggaatccgttacctatgatgaccgcaacggtgaaaagcacaccgataaaataaacggaataagaatttacacaggcgaaaaatttgacagccggcaaaaagttactgccggtgatgtgtgtgccgtgacaggccttacagccacatatcgggggcaggggcttgggtttgaaaaaaataatgacacacgggctttacaggccattttttcctacaaggttatatttgaccaaaacaaacacgatgtgcgaaatgtgcttatgaatcttagaaaattagaggaggaagaaccgcaacttcatgttttatggaacgaagaaacaaagagtataaatataaaccttatgggcaaaattcagcttgaggtaattaaatctttgttttatcaaaggttcggaacggaaatttcatttgacgccggcagtgttttatacaaagaaaccataaaaaacaccgtggaaggcgtgggacatttcgagcctttgcgccattatgccgaagttcatcttttaatggaaccgggagaacctaattccggaattcaaactgaaacactttgcagtgaggataaattggataaaaattggcaaaggctgattattacccatataaccgaaaaagcccatttaggcgtgcttacgggttcgccgattacgggcattaaaataactcttgttaatggcagagcccaccaaaaacacacagaaggcggcgattttcgccaggccacatatcgtgcaatacgcaacggacttatgcaggcggaaagtgttttattggaaccttggtatagttttgaaatcactgtgcctaccgaattatccggcagggtaatgaccgatattacaaaaatgggcggagagttttcgtcgcctgttacagagggagaaagcgcagtgatatcgggcaaggcacctgtcagcgagatgaattcgtacaattatcggcttacggatttcagcagaggcaaaggtaaaatatctctgcgttttaacggctatcggccttgccacaatcaggaaaaagtgatagaggaaaaaggctataacccggaaaatgatgtggataacccacgggattccgtcttttgctctcacggcgcaggtcatgttgtgaaatggtacgacgtgccgcaaaatatgcatcttgaaagttttttgaagcccaagaaagaggaaacagaagaaactttcacagcgcctactcaaactcgggtaaggggatacttgcgcagccttgaagatgataaggatttgctccgtatttttgaaatgacctacggaaaaatcaaaaaagaggataaaaagccccaaaaaccacgggcaaaagtctttacaagtgatgtaaaggacaacagctttacacaaaataaaaaaacgccggtaaatgaaaaagagtacttactggtagacggatacaatattatttttgcatgggatgaactttctcaggtggctaagacaaattttgaagctgcaagaaatattttggcggacagactttgcaattaccggggttttaaaaagtgtgagttgatattggtttttgacgcttataaagtcaaaggaaatccgggggaagtaaccaaataccacaacattacggttgtttacaccaaagaggccgaaacagcagatatgtatattgaaaaagttacaaaggaaatcggtaaaaaacacaatgtacgtgttgccacatccgacggtttggagcagattataattttaggtcacggtgctctcagactttctgcaagagcttttcacgaagaagtggaatctatcgaaaaggccataagagattttataaactgaaaataaaattgtaataaaaatatatcttctcaataaaattatattgaggtgatatttttgaaagaagaaccctatatcttaaatattgacggtatgaacctgccgaatttatctgtgccggaagatgaaagctgtaaaataatattcgaaagtcggcggacatttcccccagagaatgataaagaaaatttgcgggaaatatcggaaattacaaatcgtctaaatgatataatagccaaattggacgatattatatcaataatgaaagggagcagagagggatagccctttctgctctctttagctgttattaaatttatttacataaaatatttattctctttatccggactgccaaatctcgctatacagctttgaaccattttttcatatacttcgccctcaaaatgaatagcttttttagggcagtaaacaacgcatctgtggcaacgcaggcaggcggaggcgtctttaactctcaattttggattttcaacgcttataacaccggccggacatcttaaagcacaggccttgcagtcgatacagttgtcgtcggtaaccggcatcattgtgttgggagtgctgtttttctctttatatggtctgttgcccggaataatgcctttttcaagagcttttagctctttgcctgctactatctgtgcaaatttagctgcgccctcaagatcttcccggttaggtctgcccggcgcaatatctcttgaaaatgaatgtgtgcccacaacggcccgccggccaacaataataaagcctctctcgctcataatgtcttcggcctctacaagggcatcgtcaaagtctctgttgccgtatgtggcaataagtatgcagggcgtgtttttaccttttaaattttctatatagttaaggcaaatattcggtattctgccaccgtaaaccgggtaagataaaatcacaagattatcgtcggtaaagctctgtaactttacaccatctctgtttttaggcagagtaaaatcgtaagtcacaaccggtttgtttaagcttttacccattgcttcggcatactttttgcttacatttgttgcgctgaaatataccaaattaacatttttaaaatccataatttaaacctccgaattatgttgtataaccttgattgtattgtatcatctcatggcagatgtttcaagtaatcgctaaggtattcggcacgcttttgctttaagtaacaggctatatcactgtaatacttcgccgatttgcgatttgggtttttggaacttattacatattcgccgggaatataaatattgctaaaaatctgcaactccttacaattatgtacaagaacattgcagtcggcaaagtaggcggctgtgtaaaaactgtttttctctgtaccgtcggaatataaaaacacatttttgtcgtcggtaacaacacagaggtactttataatccggtcaagatacaccccaggcatatcctccacatatacggaagaattttttaattttaaaattttgtccacaatatccggaacttttattctgttgtaaaacggataaaattcccgcctgcacagattattcgcccgctgccgtgcctgtctgtatataatgccgatatttcttattttttcatatctgtttttcataggcgtcacctccttatctattttacttttaaattgttcattgtgttaattcgggcataaaaagtaacaatgattgttacaaaaatcgctgttttttgtgcaaaaaaataaaaaacaaaataaatttcaattttaacttgtaaaagggtaagaaaagtattattattgtggatgtacgcaaattaaattatcggaggattttaattatggcaaagattttggtagaaacatctgctagacacattcaccttacacaggaacatgttgatatactttttggtgcaggccaccagcttacaaagaaaaaggatctttcacagccgggtcagttcgcttgtgaagaaaaagttacagttgtaggccctaagaaagaattgaaaatgtcagttctcggtcctgtaagaaaggcatcacaggttgagcttgctctcacagatgctcgttcaatgggtattacagctcctatcagagaatcaggcgatcttgaaggttcagcaccttgcaaactcgttggtccatgcggcgaagttgaactcagcgaaggcgttatcatcgctaagagacacattcacatcacaccagaagatgcacggagcttcggcgtttcaaacggtgaaatcgtaaaggttaagattgattccgacgccggcagaagccttatttttgacgatgttgttatcagatgcagctcatcatacgcaacagcaatgcacattgatacagacgaatcaaatgcttgcggcggcgcaacaagcggcgaaatcgttaagtaattttatcttgtaaaatatcgggtcgcttttatgcgttttacatataagcggctcgtttttatattttgcggtaaaaatttcaatattttaaatcttgtattttttaacaacatgtggtacaatacaatataggggacagtgctattaagtgttgtcagatacacaaagagagcctgcacgagggcaggctgtgaaccatgtcaggtggggaaccaagcagcattaagcagattctccctgcgatgcttaaagctctctttgtatatgtgataatacattgtataggctgtctttttttacgataaggagttgtgttcgatatgcatgttgctttgtacagaaaataccgcccaaagattttcagtgaagtcgttgggcagaaatatgttgtcgaagcccttaaaaatcaaattgcaagcggtaaaatcggtcacgcctttatttttaccggggtaaggggaacaggtaaaaccagttgtgcaaaaatttttgcaaaagctgtaaactgtttgcacccggtaaacggtgagccgtgtttggagtgcgacatttgcaaaggcattgaaaacgaaagtattttcgatgttaccgaaatggacgccgcatccaacaactcggttgaagatatcagagatgttttaaacgaggtaaattatctgcctgttatggctaaatatcgtgtgtatatcatagacgaggttcatatgttatcaccggcggcttttaatgccttattgaaaacgctggaagaaccgccggctcatgttatatttattttagccacaacggaaatacacaaggtgccggctacaatactttcaagatgtcagcgctatgattttacaaaactcacggttgaacaaatatcaaactcgcttttgggtatagcccaaaaagaaaatatttttttaaccgacgaggcatcaaagatgattgcctaccttgcagatggcgcaatgagagatgcggactctattttagatacctgtatttcaatgggcaataccgttgatgaagatgtggtttcaaacattgtgggcatttcaaaggatgatgacttgcagcggtttgcccaaaatttaatagccggagactttgccggttctctgttaaatctccacactttatatgaaaaaagtgcggatatgaggcgactttgcgaagaaatgataagctatttcagtaatatgctcttggcaggtttgcctgcaagtaccgccgggctgttgaatatgccggaaaagaagttttctcggttaaaagaactttcggtaaactgtccccgggatttgatgccatttgttataaaatcgttctcaactgctttggatgatatattaaaaggcagagacgcaaaaatatcaatggacttagcggtatataatatttgcaatccgtcacggtctgcgcctgtgcagtcaccccaaagggcagacaggggtaaatccgtatatcataaaacagaacaggtatctcggccggagataaaacccgtggcagaaccgaagtcggctgaaacggtggcacctaaaaccgagattgaacctgtacaaaaggcggaaaagcctgcggaagaaagccaacttcctgtatttacagacaaaccgatagaattttcttattggaaagaagttgttgaaagttttaagcagacggatatacccctttacacatttataaaaaattctgaggcttacctctataacggcatagtatacattaagggaaatgaaagcctaaacgagtacatcagaaacaaccgcgaggtaaacggcattatcaaaaccgcaatagcaaatgcctgcggaataagatataatatcgggggatacaagaatattgaaaaacaatttgcccctaaaaagcatgacagctatgatgatattcttgcactcagagaattgggtgttgagataaatgaattggataaataaaggagaatttaaaatatgaaagcaagattaccacagggtatgggcggcggagcccagaatatgaaccggattatcaaacaggctcaaaaaatgcaggacgatattaaagccttgcaggagagattggacgataccgaatacaccggagaaagcggatcgggtcttgttaaggcaaccgtaaacggtaaacatgatgttgtttcaattaaaatagatccgtcggcagttgacccggaagatatggaaatgcttgaagacttggttgccgcagcggtaaacgacgctatttccaaggcaagaattgacaatgacacagaaatgggtaaaatcacaggcggtttgaacattccgggagttttgtaatctatgtcacaatacgatgcacaacctctggaaaggctgataaataacttttcacgcctcagcggtgtcggcaggaaaggcgccacaagaatggcctatcaaattttatccatggataaaaaagatgcggaagaatttgcacggtcaattattgatgttcatacaaagataaaaaggtgcccggtatgccaaaactttacggatcaggatatttgccctatatgttcttcaacaaaaagggataaaagtattatttgtatagttgaaaatccgcgagatgtttctacttttgaaaaaacaagggaatacaagggtctttatcatgtgttgcatgggcttatttcgcctcttgacggtataaccgcagaccaactcacagttaagcagttacttgcaaggctttctgacggagttgtaaaggaagttattatggctacaagtcctactattgagggggaggccacggctctttatatttcaaggcttataaaacctttgggtataaaggttacaaggcttgcttacggcttgcctgtgggtgcttctttggaatatgccgacgaagtcacattgtacagagcacttgagggaagaaccgaaatataattttacatttttatcgaatcggcacaatgtgccgattttttatatcttaaagtattttaattataaaatgtttgtgagtgtaaaacatttgtagccatttttatgaaaattgtatattgaaaaatagcaaataataatataagattaaagcaataataattgcgtcaaaggagcaaattatggctaagaaatttttacttgtggacagtgatgccctgcccgatgtttttttgaaggtcgtgcgtgcaaaagaattgcttgcagccggcagtgtaaaaaatttatccgctgccgcaaaggaagtggatatatcaagaagtgctatgtacaaatacaaagataaagtatttgatgtaagcgaggcgaaaacagtggttgccgtccatgtggttttaatggatgagacaggtgccttgcaaaaccttttgaagattatcgcaaggtacaatgtaagcatagttacaataacgcagtctgccccggttgacggaaccgccgcagtttcaatcaccatgaaagttaaagatatggtgggagatgtggacagccttgtagaagaaatgaaacggcggagctttgttgtaaccgcaaagcgcattatgcaggatatttaactatggcatattcggtaaaatatgttggcgaatgccttaaaaacggaattgacctttaccccttgatagaaagagatttaaaaaaggggaataaggttgttttggtttgcgaccgggaatattcccgccgggtgaatttgccggatataacctgggttacggattttgagcaggtttacacctccggcgataaactgtttttgcttaccgcagataaaaattcaatgattgtgggggcgcagtttgtttttgcaagcggaataccggagtatcagatctacactaagtatgacggtatatactcggcagacccgtctgat

SEQ ID NO: 3881 - DNA, 5711 bp, Unknown
  16S sequences of unknown bacteria
gggtttcaggccgtatagttagtgttaaactagtgtggattcgcgggaatccaggttaaatagcctcatctatcaaaatccgaagacaggtgccaaccgatcaaaatttactttctaaagtcatcgtacacgccggagatgttctgacggagcgtttcaatccggtggatgctctcatgcaactcagcgatgagcgctttttctttttcggcaattcgtctctgcttttccgggtcgatgtcatcgtattgcaattcacagagctgcttcgggttaatggcaaaaatcgtactgccggtctgtgcaacactgaggcacaagttgccgtcatcactgtcgaagaatgcttttaggtaataaggctctaaagtgtcgttgcatcttacgacaatgagattccccgtcgcgataatatttcgattcttgatattttccgcaactgccgtgctgattttggttccccgggcagagataattacatcgccgtcttgcagcatatatttcttgtacttttcaattttgtcaatgtgcacttccacaagctcttcatccatgtagccgttgctgatgttggacagattcaggagatagccgtttggcgctttgccgcagagattcgacatttctttctgcttatcggacgtaatctgagcccctctgaaaatgtctcgggttccttcggaaagcttccgggcgttggtagaacaaactttttcatccagaacgtaccgcatcgggtcgaaggagtaggtgttatccgcaatcgtccgaggcgcaacttcaatatagtcgtcggaaggacggttttcgtcctcaagatttgcaccgccgttaaaatacaggtccaagatgcggtcccttgcggtgttcgtaagcacattccggaattttattttttcataataagaagcggcgttcaccatcttgatgcgattgttgttctcactcaaaaccagcatggcgatttggatgccggtattcatgagcaggccctccggcaataaaacgacgccttccagtgttcccgattccagcagctctttccggaattctttttcggattccagatacaacaggcttgcgcggatgaaagcaattcctttgccgcctttcttcagcatctttcgcattgcccggatgtacgcccactcggaagagtgaacggaaacgcgctttgctgttttttcatcaaacaatccgcatgacagaagttgcttggaatcaagccgctgctttatcggcatgtggcagaaaacggcatcgtactgaggaagttccggattgcggaaatcgatatcgaatacgtcttcacagcgaatgtggttcatatcccgattcagaatgagcattttcatccgggccacgattgcatcctcttgtttgatctctatgccgtggagctcgccggctttttcgtggattgcggtttcggtcagaaatacaccttggccgcagccgatatccattacggtcttggattcggaaggggcaaaaaccgctgtggcgagtttctcgatatctccgtttgtgtacgatccgtagatttcattatcccgattccggtaagcgtttacaaaatccggcacatcgatgtcatcgatggtgtccagtgtttctcgaattctctgagtgcctttttcagcggcaaacagattgcggaagatgaaggtgagaatgtcccggtgttccggacgtacttcggtatttaatgtttcatgcgcttccgaaagcgcatcctgtgccaatgcgtcatccagcgctttccgttctaaaattcgattcaacgcgagcacgccgaatgtaatttggttctgaatgtccgatttgatatttttcaacatgattgacctcctaaaaaaaagtttggtatttgataacctaaatttagcacaggcgaccgcggccgtcaagaactttttggtatttgataacctaaattctataaagcgacgttttttgcctttacggatttttcgattaatactataattaaagcaatctcagtgttcggatgagtatagaaaaggtgcgtatgatgaaatatgaaaatataaaaaattccaatgagctggagttcgctgtgttttgcattgaaaatgtagcgaaaaagttgggtgcagatgcagcgcgggtctatctggcatttaccgaaaagagtgacatcctgtacggttacatcgtgccggaatatgaagtgctgcatacccagagccgtgaatatatcgtggacgacatccttgatgtgatgaaagaaaggggtgtggaagtatgatggcaaatccgattttactccagaaaaaatatgctcgcgtcattgcgtgctttgccaaacagcagggaatttcattggacgaagcattggatttattttatcgttccgaagtttaccaattaatgcgtgagggcgtttccgatatgcattgcatgagcgatctgtaccttgcagaagaattaagattggaatatgaagagcgacagtaaattggggaaatagtgtttacccaatttgaaaagttttcgacggacagcaccggcagaaaatcatattgagttgataggaaaccgccgttaaaccgccgttaaagtgccggatactgccgatatagtgccggatactgccaataaagtgccggatactaagaaaaatgccggatagttttaggcggagtgccgaatacaacgtttgagagaagcatacagaagaataataattagcacaaatagcacaacacaaaggaggtacacatggcgaaggaatgttctatatgcggaaagaaattgggtttcctgtcgggaaaagtggcggtatcagatggaatcgtttgcgattcctgctggtttgctgcgggtctggatttgagcattaattccatgatgacctcgaacacgcgtaccgtgaaccagctccgggacatgattgaaatcgaggtgctcaagcgggcggcggagctgacgggacggacggatttggcgacagtggccccgcaggcaaagactccggcagagaagactccggcggtaaaaacaaaaccggcgcggaaggcggagacgaccgatgccaaaccggtggacatcattctggaagtgggtaaagaccggaaggtgaatttccaatgcgcgggacagccggttataaatctggaagatctgattcagggcaatgagatgatcatcggagatggtttcatccttaaccaaagcaaagaaaccttaccggacgttcgaatcgcctgcgagtttcagccggccattgtggacccgggactcctgtactacgaagagggtacttttactgcgggcgtagaagggaaattcgaaatcgacgacccgccggtgaacctggaggaatacgcgaaaatcaaacgcacccggaacggcaaaatccgtttcaccctgttcatgggagagcaggaagtgggcaccgcggagtgcagcatgcgggtgaagccggcgccggaagaagaaatgcagaaatacatgaaatcggtgatgtacgagacggaaaagaacgcctccggtccggtgaacgtgtttttatatgcccgggcggacggcaccttcgacgaggacctgatgcggcggccggacctgctgtacgccatgtacgccaacggtcaggagcagctgatcggggatgtgtacgtggccaacgaaaccggcaaaaagctcaagaacatccagttccgggcggattttacgtcggatattctggaaccggtagatgtttttctgggggacgtgccggcgggggagaacatcgtctttgaggtggacgacccggccatcaacctccgtaaattagagcagattacggaaatcgagacctgcaccgctacctacaccctcaccgtgaacggcaaaaaagtctcggaggcctgcggccgtgtgacgatctgtccgtacgaccagtggaacggcgcactggttctgctgccggcctacatgacgccgaaccatccggatattatcgggctcctgcagcaggcggcgcgttggatgcagaaggggggcatgaacccgtctctggaaggctatcagggcgatgccaaaagggtggaagagatgaccatgggcgtgtacaacgccataaaagaagccggcatcatctactcgaatccgccggccagcttcttcggaccgcagcgggtgcgtctgggggagacggtgatgcagcagaaatttgctacctgcatggacattaccgtgctcttcgcttcctgcctggaatcctttgggctccacccggtcctgattacggcaccggcacatatttttgccggcgtgtggctgacttccaaaggcagatgcagcgaaccggttctttccgatacggcgcagctgcggaagctcatcaaagagaggaaactggtggctttggaatgcaccgccatgaccctggggaaaaacctttcctataaagaggcgaggaaggaagcggaagaaatcctgaaggcactggacgaaaataaaatcccggataacgattgcatcgacgtgcagctggtgcggaacatcggcatccggccgattccgatgcgccgaaatccggcaggtgttatcgccgaaccttcggtggaagtgccggcgaaagcctccggcgaggcgccggcggagaccgtcgaaggcgctggcaaggcgcctgctgagaccgctgagaaggcacctcgcaaaagcccggcgaaagaaaagccggcggccccggaaatctccgaagctgccgaagccattgaagctgccaccgtcacaacggcagcggccgcagcctccgcggaacccctccgctatattcgggaagagtaccgcgtgttcgagaaagacctctcgcagattaccatcgataatttctacgaccgtcggaccaaaaagctgatcaaggaggccatttcggaaatcgtgcaggtggagggcccgatcagccaacctgccctgattcgcacgctgattaattctacaagcctgggcagggccggcaaaaacatttcggaacacctggataagctggtggccacggcagacgtaaaaatcactcgccaatccggggttcgcttcctgtggaatcacggttcgaatccggcagactatcacaccttccgcttccgggagcagcggaacacggaggacatctgcaaatacgaactgaagaatgctgtgtgctgcctgcttcaggagaacggacctatgaccaaggaagaaatcaccaaagccatggtgaacctgctgggatacagccgctccagccaccgcatcgaggaatgcgcggcggacgccatcaaggcggcccgggagctgaaagccatcgagcagaatgagcggaagcagtttgtagtgcgttgaggaggaagagatgcaagcgggcatctttaggtcaaataatgtaggaggaaaacataagtaactgaatatattgactattgtgattaaatgtgtttaaacacacccaaaggagagtattaaaatgaacacatcaaatatcataaattataaacccaaaagtgttgccgaacttttgggatatctgttaagacattacaacgttgagacagagaaggaattttaaaggcaaaccgaactccaactaataggcattattacacttatgatttgtaggctgtatggacttcgtaagtataaaatacaaatagaaagggatgaggggattgctaaagagcttcaagacagaaataaatccgtcagaagagcagaaggtcaag

SEQ ID NO: 3882 - DNA, 4505 bp, Unknown
  16S sequences of unknown bacteria
gccgttctctacggcgatgatgtcatcatcggggaaaactccgccaccgctgagctctgtgctgcctatgaaaagcacggcaagggcgtggtgggcatcaaggaagtgccccatgagatgatccacaagtactcctccctcaaggcagatcccatcgacgaccgggaattcctggtcaccgacatgatcgaaaagcccaagacggaggctgaggtcctctcctactactccattctgggccgctgtgtcctgccgccggagatcttctccattctggagcacaccgagcccggcgccggcggtgagatccagctcacagacgccatgctggtcctggcccgccgggacggcatgatcggtgtggactacaccggcacccggtatgatatgggcaataagctgggaatcctgcaggctgctgtggaagtgggcctcaaacaccccgaagtgggcgaagatttccgcaaatatctcaaaaaactcgcagaaaccctatgaaaatcccattcagacgcttgacaaagctgctgagtgtgatataatttttctgttatcgtgccaatcacgaatattcgtgtgcatgattgacattccttgctctgccagacggcagggcctcaagtccaaaaggaggtgcaccaaaaatgccaaaggtaacagccaattacgagacagtcgttatcttcaacaccaagctgggtgaagagggtatcgctgcaaatgtggagaagttcaagtctctcatcagtgagaacggcaccatcaccaatgttgatgagtggggcaagagaaagctcgcttacgccattgaggatgagaccgagggttactacatgctggtagaattcacttctgcccctgagttccccgccgagctcgaccgtatctacaagatcaccgacggcgtactgcgttccatgattattgctaagtaaggcggtgtcactatgtataacaaggctattctgatcggccgcctcaccgcggacccggaactgaagcagacccccaatggggtatctgtctgctccttttcgatagcttgtgaccgtgctttttctggcaggaacggggagcgtcagaccgatttcatcaacatcgtcacctggagacagcaggcggaattcgtcagcaagtatttctccaagggtcgcctgatcggaatcgacggctccatccagacccgcaactacgaggacaaaaacggaaacaagagaactgctgtggaagtagtcgctgaccgcgccttcttcgtggacagcaagaactctgctcagggttccggttcctcgtacccgtccaatccgggcaataacttcagccgccctgcggcccctgctgagcctgcctcttattccagcggcagcttcggggatttctcggagatcgacggcgaggatgatctgcccttctaaccggcacatcatcacctcggtatctgaaccaaactaatgagaaggaggatttcccacaatggagagaaatgatagaaatcgcggcagaagaagaagaaaagtctgcgccttctgcgccgataaggttgaaaccattgattacaaggatgtagctcgcctgagaagatacctctctgagcgcgccaagatcgttccccgtcgtgtgaccggcacctgcgcccgtcatcagagagaactgaccgtggctatcaagagagctcgtcacatcgctctgctgccctatgtagctgactgagcagttttgctgccaacacccctcgcctttgggcctggggtgtttttattttgctcctgcgctttatctgtttaactccataaaatttataactttaatctgtgcactctgctgataatttgtccggattccggtgtggaagctgtaagtatttgacactcccactgttttgcgttatagtaaactcaactgagatttctttgactggaacaggaggtcctcactgatgcaagatatcaaaacccgctatgaacacgctggccgcttcctgcccggacaggtggaacgcctggtgctcaatggtgaaccggtgatccgccgctccccggcaggggttctctactttgcccgggaataccgtctgccggatggcgctgcggcaagggaattcgtatccctggccctggacggcagcactgccccgctctttgacgccgccaagctctgctccctgctggggctggagggcagtgtcctccccttctccgactgcgaattctgcgataccagcctgaagttccgccatcagggtgcggactgcgtctggcgcttcgcggatgacagcattatccgtctgcctgccccgctgcccgaggaaacaccctctccggatgaggagtcggcgctctttctccggggacatgacctctggctccgccgccgtacctctggtgaagaagtacgcctgacctgggacggcgtggaggactgcgactatggtcgtctggtggactatgacgcctccatcaccatggagcgcaccggctatgtacagcatccgctggcagtctggagcccggacagccggaagttcctcaccttcaaaatcgatatgcgcccggtgaagaagctctatgccatcgaggcctttgatgacccacactcggagagcatccgtccccggctgcacagctatcgctgccccttccccgaggacagcgaccgggaactccccattgtcaccctctggctgggcgacgcagtaaacggcaccctgcgacagctggactgcgagccctactgcttccccttgctgctgggcaatacctcgtccagctatgcccgctggctggaggacagcggcgccgtgtacttcacctggttcagccgcggcaacaagaaggcccggctctgcctgtgtgacgctgaaaccggcgaagtccgcattctggtggaggaatcccatgagaaattcctcaatgtgggcactggcggcactctggatggattcgggaactaccggttctccaactttgtcaccggggaccggaagtggagcttctggcagtcggagcaggatggtctggcccggctgtaccggtacaataacgccgatggcagctgtgaaggcgccatcacccctgaggggatcatcgtgcagcagctggtagcagtggacccggaacagcagcagatctacttcatggcaaacaacctgcccgaatactccgacccctactatcatgggctctgccgtgtgaactttgacggcaccggattcagcctgctcacccctgaggacggcgaacacatggtgcgcatcttccccgactgcctggcagatacctggtcccgggtggatcaggctccggtgactgtcctgcgtgaccgggacggcggtttcctctgcgaagtgatccgggcggacatctcggccctgctggaagccggttacatcatgccggagcggttccaggtcactgccaccgacggagaaactcccctgtacggcatcctgatccgtcctgccggcatggaagagggtaagacctaccccttcatcgactatatctacggcggcatgcagatcgccaatgttcccaaggccttcacctggaaaaccgccaacgggcgggagagcttcggcggcctgcaggagtatgctcagctgggcattgccggaattatcctcgatggcctgggcacaccctgccggggccggaagatccacgatgtcagctatgagaacatccatggctgtgccggtctggcagaccatgtggggactctcggtcagctcaaggcgctcttccccttcctggatctggaccgggcaggcatctggggcaactccggcggcggctgtgccacttcccgtgctatgctggaatatccgggtgtctacaaggtaggcgtagccagcgccggcaaccacgaccagcggatgtatgaaaacacctggaccgaacgctattacggcctctacaaccgggagacctatctcaagggcgacaacactgccctggctcccaacctggaagggaagctcctgctggcctgcggcatgctggacgacaatgtgcccatggcccagaccgtgcgcctgatcgacgccctgcagcgggcagataaggactttgattttatccttctgccccggctcaatcacaatgtcccggctgacccgtactttatccgccggaagatggacttcttcacccgctggctgctctgtgaggagcctccggctgagtatcgcttcccccgctgacctgcctttgataaatcggaaaaagcattgacaaccgtaccaaacattgctataattatatagcattctgatgcggttgtgatccattagctcaggtggcagagcacttgacttttaatcaaggtgtccggagttcgaatctccgatggatcaccagaaaagacacggcttattgccgtgtctttttgtttgtccgggatattgcgtttctattgtatccggatgtctcaccctgcccttcctgcggcggggattttcttttttacggctttgtgctaaaatgactaatatacagaactgtaca

SEQ ID NO: 3883 - DNA, 4385 bp, Unknown
  16S sequences of unknown bacteria
attattcttataggaaaacggctgcatacccttatcggtaagccccattatcgcaagacggtgaaatcccaaaaagccgttgttaagcttctcaagccttgacatatcagggccgcgcgaaacggtcatatcaaagcccaacctaaactcctcttccgggattcggcttcctatatagcccataatagaacacataactttttcctcatttcatatttttaaatgtgcaaaggcttcccgataaaatcaggaagctcttatgcctttttatcagaactgctcaatatcctgcagtgcgtcgtagccctcttcgccggtgcgaacctttacaacattttcaacatcgtaaacaaatatcttaccgtcgccgatgtgacctgtgtaaagcacctttttggcggtcgctataacaagcgatacaggaacctttgccaccactatatctacctgaattttaggtaagagagaggtttctaccaaagcgccgcgataatattcgggctgacccttctgaatgccgcagcccattacgtggcttacggtcataccggtaatgccaatgccgaccattgcgtttttaaggctttcaagacgggattccttgcagacgatttcaacctttgtaatcttttgtccgtctgcctttgcaggcacatccgccgcgaccttaggcatttctttaacctcaaccgcctcggcaatgggcgtgtctcccgtgacggcaacagtttcctcgtcttcgtctatatactcgggaagcattgcgattccgccgtaagcgctttgcaagccatgctccttaacgtccagtccttccatttcctcttcacgggaaacgcgcagaccgaatatcttctttattataaggaatgaaagagtaattgcaacggctgtccatgcggcggtggagaacataccgagtaattgaagccccaattgcttaaagccgccaccgtagaaaagaccctcgcctgcaatttggttagcgccgaagtttacgccgtcgccaatcccgcgggcaaacgccggagcggatttggtagcaaacaagcctaccgagacagtaccccaaataccgttgcagaagtgaaccgcaaccgcgcccacggggtcgtcaagatggagcttgtaatcaaggaaccaaacgccgaatactactataagtcccgaaaccgcacctattactattgcgccgaacgcgtcgcacacatcgcacggagcggtgattgcaacaagacccgcaagagaagcgtttaagcacattgaaacatcgggcttgccgtatttaacccaggtgaatatcatagcaactacggttgcaaccgacggagctattgttgtggtaacgaagatagagcccatttcctcaattgaggttgccgccgcgccgttaaagccgtaccagccgagccaaagaatgaatacaccgaggcagcctatcggcaggttgtgaccggggaatgcgtttacctttttgaccttgccgtttttatcgcggttaaatttaccgatacgcgggccgaccattgccgcgccgattaacgcgcatataccgccgaccatatgtatgcagtttgaacctgcgaaatcgtggaagccgagttgtgccagccagccgccgccccatgtccagtgagcttcaaccgggtaaataaccgccgagataaccgccgaataaacacagtaggaaaggaatttcgttctttccgccatagaacccgaaactattgttgcggtggtagcgcagaacaccaggttgaaaacgaaatttgaccaatcgaaatttgcgtaatcggtgaaaatatcaaatcccggtttacctataatccccacaaggtcttccccgaggaaaagaccgaagccgataaaaataaacattaccgtaccgatgcagaagtccataaggttcttcatcagtatatttccggcgttctttgctctggtaaagcctgtctctaccatagcaaagcccgcctgcatccagaacaccaacgccgcgccgattaaaaaccacacgccgtatacttcgctgtgtatagcgtcatatattgcttgattcataaaaaatcatcccttaaaatttataaatttctttttattttacgctgaaaagcatatcgccgtaggacggataaggccagatatctgcgggaataacggtttcaagctcatcaaccgtaatgcgaagctcgctcatagcggcgaaaaccgcgtccttataatacattgaaagctcctgcgtttcgcttatttccttagcctttaataccgcctgctctaacttttcggtctttttgtacgccgctgtgttaagcttgcttaccttagccaaaagctctttttcgtaacctgcgtcaatatcgccgcaggctgcctttgcaatgaccgtatcggataattcgtgcgaatatttgcttaccgcaggtaaaatatcctttttcgccatatcaatcattgtaagcgcttcaatgttgattatcttgcagtagttttccgaaagaatttcataccttgcccgcatttcggtctcggaataaaccttgtgcgaaatgaagagcttcatattcttttcgtgcaaggaatacggcaggcactcgggtgttgagcgcaggttcaaaagtccgcgcttttcagcctcggcaatccatgcgtcgtcatagccgttgccgttgaatataatgcgcttgtggtcggtaacagtcttctttataagctcatgcagcgcctcttcaaagttagccgcgccctcaagctcatcggcaaactgctttaattcctctgcaaccgcggtgttaagcacaacattggtgcaggaaacggacgaagaagaaccgagcattctgaactcaaacttattgccggtaaacgcaaagggcgaggttctgttgcggtcggtagagtctttggggaacttcggcagcgtatgaacacctattttaaggatttccttttccttgctgccgtagggctcatccttttcaatcgcctttaaaacatcggtaagctcggtgccgaggaacatggaaaccactgccgggggcgcttcgttagcgccgagtctgtggtcgtttccggcagaggctacggatactcttaacatatcctgatattcatcaaccgccttaatgaccgcgcaaaggaaggttaagaactgcgcgttttcatacggtgtgtcgcccgggtttaaaaggtttacaccggtatcggtcgtaagcgaccagttgttgtgcttgccgctgccgtttactccggcaaagggcttctcatgcagcaggcagaccatatggtgctttttagcaaccttctgcataatttccattgtcagctggttgtgatccgccgcaatatttgttgtggtgaatatcggcgctaattcgtgctgtgcgggtgccacctcgttatgctcggttttagccaaaattccgagcttccaaagctcgtcgttcagttctttcataaacgcctgaacacgcggctttatgattccgaaatagtgatcctccagctcctgacccttaggcggctttgcgccgaaaagggtgcgacccgtatatataaggtccttgcgcttgttgtaaacgtcctcgtcaataaggaaatattcctgctcggggccgacggtcgttttaaccgattttacatccgtttttccgaaaagctttaatacccttaacgcctgcttgtttattgcctgcatactgcgaagcaaaggagtctttttatcaagcgcctcgccgccgtaggagcagaaggcggtaggaatacaaagcactccgtccttaataaaggcatatgaggtcgggtcccacgcggtgtagccccttgcttcaaaggtagcacgaagaccgcccgacgggaaggaggacgcgtccggctcgccctgtattaattccttgccggagaattccattattaccttgccgtccgaggtgggagaaataaaactgtcatgcttttctgcggacagacccgaaagcggctggaaccagtgggtgaagtgggtagctcccttttcaatagcccagtccttcattgcgttcgcaaccacggttgcggcgttcggatcaagggaacgaccgtcctttatggtgcgctggagcgccttatatgtttctttgggcaggcgctcacgcattacgctgtcgttaaatacattgcttgcaaaaatttcgttgattgaactcataaccgatcgttcctttcaaaatttgtgataataaaaaggcggcagcggcgtgtataaaagggaacgaggtagataatttcccttttgcgacgccgttgccgccttttaataccgttattcacaaaaataaagaaacggcaggaaggtaaaatcaattaccgacacccttgccgtttcattgcgcttattataacgccgc

SEQ ID NO: 3884 - DNA, 22536 bp, Unknown
  16S sequences of unknown bacteria
aaagcagcgaaaaccggtggggcaaagccttgccctaccttgtaagtgttgaaagcccttatgatgtgttaagcgaggacaacattaagataaaagagtttaccgtatcggaactttatacaatgcttaaatcctactttccaaacttggaaataagcgaagaaaccccggaaaattggttcggcgacataacatactttgacagcggttacgctcaatatgtgacaataggcatagacaaggtgccggcagatcaacttagagattgtttaaaattacagtccacctgcgttatgttcttctatgaggatggcaagttttccgcagttacaaagggatacggccacggcgtcggtttaagccaatacggggcaaaccaaatgtcccaaaacggcagtgattacaaagagattttatcccactactacccgggtacggaaattacggaaataagctaaaaagaaaggctttcgcccattaaaagcgaaagccttttaattttttacttcaacttatcggtaaaatatgtggcgttggttttatattggtgcacaatatcggaaaaatcctttacaacctcatcccctgtaatgcacttgtcaaccttgccgtcaacaaagaaaatcactgccggcacagaatttataccgtatttatcaagtgccgccgtcatttcccgattgttatcctctctgtcttttgaggtgtcgtagtaatacaccataagggcttctctctcggttgacttgtatattttatcataggcaaaatcacagtttaaacaagagggtccgcctatgtacaaaatataattgccattagcccgactaatcttatcaacatcttcaagctcgatgtcggttatatcatatcttgtgtctttaagcataatcgaatgattgtagtgcctgtacacctgcggcaatgttttgccgaacataatccccataaacaggataaacaccccaaacacaccttgcaaagcccttttattctcgcttttgccacaggcaagcatcagcagtgaataaggcagtacggcggtgaaaaggataaattccggcgcccacccgataggtgtaggataatttgtgtaaaagccgtcaaaggtttctaacctgcggctcagccaatacaagccccaataggccaaaaacacaaccacagatattgcgtataaaataattaccgttcgtttggtctttttcatattacacctgctttcgtctgatttgcacacttattatgtttacattatataacatttttttaaaaagcaagtaattttaatgtatatttcacaattatttcaaaatagaccaaaaaagagagcgtcaaacgctctctttcagctatatgataacaaaatcaaagatagatctccgggtcaacctgtaatgtcatttggtttggcaaatactgtgaagaaataaccctttgtttataagctaccggtgtttcccccgttgcccttttaaaggacttgcacagatagttatccccggaaaaaccggttcttgccgctatctcgttaagagaaagggaagttgtggcaagcagatatttaaccgcatcaattctcaccgttgtaagatacttacccggcgttgtgcctgtgtatttgaaaaattcacggacaaggtggctctttgaaattttaagccgctgtgccaaatcctcaacaccaaagggctgacaatacctctcttttataagctgtaccgcctcaataatcaatgtgttggcaattaccgcagttttatctccgtggcttaaagcatttatgatttcaaaaccggtattggcaagatatatctcgcttaatgatttataagcttttacaacctgcataatctgctgtggcaaaaacggcgaaaaaaggctgttggtaacaaaggctgtttctatttctctgccgtatttttccgccaccgtgccgactatgtttatgccgtaaacatcatcggtttttgcttcgcattttaaatttgcggtgccgtcgcaacaaataatatcgccctgaaccatttcgagtatttttccgtggctgacaacagagcagctgccctttgccgcataaaaaatattcagtcccccatgccgataatcagcctcaaattttccttttttctcaaaggcatcagtaatgtaacaaaaagtttttatatcaaatgccatcggcgcacctcttttcaaaataacatacttaaactctacttttagtatattactttatgaataaaatatcaatattttacctacaaattttattattttcggcattttgatttgtaaatacccctgttttatggtaatatttaacaggtgattttatgaattgggtatatattttacagtgtgccgacggcaccctttacacaggttggacaacagacacggaaaaaaggcttgccgcccacaacgcaggcaagggagcaaagtacacaaaaagccgcttgccggtaaaacttgcctaccgtgagccctgcccggacaaaagccgggcgctgaaaagagagtatcggataaagcaacttacccgccgggaaaaacaaattttaatagccaagtacaaaaaagaaaattccgactgaaaagccggaattttgtttttatagtattatgcaaataagcccttgacaaccttcgtttaccaccttttccacggtttccgcaagtttttctcttgcctgctgtgggatattttgcagtttggcgttcattccccggtttacaagttcttgcaaggaattgccgaaaaggttgctctgccatatttccaaagggttattttcaaaatttttcatcattgaattcaccatatcctcgccgtttgtttcgtcggcgataatcggtgaaacggtggtggtaatattcgcccttaaaatatgtaaactcggggcggcagccgtcaattttatgccgtacttagaaccctgtttcacgatttccggctccataagctgtaatttatcccggccgggcataactattccgtagccctctgtttccacctgttgcaatgccggtgcgattttatcgtactctctcttggcaaaaacaagttcgtctataagctgcataagggcccagtcgtcctttacgtcacggcctgtcatatcacgcaaggtatcataatacaaatctttgtctatatcaacctttacctcggcacagcctgtgccgtagtcgattccgtcgcactttgccgtttttaaaaattttccgtcaggcaatttttccgctgccggcactatttcgcttattttggtaatatcggaaaagttttcttttatcctttccataatttcagcctttggggcaaagtcccggctttgcatggcaagccatttaggcacggtaaagctgatttcttttaccgggaactgggtcaatgcgatagttaaaatttcctcaataacactcttatccatatcaaggcagtttacgcatttaacaggcacattgtattttgtaaaaatctgccttgcggcggctgcggcagaggggccctccggattggtgctgtttacaatggtcacaaatggcttattcattgcctttaaccgggttatgaccttttcttccgcagacaggtaattttccctgggtatgtcgcttatgctgccgtcggtggtaacaaccacccctattgtggaatgttcccgaattacctttgcggtgcctatccgggcagctttttcaaagggaatttcctgtttgaaccaaggagttttaaccattctgggtttgccctcctcggtgtccccctgtgcgccgtttatcatatatccaacgcagtccacaaggcggacttttagattttgattatccccgattactatgtcaaccccctgccgaggaataaaattcggttgggttgtcataaccgtacgacctgcggcggactggggcagttcgtctattgttcttgtgcgcttgtcggcatcggcaatattaggtattacaagagcttccataaatttttttataaaggtgcttttaccggttcttacaggacctacaactcctatgtaaatatcgccgccggtgcgtttttctatattttcgtataaatttgtcatggcgtacctcacattccgaaagccggtataaaaagcattttgtcctcggtgagaactttttccgcaagccggttttcctcaactatgaaatttatgtctgctctgtatctccgggcaatatcaaataccttttcacccttttttccgtagtaaaggataagggcgttttcggtttcctccaagggcttttccgtattttcggaatatttttccataaccgtatatttttctctttttatcacaaatccgtttatcgaaatatttacaccggcctttatgctgtcacttgcccccgttgcggaaacagatgatactcgacaggttaaaatatattcgttattccgatttattttttcgcctatgtccaaggtacagtcctctgtttttgtgtaacattccatatcgttttcaccgttcgtccggaatacattcaccgtcacctttgattttaacaggcacttgtcgccctcttgtataacctgtggatttcccacagagccaaaagaatataaaaccttgcagggatacggcacggtgtcacttataaaaacttgtacagtgcgatttaccgcagttatgttgccgtcccgcagaatatcctttgtccgttttatatcccgatatttttttgaaaaagcgtctgttaccgcaataacccggcttttcacaaaacatttaacatccaaggctgctgttattatacagcttactttttcggtctcggaattttgggttatggcaacatttacaatatctaaatccgcaaaggcaatatccttttcctttgcgccgggcacatccacaatttgattatacacaaagctcttgctttggatttgtatctcccggctgtcttttacggtataggctatatcagcggttatctcaccttttatatttactttgtcgttgtaaacagttacggtcattccgccggcatttgaggaaatatttaaaaccttttcaaaatctcccggggaatttatttcgctctctgtggaaaattgccttgtaccccgagcagacataacaaaccgacttatttcacggctgtcccggcagacatttttgctgtttacggcggttactattccccggcttacaccgccgtaaacccttgccgtaaggccgtaagcgccccttatatcaattcttgtggggtttatggctctggtgttcacataccgaatatctccgaacactgttataaaataaggggcttttacttcctccgctatatcaaagctcttttgaaaaggaacccttttatttacaacggttatattttttgactgtggcggccggtaaaatacgctaattctgaaaaagccctccacattgagttttccccctgtaatatatttttgggttacggtacattctatattcgatttaattattttaaacaccggactgtcataatccgcaagcagaatttcctgttccacaggcagttccaccccatattcaaacagcttgcctgttctgcttatgctgtcagcaacagattgattttgcatataattctctccttcctatcggctttcaccttgtaaataatattcataagaagaaaagtttatgttttgcggcaaattaaaaacagcgccacaaggcgctgttttgacattttagattttaaataccaattttaaaataccacgcaaaaatttcggacttttaaccaataccaccttcaacacaatcgcctcctgtggtatattctacgcaaattttaaaaagtgtgtgattattttttaagattatctcttaaaattttcatctcgttgaaatttttctgcatcaagtcctgtgtttgagcaagcatgccgtcacaatattttgtaacagtggttctcatccgcacggctttttgcgttgcctcactgtttatgatttttgccctgttctctgcccggcgaacaatttcctcccttgccacaaggcttctggcacgctgttcggcggttttaatcatctcatcggcctctcttttggccttggctataatccgtgctctgtcccgcacaatggcctttgcctgggcgatttcgcttggcatactcaatcttatatcatctattatatcccttgcggcgtctacatcaaccattctcttgccgccgctgagaggcacgcttacgccttcttccaaaacttcttcaaggctttcaagcatgctttctattgtaactgccatatcttattttcctttcatttttttggtaatattctctcctcaatttcgtcttttatccgctccggaacaaactgagatatatctccgccgaaactggcaatttgccttactaccgttgaagaaagatacatataatcctgatttgtaaccataaacatggtttcaagttcggagttaagttttttatttgccaatgcctgctggaactcatattcaaagtcggacaccgcacgcaaaccctttataagggtttttgcacccttttcttttgcgtaatcggcaacaaggccgtaatagctctcaatttccacatttggaatatgctttgtgaccttttttaaaagagctactctctcctctgtggagaaagtggggtttttagtggggtttaccattactacggcaattaccttgtcaaacagttttgaggacctctctaaaatatctatgtgtcccagtgtaaccgggtcaaaactgcccggacagatagcgatattcatcaatcaatctccttttggaacttggtcacagcaaccttaccgtacttaaacctctttatttcggcaagaccgttaatttcttcctttaaattccaaccaagttcgctttcagcgattattataccaccgggattgacaatttcatatacttttttcataatttcatccaaaattcccatattgtatgggggatcaagaaatacgatgtcgaagttttcagccgtggaattgatataactctgcgaacgggtatttacaatttttgcgcctgccgtgagaccgcagttttttacattgcgtgtgaccacattgacagcctctttactgctgtcaacaaagacacaggaggccgcccctctggaaagacattctatacccatttggccgctgccggcgaacaaatccaaaacctttgcaccgggaatttgaaattgaacagaggaaaatattccctcttttacccttgctattgtagggcgtgtttccaagccttcaagagtttctatatttttgccgtgggcaataccgcttataactttcaattttgttcttctccctcattgtgaaaatagaaatatatgtttctggcgtcggcatagctaatgccgtcaatatccgccaatttgctcatttccgcctctcttacatttgcaacggttttaaactctcgcatgagtttttcagcctttttcgggccgataccgggtattttggtaagagttaccgcataggattttgtcttccgggttttacgctggtattctattgaaaaacggtggacttcatcctgtatttccgttacgaatttgaatatgcctttgtgcatggcgattgcgatttccccctgtgggcttaccatcgcccttgtgcggtgttttgagtccttaaccataccgaacaccggcacgtcctcaaaggcagtgccctgtaagacacggagaacagccgataattggcctttgccgccgtccaggaatattacatcgggttttatgccaaactgcccggctgcccctttttcaaactccgcaacacggcgtgacaaggtttctgccatagaggcatagtcgtcggtgcctgccacggttttcatcttaaaagttctgtaaccgctttttttcggtttgccgtcctcaaagacaatcatgccggcaacgcttgtgccgtcgccccagtttgaaatatcgtaactctcaatggttttaggcgcctgtttaagccccaatatattggcaagctcgtccaaaaaacgaacattcctgtcaagcctgcctgtgtctcttgcaaggcgttcaacggcgttggtgtaagccatttttattatcttcatattatcgccacgctgcaccgacatgacatttaccttatttttgcttttgccttgaatataagtgacaatatcaccgtcatcgggcatttcgtcaagcattatatttctcgggggagtttcggtagaataaaattgaacaagaaattcatctcttacatcaccggcgttttcctccccgaaaaacacatgctcttttttgtccatcaacttgcccttgcgaaagcgcaaaacgcttacacagcagtttttgccggccccggcaacggctataaagtcgtggctttgtaaattttcgtttataacattttgccctgcatttaattttcttatggctgctatttgatcacgcagaagagccgctttttcaaaatttagattttctgcggcctcctccatatttttttgcaatatgtcgattattttatcggtatcctgttttataaagcgaatggcattgtcaataatttcgttgtaatcttccttgcttattctgccggtgcaaagacccatacatttttttatatgaaagttaaggcaggggcgctctttgccgaaatcttggggaaattttctgttgcaggtaggcaatttaaaaatatcctgtgcggtttccacaatttcccttaccgcaaagctggacatataagggcccaaatacttggcctcgtcatcggttgcttgcagttcggcggtaattctgggataatcttcctttgatatttttataaagctgaaacccttatcgtcttttaacaaaatattgtacttaggagagtgctgttttatttggctgcactccaaagtgagggcttcaacctcgctgtttgtaacaataacatcaaaagaaaatgcgtgttccaccattttccgcaccttaggcaggtgaacattgccctctttaaaatactggcttacccttattttaagtcttttggccttgccgatgtatataatcgtatcatccttgtcacggattatatatacccccggcaacagcggcagggtttgagctttttcgtaaagttcctgttttgtcatttattcccccggacaaaaaaataccgcccaatttaaacttaacgggcggtttgcgatatatttatatcagtcggcaaagcctgagttaaccagctttacaagagcttcaacagctgcttcttcatcctgaccgtcagcgataatcttaattgttgtaccgcctacaataccaagtgaaagaacacccaacaagctctttgcgttaactcttctctcttctttctctacccaaattgatgacttaaattcgttggctttctgaataaagaaagttgccggacgagcatgcaaacctacctgattttctactgtaacatctttataaaacattatatattctcctcataaacaaattattgatgccgtaacgacatcactcagatatttattttgtttagcttattctataacaatatgagtaattagtcaacaaattaaatacaatttatctgtaattaacatcattttacaggcaatatttgaaaaattttgttcaatttgccgattacttttcaacttctttgttgttttcaacaaattttttatataaatccgggcgttttgccgaagtcctttcaagggagtcctttcggcgatattccctgatatttttctcatggccggatagaagtacatccggcacgcacataccgtgccattcataagggcgagtgtactgggcgtgttctaaaaggccgttaaaatggctttcgtcggtaaacccttcttcactttttaaaacccccggcaacatacggcacacggcgtcggttataacaagtgccggcaattccccgccggtgagaacatagtcccctatggaaatttccatatccgcaagttcttctataaccctttcgtcaataccctcgtagtggccgcacacgatagtgagatttttcttttttgaaagttctattgccgtctgctggtcaaaaaccttgccggcggcagttgtaaacactataaaggcaggttcgtcgctgtcggcgtcgatagctttacaacagtcataaacaggctgtgtttgcattaccataccgtgaccgcccccataaggagtatcgtcaacatttctgtgtttatccagggtgtaatcccttatattaaatgtccttatatcaacttttcctgcattttttgctctgccgattatgcttgtattgataaccgcatcacacatttccggaaaaagagttgcaatgttaattctcactgaacataccctctatgacttttacacgaataattttgttatcggtgtcggtgcttacgataaactcgtccacagccggaaacagatattctttgccgtcattgccgtcaatataatatatgtcgctggccccaagatttttaacatctttcactgtgccgatttcctcgtcggtatcatcgtttatgatcttacagccgattaaatccacaacaaagtgatagccctccggcagttcaatctcgtctttatcaagatacaaaaccttgcccaccaaatttctggcagtttccacattgtcaattccctggaattttattatgacaacatttttatcggctctgacattttcggcaatataccgccgataatgcattttatttttttgaatgtagaaggtgtcaaactcttccaaaaagtccggtgaatccgcccagggataaacttttacctcgccacgcaagccgtgtacggaaataacctcgccggtttcgatatatgtcatagcagtacctcagttaatcacaatatcaaatacgggcgccctcgcctgaaagcacccggattattacggcaatgccgtacaatccacaaatatatctgtgaacatacggcaacaccttaaaacttagtctatttcaacggctaccttttcgcctgctctatttgcggcggctctcataaccgtacggatagcctttgcaattctgccctgtttgccaataactctgcccatatcgtcggcgcctacggaaaggtggtaaactgttacaccctcttcgtttttctcatcggcaacaactttaacggcatctttatcttcaacaagacctctcgcaatattcaacaataattgctccatgcaagcctccgaaatcagatgatattgtttttcttcaaaagtgcctttactgtatctgtcggttgtgcacctgtagcaatccactttttagccttttctgcatcaatagtgaaaacagaaggttcctttgtaggatcgtaagtaccgatttcttcaataaatctgccgtctcttgggaatcttgaatcagcaactactacacgatagaaaggagctttctttgcacccatacgacgaagtctaattttaacagccatctcttttacctccataaataaattatctatattaaagcgccttgcgcttaatatacaatcgagatttgtttgtttaataagtttaataaattttatctgccccttaacattctgccgaatgccttaggattttttgtaaactgcttcatcattttttgcatctgctcaaattgacggagcaatctgtttacgtcctgcaccgtagtgccggaaccccgggctattcttctctttctctttgggtcgataatcgagggcttttccctctctttccgagtcattgagaatatgatagcctctacacgcttaaattctttttcggctctctcctcatcgtcctcgccgattgaggcgccacccggcaacatggaaaccatggctcctatgccgcccatttttttaacctgccgcagttgatccaacatcatgttcatatcgaacttgttttgcatcatctttttggcggtttcctctgcggatttttgatcccgcacatcctgtgctttttcaatgagagtaagcacatcgcccattcccaaaatacggcttgccattctgtccgggtgaaaagcttccaaatcatcaagcttttcccctgtgcccacaaactttataggcttaccggtaacggctttaacgctgagggcaacaccgccccttgtatcaccgtcgatttttgtgattataacgccgtcaaggccaatagtttcgttaaactgctttgcaacatttaccgaatcctgacctgccattgcgtcgataaccaaaagggtttcgtttacgggaatggcctgtttgatgtttgtaagttccgccataagctcttcgtctatatgcagacggcctgcggtatccaaaatcaaaatgtcattgccgtaatccttggcgtgattgtatgcgttcttagcaactattaccgggtccgtcttgcccatttggaaaaccggaacaccggcctgtttggcaacaacctccaactgctcgatagcagccggacggtaaatatccaaagccgcaaccaagggtctgtggccttgtttcagatacatcttggcaagttttgccgtgtgtgttgttttacctgcgccctgcaaaccgcacatcataataaccgtagggccgtgatttgcaaacttaattcttgaattttcgctgcccatcaaagccgtaagttcttcgtttacgatttttataacctgctgtgccggagtaaggctgtccataacctccgcacccaaagctctttcgctgacggttttaacaaagtcctttgcaacaagaatgtttacatcggcctctaaaagggcaatgcgcacttcacgcattgcaagcttaatatcttcttcggaaagcttgccctttcccctcagctttttaaaagcggtggtaagtttttgacttaaagattcaaatgccataaattctgctccttacaaattggaaatattgtcgcacagctccataatagcggtagccgcctttgacacatccccattcaccgcataagatgagttataaaagttaatgttctgtgccagtgactttattttttccgcatcttcgatgatttcacggtatttgccggcaaaaccgatttgttcttcaagctctgtcaatacggtttcgccgcgtttaacggcatctctgaccccttgtcttgtgatgttgaagttatcggctatctccgaaagggacaaatccatgttaaaatactgttgcatcatatcacgctgcttttccgtaagcacattgccgtaaaaatcaagcagatatgacatatcaagatttttggacattcattttcccctttctgtaaagtttgattgctttacaacgctcgaatattatattatataaaagggaaaaagtcaaggagaaattgttcatattttcatattttgcctcaagcgacaaaaaaatcggcgggaaatacccgccggcctttggtttattcacttgtatattcacaaagtgaggtgataaaatcctttattcgtatatgccggcacaagcctataagcataaaagccaaatatgcgcccattgcggtaaaaaagcacacttgatttgtaaccaaaccgatttttgagagtaaaaaagtcaaaagcggtattataaaaattatcgcccttaccgtataatatctcgtaaactttgccgtttggtctttgaaattcgggatattttcctttgataactcttccgaataatttttaattttagatattaccatgtagccggaaacaataaattgtattcctacgagggatattataggcaacatcggctcatatgtttgagtagcatacacctataaaaaaatttgtaaaaaagtgcttgacaatatcctgttcctgtggtatcataatcaggcaattggaaatgcgctgatagctcagctggatagagcaactgccttctaagcagtgggtcgggggttcgagtccctttcagcgcaccatctgtggtggatgtagcttagctggttaaagcgctggattgtggtcccagagaccgtgggttcgaatcccatcttccaccccataaaagagcaccttgcaggtgctcttttcaataatgggctatagccaagcggtaaggcaagggactttgactccctcatcccactggttcgaatccagttagcccaaccaataaaacgcactcggtatgagtgcgttttatttttatgtttgtttttattacattaaagttataccaaaatgtaaaccagcaatctttaaatcgccgttcatgcaaaaagcaggcttatgcctgctttaattattttcggtagcctgttcttctgtgcgttttcccctcatcgccaaatacttttcaagtttcaccatatacttttctcttttttcatcaaaatagttttgcaaatcatctgtcatatcgtaaacttgtaaactcacggcgattttttcatcttgaaattttctcgttttaagtcgcataaacagtttatgtccgctccggcaaacaggtgcggaaatctttttatccttaccgacggaaatccactcggttatttcaaccggccggccacagtgaggacaaacggactttttcaatttctttgactttttcatgtcatcaatggtaagaaatgtgaaatcagtactttctatccgtggcaaatcgtcaataacaaagggcggtttatactcagccataccggcagccatatccagatgtttgcacacggcaactgtgtttaatgcgtcatgtagggcgtcgtgagcttcaagttcttcttcccctaacatttccattgcagcagacagagaaatctgcctgttttcatgtgcaatttgtttgtcaaatatctgctgtgcgtcacaatagctgtttaagaaggaaaaatcccagtcatacattctcaaattatttttgaacataggcacatcatccggcccccatgttataaacaaagggttttccccacaccaagatttaaaattttctattgcccgataaaattccataccgtcttttaaatcattttcagttatttttgtcagctttaaaacgctccaatgcatttttttgtaaaaattcggttttacatactgcttatagctgtcgattatgttaaattcttcgtcaacttttactgcgccgatttctattatctcgccgctaagataaaccggttttgtttttacaaatttttgtgaaattgcctgattccactccaaatccattacaatataattcatattacccctgtatcaactgtgtaactttgcggaaatttcccgcacttccaatttaaacacctgaacggcttttacattcccatcactaaattcaaatgattttcccggcacatagtgagccattattgtatttaaaccgtggattttttctgctttatcctctaccgtctcaatttttccgtagcctataaccgatttgaattttgaggaataagtacaagcctcccgaccgccgtaaatttcggtatcgctgtcggcctcaaatccggcaacgcccaattttttaatcaaatcaagtttttttccctcttttgcaccgtgaaaataaaaagttctcttgccgtccttttcttcaaagccaaagttcaacggcacaatgtacggcgcaacgccgtcggcaaaggccagctttataatttggcaggaatttataattttgtttatttcacaattatccgtaacttctctgtcttttcttctcataataaaaacactccatcaagctctatgcatagattatatactatcaaataatgtatgtaaagggcataataaaagccccctttcgggggcttaaaattatttttcttggctcttaatctttttaagttttctctctgattggattgcaaaaacaaccaaagcaaccaaagtagcaacataaggaagtgccgatgcaaactgtgtcgggattgacaaagactgcaaagcatttgacgcagagtcaaatacaccgaatatcaaagcggcaacggctgtacccaaaggctgagcacgacctacgttcatagctgagagagccataaagcctctacctgccgtcataccacggctgaagaatgaaacgtaacccattgacagtgaaacgccgccaaagcctgcaaacaagcctgaaagggcaagtgcctggaactgaactttctgaacgtcaatacctacggactcggctgcattcgggttttcacctacggctctgattctcagacccattgctgttttatcaataagaatatatacaataaaaatactgataatagccaaataaaccattatattatggccggaaataatctggccgataacaggaatatcctttataatcggaatgttgataataggcattgtgcttgatgcaagtgacaatgaaacgcctttttcgcctgcggcaagataaagtacaaatactgtaccgcctgatgcgattgtgttcaatgcaagacctgtcaggtacatattggctttgagcttaatacccataaacgccataaacaagcccaccaaaacagccgctaaaacgcctgccaaaaagcctgcaagagcgcccatgccctctgccttaccgataacttcggcatagccgtccataccgaatttaaggccgccgaggatgcccattttaacctttgcggatacaacaacacctgtaagggcagaaataagcatcataccttcaagtgccatattaaatatgcctgctctgctggcgaaaataccgcccaaagctgcgaacaataccggtgtagcaatacggagaaccgaaaaagcgaaagccggtgtgaatacgattgctgcaatatcttttaacattacgctttttcctcctgttctaactgtttcttggcattgtcaacaataagcttatgtttaaacttagccataaacatttcagctgcaacaaggataatgataataccctggattacatcaacaaattcgataggaacatcggttacacggttcataacgtcagcacctgctctcaaatatgcaaggaagaatgcagagaacggaaccataagcgggttgttacctgcaagaacgcctacaagaacaccgtcaaagccgtaacccggctgtgaaccgaaccagataaatctgttatacatacccataatttcggcagaaccgcccaaaccggcgataccgccgccgataagctgtgttgccaaagcaacggaaacaacagaaatacctgagtacttagcaaagctttcgtttgcgccaaccattctgatagcatagccccactttgttctgtaaataaacaagtagcctatgatacatactgccaaaccgattataaaaccggagtgaacacgggtgccgctgataatgtttgtaagttttgcccgttccggcaacggtcttgaagcctgcaagccggaagctgtgtctttaagatgataaaggaatatgtaatccgaaagtttaagcaaaatgtagttcatcataagtgatgaaacaagaacattggctttaaatctaatctgcaaaacagcaggaatcatagcggccataacaccgctgaaaataccaaccaacaaacagcacaaaaccataggaagttttgaaaggcctgtgtaagttgtgcagaaaagtgttgtaaggtttgcggcaataaggaatgcaccctcgccaaccatattgaacacattagcctggtacatgatggaaatagccgtacctgtgaaaagcaacggagtcatgatttccaaaacgttacctatacgggattttttctgcaaaggacccgttataaatgttgtgatagcctttacaggcgtatcgctgataagtgctataacaataaatgccaaagccaaagcaatgagaatagccactgccgttttaaaagcattaaagcgtttttcaatttgtttaccggtcataagccaccctcgcaatctcttcaggagtttgttcttttacgccaagcatatattcgccaagctccatatctgtaatttttgatgcatcagggatatatgctgcaatatgtccgttgtgcataacgatcaagctgtctgaaagttccagcacttcgttaaggtccgcagaaataagcaataccgctgtgccgtcgtcacgaagctgaactatctttttacggataaattccgttgcgcctacgtcaacgccacgggtaggctggtttgcaacaacaagatgcggactattggagaactcacgggctgtaacaactttttgcatattaccgccggagagcattcttaccgcagaatccctgttatcgcacttaataaggaagtccttaataagctgatcagccaaattgttaatctttttatcgtcaaggaaaagacccttgttaaattctttcttataatatctgtcggaaataacattgtccttaacgccggaatccgcagctataccgtaggtcatacggtcctcggaaacatgggacacacccatctctctgattttgcgaattgacttgcccttaacatcttcaccgtttacggtaatagtaccgctccggtagtccaaaaggcctgttatggcttccgaaatctggctctggccgttgccttcaacgccggcaatacccaaaatttcgcctctgcgaacagagaaagaaacatcgtctacaatcttcttgccgttttcggatactatgtttaaatccttgattttcaaaaccggtgcgccgggttttgcaggttctttctcaaccttcaaaacaacgtcacggccaaccatcatacgggaaatatcctgttcggtaacatccgcaacaatggccttaccaacgctcttgcccaaacgcaaaaccgtaagacgatcacacaattctttgatttcgttcaacttgtggctgataaaaacaattgtgtgtccctggtcacgcaggtgtttaagttccacaaacaattcagcagtttcctgaggtgtcaaaacagcggtaggttcgtcaagaataataatttccgcaccgcgaaccaatgcctttaaaatttcaactttctgcttttggcctacgggcaaatcccgtactgccgtgcgtgggtttacaataaggttgtactttttgcaagcctcttctgtgatcttcacagcttcttccatatcaaacaatccgtttttcttcggctccataccgagaacaatattctcggcaacagtcaaagacggaacaagcataaaatgctggtgcaccattccgacgccgtgagcgatggcgtccagaggattgtttattttgacttcttgacccttgataagaatacggccttcttcaggctgttcgataccaaagaggactttcatcaatgttgttttgccggcgccgttctcaccaacgagcgcatgaatttcgcctttatttatggagaatgtaacatctttgtttgcaacaaaaccgttggagtaaacttttgttattttatccataagcaaaatttcttctggcatattcctcacctcactaagtagtaataaaattcacatatattttactaaattatgagacaaatgtaaataagaaattgaaatttcattcatttgtacaataaatttttcacaatttaagcaaaaatgcaaaaggcaggtcaagcctgccctttggtttgttttttaataagtagcttacttttcgtattcaacaatctgatcttctgtcatgtcgtaagctgacggaacaacgatagaaccgtctgcaaggcctgcttttgccttgtcaactgcagctctgatttcttctgttgtcaaagcttcgtagttttcgttttcggcaataccgcagtattcgccaccgaaccattcacggtcgcctgtgtgttcaagagtaccgtcgatcttcttttcgatcattgttctgagtgacttaccaacttctttcaaagaagaagttatgatgcaagctgctgttgtaggctgttcgcccttcattgtctcgtactggtctgagtcaacaccgattgaaagaacaccgttgtctgctgctgcttccaaagcaccgttgcctgaagaacctgctacagcgtggataacgtctgctttctggttcaagataaggtcattaccgatgtctttgcccttgattgggtcgttgtaaacgccaacataagaaaccttaacctggatgtcagggttaactgatcttgcgccttcaacaaagccaacaaggaagtcacgaataaccaatgtctgctggccgcctacgaaaccgagaacgcctgtctttgattccatagcagctacaatacctgcaaggtagtctgattcgtttgccttgtaagcaaggaggtaaacgttatctgcgtctactacctgtgaaggttcatcgtaaacaaagaatgttgtgtcagggtattctgcagcgtgggcgctgagccattctgttgcaataccgaaaccgaggttgttgaagcatacaatgtcgtatccgtcttctgcagcttcctgcattgtaggttcagcctttgagttatcgttgccgaattcaacaactgtgtagtcaatcaaaccttctgactgcatttctttgagagatgcatctgctgagtcgttgaatgacttgtcgcccaagtttgaaacgataagctgaactttgagtttgccttcgctgtcagtgtcgccactgttgtccgatccttttgaagagcaagcaaccattgagatggccattgcacctgcgaggatcaatgcgaataattttttcattggaaatgtcctcctaaaatttcgtgtttgtacacgcgttttggaactttctgttcctttcgttctcaattatatatcatcggtttgcattttgcaacaccctttttttgtaacataattaaatattttgcgttttatgtgcaacaataacaaatattttgtaagatttatgtaagttttaatgaaaaaaattgtaacaaaattattacaaaatttatattggaataacttgacgattgtgataaaatagacaaagaatttatgcttttgaataaaaggagatttacagatggaaaattcattgtacgccttaggttacacccttgtgcgagcagtgccggttgtaattgctatcgtttgcattgccaaaatatcaaaaaatatagccgaaatatcaaaaataaaagaggagcagaaaaaggctcggcaggaaaactcggaaaagaaaagttaaatttttattaacaaacacataatatgcttaaaagctcttgactgtaaaatattgataagtataatatagcgtataattactttattatgccggtcggatactgtgaccgcaatacggaggtaaaattttggttttcagcaacatattttttattttcaggtttttatccctgttcttagtcatctactatttggtgccttacaaatataaaaatgggattataacgattttcagccttgtgttctactcttggggcgaagttaaatactttccaattatgatattaagcaccgtggtggattttttctgctcgcaggttatcgaaaaacaccgtgacagctcaaagataaaaaaagcgtcccttgccgtttcggttgtgtttaacctgggtatgcttttgacatttaaatatgcggacttctttatttcaaacataaattccgcatttggcacggcaattccccttctcaaattaacattgccattgggaatcagtttttacacattccaaacaatgagctatacaatagacgtttaccgtggagatacaaaagccgaaaacagcataatcaatttttccgcctatgttacaatgtttccccagcttatcgcaggccctattgttaaatacacggatattcgggaaaaattaaatacctacgaaggcagaatcactcttgacgaaataaacgagggtataaaaatatttatcttcgggttgggcaaaaaagttcttatagcaaacaatgtaggcgcattgtggacagatattgaggctttgggttttgcaaatgtatcaactccccttgcctggcttggcattgttgcatatgccctgcaaatttattttgacttttccggctactcccttatggccattggtcttggcaaaatgatgggctttgattttccgcaaaacttcaatctgccgtacatctcaaaaagcataaccgaattttggcgcagatggcatatgacccttggcagctggttcagggaatatgtttacattccgttggggggcaaccgcaaaggccttaaaagacaaattttcaatatgtttgtagtttggtttttaacaggattttggcacggtgccgactggaactttatgctgtgggggctgtactatttcctgttccttgtgattgaaaagacatttttactggacaagctgaacaaatcaaaagtcctttcaagaatatataccctccttgttgttttggtgggctgggctttgttctatatcaccgaccttggcagtctttgggcgttcttgggcaagatgtttacgatttccggcggtgttccggcaacttatttctttaaaaactaccggatttcaattttaatcggtattctttgctcaactcccctcaccacaaaattttacgataaat

SEQ ID NO: 3885 - DNA, 7399 bp, Unknown
  16S sequences of unknown bacteria
agaattcttaaaaaacggaaaagtattatggtaaaaaattggttaaacgaaaaatttattgcgcaccgcggatttcatacggatacggtcagcgagaatacgctgaacgcctttcaatccgcaatagacggcggctacaacatcgaactcgacgttcaacccacctcggatgacgtagtcgtcgtataccacgacaccaatatggggcgattgacgaattgcaaagactttgtcgaaaacgtttctttcgaatatctgaaaaaagaagtgagatacacacggacgggagaggggattcccacctttgaagaagtggcgaggctctgcgaaggaaagacgggactgatgatagaaattaaaaagagtacgtattacactcctgaaatccgcgtggaacctctgcttttggagcttttgaaaaattacaggggggattttgtggtcaagtcgttcaatccgtttgccgtacaatggtttctcgacaacgcccccgaatttaccgtgggattcctttccgaatacgacaccttggacgactacgacgaggcgagccgaaagctggtggattctttcctttttacggggacgcgcaaagttgactttttcgactacgcggtttctaagatcggcagtccgctctggaattccgtctatggaaagatgccctgctatgcctgggtggtaagggatcaaaagacgcaggactccgtcaggggcaaagcctgcaatattattttcgaggattacgttccgaaggaggaaaattgagtgtttacgtttgctgtggtcggattcggcgcgcgcggcaggaagtatagcgccctgctgcaaaagaaaggcgcgcggctggtcgctgtctgcgacaaggacaaaacgattctcgaatatgcgggacgcgcgttcggattggagaaaacagcgctgtactccgattatgaaagcttttttaaaggcgggaagaaagccgatcttctgatcgtttccaccaccgatcgggaacacgtcaaggcggccgtccccgctttggaaatgggatacgatctgattctcgaaaagccgatcgcaaccagtttggaggactgcgaagcgatttatcgcaaggcgcaggaaacgaaaaggaaggtggtcatctgccatgtccttcgctattcgccgtttttttccgtcctgaaagagcagctggacagcggaaaatacggaaagatcgtcaacatagagcatacggaaaacgtggcatattggcatcaggcgcatagctttgtacgcggcaattggcgcaatgaagaggaaagcacgtttatgctcctggcaaaatgctgtcacgacctcgacatgatcgcctatttgtccgggaaaaagtgtcgctttgtcagttccatggggcatttaagttttttcaccgccgaaaacgcgcccgaaaattccgcggcgtattgctatcgctgcggcgtgaacgattgtccgtataacgctttaaattggtacgtcaaaaatcctttatgggttaagcttcccgagctgcccgaagaaaaccgcgatgcgttcatccgcaattggctgagcgacgagaagaatccctacgcgcgctgcgtctttcactgcgacaacgacgtcgtggatcatcaggtggtgaatatgcagtttgaggatatgtccacggcgactttgacgatgacggcgtttacggataaattttatcggagaacgcacgttttctgtacgaagggcgagattgacggggatatggaagaaaaaaagctgtattgcacggttttcggcagagggcagacggtgatagatctcaaagacagtttcaacgattcgcacggcggcggggatcagggactcatcgacgacgtcgtggacatgatgaacggtcgggaaaggagcgggcgcacagacatcgaggcgtcgatgatcagccataggatcgcctttgccgcggaaaaatcgcgcagagagaacggagcgagggagcggttataaaaagtatcgaaaagcaggaggaagcgaggaatgggaagaggtcggatcacgatccctacggacgaagggtgtgaggaaataacgaaggaactggcgaaaaaatggggcgcggacgcggtgcgcgactgcgacgggacgaagctgcctgagaacgcgaaggaactggcggacaaggtctataatacgtacttcgtggtgcggggggataacgaatgggcgcaggcgcacaaagaggagttgcagaacgtgttgttgatgtcggagcgggtgacggcgacggagtcgagtctggaaatagagctgttgaaaggatattcaaaaagtcagctggaagtgaatgaagaatcgccgcataagtattggcaggtgtatgatcgtacctcgggggaagaggtccatgattgggagtacgcgggaaagggcgtggtgaggatagggaaggcgaagaagtatcacgagtatacggtgaacttttttgcgaagaatatctgggattcgacgcagatgtataactatctgacgaacggctggacgtgcgaaaagcagatggtgatggagccgagatacgaaaagacatggaggcatatcgaagagaacttaaagaagtggtgcgaggaaaacgagaatgtgaacgtagtgagattcacgacgttcttgtatcatttttttctggtgttcaacgaagaaggaaaagagaagcacgtggattggttcgggtatccgatgacggtgagtccgcgtgcattggacggattcgaagcggaatacgggtatcgcctgacgacggaggacatcgtggacgggggaagctacggaaacaatttccgggtgccgaccgggaagtatctggactacatggaatacgtgcagaaatacgtagcgaagacggtgaagcgattagtggagatcgtgcacgcaagcgggaaggaagcgatgatgtttttgggggattcgtggatcgggacggagccgtacgggaaatactttaaggaaatggagctggacgcggtggtaggaagcgtgggcggaggagtgacggtgcgaatgctgtcggagatcccgcacgtgaagtaccgtgagggaaggctgctgccctactttttcccggatacgttctatgaagggaacgaagaagcggcgttgaaggaactggatcggaattggcgaacggcgcgtcgggcgctgatgcggaagccgttggagagaatcggttacggcgggtatttgtcgctggctgccaagttcccgagattcgtggaccgggtgggagagatctgcgaggagtttcgagagatctataaagcgataggcgggaaaaagccgtacagcgtattgaaggtagggatcttgaacgcctggggaaaacagagatcgtggatgagtttcatggtggcgcacgagctttggtatcagcagatctattcgtatcagggaatcctggaatcgctgagcgggcaggcggtggaagtagaatttttatcgttcgaggagatcgaaggaggagtgccgaaagggatagaggtgttgatcaacgcgggtgacgcggggacggcgttttcgggaggcgagaaatggcgaaacgaaaaggtgcaggagagcgtgcgggaatacgtgtataacgggggaggactgatcggagtgggagagccgagcgcgtgcgggagaaacggtagatactttcagctggcggacgtattgggagtggaggaagagagaggcttcacgctgtcggaggataagtataacatagagaaacgcaggcacttcatcacggaagaggtagagggaaagctggactgcggggaagggaagaagaacatctatgcgctggaaggaacggaagtgctggaaatagagctgagcgagagaatgagtcggaacgtgaacgtaggggaagtgaaggtcgcggcgaagagatacgggaaagggagaagcgtatacatagcgggactgccgtacagcgaagagaacgcgagggtgttataccgggcgatgatatggagcgcggggaaggagagtgagctgcggcgggcgtattcgacgaatccgaagacggagtgcaactactatccggacacgaagaggtatgcggtgatcaacaacagcgaagaggagcaaagcacgacgttttacgatctccaaggctcaccttttactcttctactcaaaccttgcgaaatattttggaaaaagtctgaataggacggaaaaacaatggaaaaaagctcaaaaaagcgcgcgcttttttgtctgggcacagcggcttatttcatttcttacatctgtcggctgaatctgacggcggccatgcccgaaatgatgggaagcggctcttttacggcggcaaaattagggatcattacctccgtttatttcgtctgctacggcgtagggcagttattcgggggaatgctaggagattttgtgaattccgcgttactgatcgccgtaggtctgagcggctccgccgtatgcaatctcggaatttttttctttcccgattttttgcccgtcctgattttatgggcgttcaacggcatatttcaggcgatggtgtgggcgcccatcttaaaattgtttaccaactactacacggaggaagagcaggtaaaaaacctgactaacgtttccgtagccatgcccctggggacattggcgggatatcttatttccgctttggtgctggcttttttggattggaagtatgtttttctcgtctgcgggctggggaatctcttgctgacggcggcaatagcaacgggcatacgctttttgtgcggcgggatgcagaaaacaaaagcgactcaaaaaagggcttccctcagcgagatgaaaacggcggcaaaaaaaatctttttaactgcgtttgcagcggttttgttgccgattgccgtgcacggagctttgaaagacggtatggcgtcttggacgccgacttttttaaaggagcgtttcggcgtcgggaccgtattcgggcttgttctgacgatgatcattccgctctttaatatgtgcggagcttatctctcacgcgccgtttataaaaagagcaataacgcatattttaccgcctgcctgttctttgcgctcgcttcggctgccttaggcgctttgctgctttttgaaaaggcgaacgtctatttgtctttggcgtttatcgtcgtggtgacgacgtgtatgtatgcggtgaactttatttttatcagtatcttgccgctcggtttcaagaaatacgactgtatcggcaccgcgtcgggaattctcaattcggtggcgtatctcggcacggcgctttcctgtttttgcctcggcggcgtattgggaaaaatcggttggacgggcgtactcggcctgtggctgggcattgccttgctcgccgaaggaattttgatcgggatatacgttatgaatctaaaaaacaaacaagaaaaaggctcttgaattttttagttaaaacggctttttttctttgtcgcaaaaagataaaaagaccttcgaaatatgctcggaggtcttttatttttacttacaataaaaacaagcgataaaaaaaggattttttaacgcaaaaacttgacaaatgcctcgctatcggctataataatctatcaataaattaaccgtagttaatttattgatatggaaaggagcgctccgcgaagaatgtcacctttaaaaacatagagggaccgaattgcttgccgtatatttgggaaagataagagagggagagcgctttctcgcctcgatcataattcgaaagggcgaacgaaaacgcatagacggcgcctttccccttaaaagtgaaccttttaaaagaaaaagagtcgttataggcgaaaaaatttcttcattttccgataacgaatatagaggctttgaacattttgaacgcttaccatgtattataagtagaggccttttccccgatttgcacggcgggcggctcctacgcggatttaaaaatatcggaaagttagaaagtgagtaaaatttataaaacggaaagaggtaaaagctatgaataaacaaaaaattgtcaacgttagaggacgtgaaattatcgattcccgaggcaatcccaccgtagaagcagaagtgcttttagaggacggaagcattgccaggggctcggtgccgagcggtgcgtccacgggtgaattcgaagcgttagaactccgcgacggagagaattttcgtttcggagggaagggcgtatccaaggcagtggaaaacatcaacaccgttatacgcgggattcttcaaggaaaagacgctgcggatatctatgccgtggacgcggcgatgattgcggcggacgggagggcggataaatccgttttaggagcaaatgcgattctcgccgtatccattgcctgcgcgaaggtcgccgcaaaatccgtcgggcttccgctctatcgttttctcggcggggtcaacgggaatcggcttcccgttccgatgatgaacattctcaacggcggcgcacacgcggccaataccgtggaagtgcaggaattcatgatcatgcccgtgggggcgcctacgtttaaagaaggactgcgttgggggtgtgaagtattccactcccttgccgcccttctcaacgcaaagggactgacgacgtcggtcggcgacgaaggaggctttgcgccaaacctcgaaagcgatgaagaggcaatcggatatattctcgaagcgatagaaaaagccgggtatcagcccggaaaggattttgtcctcgccttggatgccgcttccagcgaatggaagagcgataaagagggcgaatatcgccttcccaaaagcggcgatgcttttagctgcgagcatcttatttcccattgggagtccctctgtaaaaaatatcctatcttttcgatcgaggacggactcgacgaagaagactggacgggctggaaggagatgacccgacgtttgggcggcaaattgcagctcgtcggcgacgacctcttcgtgacaaacacgaaaagattgaaaacgggtatcaaactcggctgcggcaattctatactgataaaactcaatcaaatcggctcggtttccgaaacgcttgaagcgattaaaatggcgcatgcggcgggttataccgcgatcgcgtcgcatcgttcgggcgaaacggaagatacgacgattgcagatctcgccgtgggactcaatacttgccaaatcaagacgggcgcccccagccgcagcgaacgcgtggcaaaatacaatcggcttctccgcatcgaggaggaattgggcgcaagcgccgtttatccgggattccaggcattccatttcagaaaatgaaaaaagcgtcgtctaatgtccgcttcttttacttctaattcgctttttcaatatttttccacctatttgaccgccgtaatccgacagaatacggcgg

SEQ ID NO: 3886 - DNA, 32759 bp, Unknown
  16S sequences of unknown bacteria
cgctcaggtctcatcctttttttcttcactgtccaatatgtattgtagcgctacagtccgggcgctttttaagcgccgccccgcttgcaagcgtgcgctccttttgttataataatagaaggacccattttgaaaggtttggagggccgtagccctcgaagtgaaaaccgaattcagcggcctgtgcggtggattcggaagccctgcgcgtttcctccgccgcgccgtagtcgcaggggaaacgtgtcccggcggaaaaaaccggcctggccggactttttcgacacgctgagaaggtgttgtggcccatggcggataaaaaggaggacgctccatgagatgccagtactgcggttatctggacagccgcgtgattgattccaggcccacggaggagggcagctccatccgccgacgccgtgaatgcctgcgctgcggcaggcgcttcaccacctatgagaagatcgaaacctcgcctctgatggtggtaaaaaaggacatgcggcgcgagcccttcaatgccgacaaaatcaaaaaggggcttctgcacgcatgtcagaagcgcccggtgagcatgaaggatatcgacgccatcgtggaaaaggtagaaaagcaggtctattcctccggcgaggacgagctgtcctcccgccgcatcggcgaagccgtgatggaggagctcaagcgcctggacgaggtggcctatgtgcgcttcgcctcggtctatcgccagtttaccgacgtgagcagctttatggatgagctcaacaagctggtgctggaaggcaaggcccgcgccaaggaaaacaagccgtccggggaataacgcgcctattcccccgccagcgtcagcgtgtccaggtcattgggcacatgcaggtcgccgtcgtagtaggctcgcccctcctgcgtatagagggtctgccgttgcgcaaggcggcggtcctccgtatgccacagcaccagatgaggaatccccagcccttgcgccagctcgcaggcatccttgacggtggagtggtgcttttcgtagggtttgaagcgctcgcggtcctcatagaggcaaaacgcctcgcacagcagccagtccgcgcccctgacataggcggcgcaggcggggttgtagggctcgtcgcccaggcagcacagcttgccgccccctgcaagctccatggtaaatcccatctgcttcatcttggtggagtgaatatcgaaaaacgtaaccttccggcccaggatggtatccgtctggccgtcggaaatatcatggaaaaggatgcggtcgccgaggcggtccgtcatctttttttgcaatgtgatgcgcgccatctggcacaggccctcacgcacggcgggatcgcaccagatggtcagctcgccctcgtagcggcccgcgttcatggccgccgccaccatgcgcaccacccataccgcacccagcagatgatcgctgtgcgcgtgggtgagaatcaggtggtggatctgtgcaagttccacgcccgccttttccagctggcttagaatgccgttgccgccgcccgcgtcacacagcaggtagccctggggcaaatccagcagaaaacaggtgttgtagcagcgggtcacggcggcgttgcccgtgcccagagcggtcaggcggtccatttataaactcctccttcagcaggtatctgccgggcccctgcatggggcgtttgctttttccaggccgaatatgctatgatacggccaataaatgggaaaggagcggcgagcatgggcaaaagatcctcgtggatacggaaacgggtgtgaattacctggtggtgattcccagtctggcggtgggctgcggcctgaccgttctggtggaccagaacggcaagcccatcgtaacccccgtggaagccccggaggaataacctctttctccttcgccgccggatgttatccggcggtttttgcgttttgcttactgcgcgccctgcaagtaccgctcgcccgtgtccggcagcagtgcgacgatcagcttgcccgcgttttccttccgacgcgccagcaccgtcgccgcgtgcagcgccgcgccggaggagatgcccgcgagcaccccgtccagacgcaccagcgcccgccgggccgcgaaggcttcctcatccgtcacggggattacctcgtcgtaggcggaggtgttgagcgtagccggcacaaagcccgcgccgatgccctgcaaaccgtgcggacccggcgcgccgccctccagcaccgcgctggttgccggctccaccgccaccacgcgcacggcgggattctgtgccttcagatactcggccacgccggtcagcgtgccgccggtgcccacgcccgccacgaaaatgtccaccttgccgtcggtatcctcccagatttcggggccggtggtccggcggtgcacggcggggttggccgggttggaaaactgatcgggaatcaggctgcccgcgatctgctcatgcagctcctgcgccctggcgatggcgcccttcatgcccagcgccccgtcggtcagcaccagctccgcgccataggcttgaatcagcgcccgccgctcggggctcatgctgtcgggcatcacgatcagcgtgcggtacccgcgcgcggcagcgatccacgccaggccgatacccgtattgccgctggtgggctcgatgatggtgccgcccggcctgagcgcgccgctttcctccgccgcgtccagcatggcgcaggcggtgcggtccttgacgctcccggcgggattgaaggcctccagcttggcggcaatcgtggcgttcaggccgttttcgcggcagtagccggtcagcgccagaagcggggtatggccgataagctcggtcaggctgcgatacatcttcattgcaggcgacgcctccttcatctgcaaagccatgggattgattaggatgataggcgcacggcggccgcttgtcaagccattccggcaaaaaagccatgcgggcttgaacgccccggccgcgggtggtatgatagccagagagcgcttaacgcgcaactgccaaggaggaatgtcccatgcaaagcaacctgacccgcgagcaggccctcgcgctgctcaaaacctataacaaggagccctttcacatccagcacgcgctgaccgtggagggcgtgatgcgctggtatgccaacgagctgggctacggcgccgacgccgattactgggccaccgtgggtcttctgcacgatatcgactttgaaaactggcccgaggagcactgcaggaaagccccggagctgctgcgcgccgccggcgtgggcgaggacatgattcactccatctgttcgcatggctatggcctgtgctccgacgtggagcccgtgcatgagatggaaaaggtgctctttgccgccgacgagctgaccggcctcatcggcgcggcggcgctgatgcgccccagcaagagcgtgatggacatggaggtcagcagcgtcaggaagaaattcaaggacaagaagttcgccgccggctgctcgcgcgacgtgattgccgagggcgcgcagcgcctgggctgggagctgacggacctgatggaccgcacccttcgcgccatgcagagctgcgaggagagcatccgcaaggagatggagggctgaccgcctccgccggcaagcaaatgcctgccggcgcttttttattgtccacgataccgcaccgcgcgttgccacttgtggcgaaactgtaaaatcgacgcggttttttgtcatttcaggcgggaacgcttgacaagcatttattagccggcttataatcgcaccattccacttgaaggaggaaccctgaaactatgcaaactctgcctcccagaaggaaaaaaaggcggaaatggccgtggattgtgcttgtgctggtattgctgctgatcgcggccttcgtattatcgctgcgtcaaacggcggcacaatcccttaccgaggaaatcgcccagcggcgcgacatcgtcacctattacagcttttcaggcagcctgatccccgtgaccgacgaggtgcagaccgccaaggactccctgaaggtcaaggagctctacgtccaggaaggcgaccgtgttgaggagggcgacgcgcttttgcgctcaagcgacggcacccgcgtatatgccgcctacagcggcaccattgaggaactctatgtggagacggacgactctctccagcccggcagccagattgcccgcatcgtggactacgacgcgctggaagtgagcgtggacgtggatgaatacgacatcgacgccatcgaggagggcaaggaaggcgaggtgtatctcaacgcgctggacacgaccgtgcccggcaccgtaaccgagatcgcccgcaacgcgaccaccgaagccggcgtgagctactatcccgtcaagctggaggtggaagccgcgcagaacgtgcgcagcggcatgagcgttgaggtgagcatcctcaaccagcaggcgctgggtgcggtcagcctgagcctggacgcgctgagctacgacgagtacaaccgccccttcgtctacctgaaggatgccgaaggcaagctcgtcgccgaatatgtcgaaaccggcgtgagcgacggccagtacatcgaaatcgtctccggcgtcagcgagggcgaagcggtctattaccagtccaacgacctggcgcgcttctttgccatgcagcagcgcatgatgggcgtggaaagcaggtagccatggacagcgaagcgacgttttttcaaatgaccggcatcaccaagtcctactggatgggggatgagtggtcgccggtgctgcgggggatcgacctgaccattcaggagggcgagtttttaagcgtgctgggccccagcggctcggggaaaagcacgctgatgaacatcatcggctgcctggacacgcccaccagcggcgaatacgtcctgcacggccgccgcgtggacgatctggagcccgatgagctggcccgcatccgcaaccgggaaatcggcttcatctttcaatcgtttcagctgctgccccggcaggacgccctgagcaacgtggagctgccgctcgtctacgcgggcatgccccgccagcagcggcgcgagcgcgcggcggagatgctgcggcgcgtggggctggaaaacaagatggaccacctgcccaaccagctctccggcggccagcagcagcgcgtggccatcgcccgggcgctggccaccaatcccaccattctgctggctgacgagcccaccggcgcgctggaccagaaaaccggccatcaggtgatggacctgttccacgagctgcacgacgaagggcgcaccatcatcatgattacgcacgaccgccatattgcgcaaaacgcctcccgactggtgcgcattctggacggcgtgctttccgagggggcggaggacgatgcttagggaaagcctgcgcatgtcgctggccaacatccgcggcaacaagatgcgctccttcctgacggtgctgggcatcatcatcggcgtaatggccatcatcgccctgatcaccgtgatgcagagcgccacgggagaggtcaccgcccagtttgagagcctgggcaccggcaagctgaccgtgcaggccatgggcacgccgctcaagagcggcctgaccgaaagcgacctggacagcatcctctccatcgacggcgtgtcgggcatttcccccacgctgtcacaggaattgagcgtggcggccggcggcgaggtgctggaggatgtgctggtggagggctacggctacgcgtggttccgccgggaaaccgacgccgtctcccgcgggcggcccctgctgcccgccgatcaggagcagcgcagccgcgtatgcctgatcgacagcgatctggcggccgcgctcttcagcggcaccgatcccatcggccagacggtgctggtcaagggcacgcgctttcgcatcgtaggcgtgctcaaggaccctgatgtgagcgacgtgatgagccagatgcaggccggtgatgaaagcggcacgctcatcatgccctacacggcgtatatgcgtcttttcggcatcaagggcgtttcctccctggaggtgtacgtggacgacacggaccgcaccgacgaggtgaccgacagcctggaggccgctctggaggccgccttcaactaccgcgatgacagctataccgtcatcaacatggaaagcctgctggatgtgatggacacgatgatgggcctgatgaccaacctgctggtgggcatcgccagcatcgcgctgctggtgggcggcatcggcatcatgaacatgatgctcgtctccgtcacagagcgcaccagcgaaatcggcctgcgaaaggctctgggcgcgcgtccccgcagcatccaggtacagtttctcatggagagcatcatcctctcgctgctaggcggattgatcggggtggtgctgggccttatggtaagcatgctgctggccagcctgatggacatcgctttcgtgctgtcgccgggtgccatcgccctgggcgtgggcttttcgctcgcggtaggggtcgtctttggctgggcccccgcgcgcaaggccagcaatctcaaccccatcgacgccctgcgcagcctgtaagcacaaaggagggtattgaatatgaaaaagatggttgccttgatgctggcggccctgctggcgctggccggcgtgcccgcgctggcagagtcctccgaaacactgatcctgaccgccacggtggaggggctggaccccattgtgctgtccgcccccgccagcggcctgctggcccccttcagcgtgcgggcgggacagcttctctcccccggtgaaacggtctttaccgtagagccgcagcgcgtgtatgccgaaatcgacggtacggtggcggatgtgtacgcacaggccggcgagtcggccgacgccgccgtagcccgctacggagcggtgatgtgcatcgaatatgccgaccgctatcagatcgaagcctccacccgcaccggctataacaccgcggaaaaccgcgacctgcgggtgggcacgccggtctacctgcgctcggccaatgaaaagcattttgcagacgggcgaatcaccgccgtcaacggctcccagttcaccgttcaggtgctgggcggcgatctggtctacaccgaggatgtgaaaatctaccgcgaaccggactacaacaacaagaccctgctggcccgtgccgagctgtccatcgtgcagccctacgccatatccgcttcaggcacgctgaccgacctggccgtgcgccccggcgacgaggtgcatccgggcgattaccttttcagctacgtgcccgatgtgcttggccccgccctgcgcggcgaagcgaatcccaccgccgtcaccgccccgcaggccctgatcgttacggaggtcagcgtcctgcccggcgccagcgtgcagaaggatcaggcgcttcttagcgccattcccgccggaacctaccgcctcaaggcgcaggccacggaggccgacgtggaccgtatcgccgcaggtgatgaaatgaccgtctccttcgatgaactggaccttccccctgtcacggccacggtgaccgccgtagacccgctgggcgacgggggtgaggaaaccagccgctttgccgtgtggctggattttgaagcgcctgacggcgtgcttcccggcatgcacgccactgtgcagggcggcccctccgcttgaccgggccgcccgcttggattatactggatttatcggtctgccttttttgggacgcagccgtttctcccgcgcttcgcggcaacgttgatagataaagaaggaggttgatagatgatgacgcaaaccaacttagaccggctgaaagcgtatgcggacgcgcacgcccagctcctaaccgacaactgttcgatcaatccggagctgtatcagacctatggcgtaaagcgcggcctgcgcgatcagaagggccggggcgtgctggccggcctgaccaatatctcggagattgtcagcaacaagcaggtcaacggcgaaaccgttccctgcgagggccgccttttctaccgtgggtacgacatcacggacctggtgggcgcagaagccagggagcaccgcttcggttttgaggaaatcgcttatctgctgctctttggcgagctgcccacccgtgaggaactggcctttttccagcgcacgctggcggatagccgcacgcttcccaccaacttcgtgcgcgacgtcatcatgaaggcccccagccgcgacatgatgaactccctgagccgcagcgtgctcacgctggccagctatgatgacaacgtgagcgacgtgtcgctggccaatgtgctgcggcaatgtctgatgctgatcgccgtgtttccgcttctggcggtatatggctaccacagctacaaccactatgagcgtgacgaaagcctctatatccaccgtccggatgacagcctttccgccgcggagaaccttttgcgcatgctgcgtcccgacaagtcctacaccgacctggaagcccgcgtgctggacctggcattgattctgcacatggagcacggcggcggcaacaactccaccttcaccacgcacgtcgtcacctcctccggcagtgacacctacagcgtggtcgcggccgcgctggccagcctcaaggggcccaagcacggcggcgcgaacatcaaggtggtcgaaatgatggccgatctcaagcagagcctccagaatccgcacgacgagggccaggtggccgactacctgcataagctgctcaaccgcgaggccttcgaccgcaaggggctgatctacggcatgggccatgccgtctacagcatcagcgacccgcgcgccaccatcttccgcggctttgtggagcgtctggccaaggagaaggacaaggaggaggagttcgccatctacgccatggtcgagcgcatggccccggagatcatctcccgcgagcgcaagatctacaagggcgtcagccccaacgtggacttctacagcggcctgacctacagcatgctgggcatcccggaggagctgttcacccccatcttcgccatcgctcgcatcgtgggctggagcgctcaccggctggaggagctgatcaacatggacaagatcatccgccccgcctacatgagcgtgcaggaccggcgcgagtacgtgcgcatcgacgaccggggctgaggcggcaggcaaggataaaaacgggaaaaggcccggcggaatcgcttccgccgggcccttagctttttctttcttcaggaatcacacgatgccctgagccatcatggcgtcggccaccttgaggaagccggcgatgttggcgcccacgacgtagttggtcggcttgtcgccgtattctgcggcggcttcggcgcacttctcaaagatgcccttcatgatgcccttgagcttctcgtccacttcctcaaacgtccagctcaggcgctggctgttctggctcatctccagagcagaagtggctacgccgcccgcattggccgccttgccgggagcgaagagcacgccgttttgcaaaaacagctcggtggcctccagcgtggagggcatgttggcgccttcgcccacggcgaagcagccattggcgatcagcgccttggcgccctcggcatccagctcgttctgggtggcgcagggcagggcgatgtcgcacttgatggtccagatgcccttgcacccctcatggtactcgctgccgggcacgcgggccgcgtactccttgatgcggccgcgctccacttccttgatctgcttgaccacgtcgaggttgatgccgttgggatcgtagacatagccgttggaatcgctcatggcgacaacctttccgcccatctcggtgatcttttcattggcgtagatggccacattgccgctgccgctgacgaccacggtcttgccctcaacggtcttgccgttggcttccagcatattcttgacgaagtagcacaggccatagccggtagcctgggtacgggccagactgccgccataggtgaggcccttgccggtcaaaacgccctcatagaggccggtcaggcgcttgtactggccatagagatagccgatttcccgcgcaccggtgccgatgtcgccggcgggcacgtcggtgtcctggccgatgtggcggtagagctcggtcatgaagctctggcagaaggccataacctcgcggtcgctcttgcccttggggtcgaagtcgctgccgcccttgccgccgccgatgggcaggccggtgaggctgttcttgagcacctgctcaaagcccaggaacttgaggatggacaggttcacgctgggatgcaggcgcagtccacccttatagggaccgatggcgctgttgtactgcacgcggtagccgcggttgacctgcgtgcggccctgatcgtccacccagggcacgcggaacatgatgactcgctccggctcaacgaaacggtccagcaggcccgccttctcatattccgggtgcttgtcgaacacgggagagaggctttccagaatctcggtggctgcctggagaaactcgctttcatgggcattgcgctgcttgagaccctcaagcacgcgggacgtgtaagcattcatcggtaaaacccctttcttaaaaaccggtcaaagctgtggtttgtttcggtaaactggattcatctcgaaacatcccgtgtattataacacagatttgcagccagaaaaagcaaattctgcaggatggcgtgcttgaaattgcatttgttttgtattgcattacgcaggcgacagacaggccttgccatcctccccctgggacacacgcaagaaggcgtccgcgtgcgcgtcggcggcgtcctgccgatcggtgcaggtgatgagggtctgcacgccttcggtgcttttgagcagcgcgctgcgccggcgcacgtccagctcgctgaacacgtcgtccagaagcaacgtgggcggctcgcccatctcgttttcaatcagacggatttctcccagcttcatgctcagcaccgccgtgcgcatctgcccctgactgccgaaggcgcgcagctcccgcccgcacagcgtcaggctcatatcgtcccggtgcggaccgaaggaggtgaacaggcgctggatgtcctccgcgcgcgtgcggtgcaggcccgcaagcatatcccggtagggcgtgtcggtccggctcagagggccggcatagctgagcgagaacgtttcgcccggcgtttcggcaatggctgtgtactgctcggcggcgctgcggctgagttcctccaggaaccagcgccgcgcgcccacgatgggcacgcacgcggcggcaagctgctcgtcccaggtgtcaagctggttggcaaagtcgttgaccccggcgacgcggttctgcttaagcagggcgtttcgccgctccagcacgctcagataggttttcagcgcccgcaggtagctgggccggatctggctgagctgcatatccagaaaccgtctgcgcatcacgggaccgtcccgcacaatgcgcaggtcctccggcgaaaacatcaccgtggtggcatggcccatcagatcggccacgcgctgggcgggcttgccgtagagcagcacccgcttcttgggcttttccagcggatagaggcgtacctccacctcgtgcgcgccgtccagccgcctggtctgaccatggacgagcgccacgttcgccccggcggcgatcatctcccggtcgttggcggtgcggtggctgcggcccaccgacaacaggtgcatggcctccagcagattggtctttccgctgccgttgggcccgtaaagcaccgtaatgcccggatgaggcgacagctccaatgaatcatagttgcggaagcgggccagccggagggaggtaaagcgcatggaggcaaggacctccctttcacaaaaaatgatagaaacagtatagcacattttgcgtccactgtgccacttgtgtttcatgggcgctttatggtaggataggcgtgtttgatttttgcatgttcagggggggaagtacggccatgctgcgccttcatcagttggagctgtcgctggatgacgccgccacctttgatccttcgtgcctgcggcgcctgtgcgcgcagcgcctgcacctcagcgaaaaggccgtggccgaagcgcgcctggtcaagcgcagcgtggatgcccgcagccggggcggcgtgcatttttccctgacggcggatgtcgcgctggcccaggggggtgaggcggaggaaaagcggctggcctcccgcttcaagcccaaccaggtcacggtgatcagcgggtccgccgccggagaaaccccggacgtgttcggtctgaagcttccgccctggcctgcggataagggacggccgctggtggtgggcgcagggccggcggggctgttctgcgcgctggcgctggcggcgcgcggggcgcggcccgtcctggtggaacgcgggaaacccgtggaggcccgctcgcgggatgtggagcgtctggaaacgcgcggggagatggaccccgaaagcaatgtgctctttggcgagggcggcgcgggcgcgttttcggacggaaagctcacctgcgggctgaacagcccgcacatccgcacggtgctgggcacgctggtgcgctgcggcgcaccggaggagattctggtggcccagcggccgcatatcgggaccgatgagctgcggcgcgtgctggtgggcatgcgcgcggcgctgacgcgcctgggggccgagatccgctttgaaacccgcctgacgggcctgattctgcaaaagggacgggtgacgggcgcgcgcctggctggcgccgccggcgaggaagagctggccacggacaccgtgtgtctggccatcggccacagtgcgcgcgatacctacgaatggctctgcgccctgggcctgcccatgcagcagaagccctttgccatcggcgcgcgcatcgagcatctgcagcgcgatatcgaccgggcgcagtacggcccctcagcggggcatccggcgcttcctcccgcggaatacaagctgaacgcgcccacgccggacggacgcggggtatacaccttctgcatgtgtcccggcgggcaggtcatcaacgcctccagcgagcccggcggcgtaaacgtcaacggcatgagccggcacgcgcgcgacgggcgcaacgccaacgcggccgtgctggtaggggttcggccggaggatttcggcggcgaccatcccctggcgggcatgtacttgcagcggcgcatcgagcaggcggccttccgctgcgcgggcggagggtttcgcgcgccctgccagcgcgtgggcgattttctctccggccgggccagcgtcacgcttggcggcgtggagcccacctatctgcccggcgtaacgccgggggacctgcgcgcctttctgccggactttatcaccgataacctgcgcctggccctgcccagactggggcagcggcttaaggggttcgaccatcccgacgccctgctcaccggaccggagacccgctcgtcggcaccggtgcgcattctgcgtgatccgcggcggcaaagcgctatcgccggtctgtatcccttgggcgagggtgcgggttacgcaggcggcatcgtctccgccgcggtagacgggctctgtgcgggaatggatatcgactaaaccaacgaacggaggtacagccatgaataccaaacgtcttgtgaccgttgccgtcctgattgctctctatacggtgctcagcctgttttccgctaacctggggctcatcaagctcacctttgaatccttccccgtgctggtggccagcctgatgtttggctgggtggacggcctgctggtgggtgcggtgggcggcctgctgaaccagatgctcacctacgggtttaccgtcaccacgctgatgtggattctgcccaacgccgtgcgcggcctgctggtgggcctctacgccaaaaagcatggccttgacctgaccatgaagcagaccgcgggcatcgtgctggccaccagcctgctggtgacggcgctcaacaccgtggccctgtacatcgacagccagatcttccactaccccatcagcctgacggtgggggcgattgcgctgcgcttcctctcctcggtggtgatggcggccgtctatacgctggttacgccccgcacggtggcgcttttgcaccgtgccaacgcatctccccgcaacaaccatgaatgagaggcacagcggcatgattcgtggcgttttatttgacatggacggcgtattgctggatacggagcggctgggcagccggctgtttgagcaggcatgcgcccggcgcggatacgccgtgcccgaaaaactgtatctcagtctgcttggctgcacggcgcaggcggggttcgatgttctgcacgaagcctttggaccggatttcccctgccaggccgtgatggacgaggtgcatcaggggattttccacacggcggtcaccaccggcctgcccaccaaaaagggacttgcggaatgcctgacggggcttcgggcgcgttccctgcgcctggctctggccaccagcaccgaccgcgccatcgtcgagcgctatgtccaggcgacgcccgccatgcagaacgccttcgacgtgatgatctgcggtccggagggcggccgcagcaagcctgcaccggacatctacctggaggccgcgcgccggctggggctggagcccggcgaatgcctgggcgtggaggacagccgcaacggcctgcgcagcctgacggccgcgggctgtgtcagcgtgatgattcccgacctgctcccctatgacgacagcctggcaccctatgtgaagcaccggctttcggatctggggcagctgtgcacgctggcggaccggctcaatctggaggcacgggcgcggtcatgaccggtcttgggggctgtggcgtcccctgcgcttttgaaaaagccggatcacaagccccgcgcccagcgcaagcagtgccgctcccaatgcgatcaacggccagctttgggtcgagattccggcccacaccatcagtccggtcacacctgcaaacaaaaccagcaggatgcccgccaacgcaagccgggcgtataacggcttccgccgtgcatggacggattccatggagccttcaaatatcagttccagcgccagttcgatcaaatcatccagcatgtgcccattcccccccctgattttccgggcggccctgattcccgcagacgcggggcgggccgcccgctttgtctttctgtacgcattataccatggggtaaaacgcttttcaatgcacccgcgcgcccggcgttgcaaagtgtggtaaaaacatgtataatgaaaaatggtcctttgcatcatgcctgccttttggcaaagcgaggtgattggcggccttgggccgaacctatgagcagcaaggataaaatgcttatcacaggcggtcatcccctgatgggtgagatcaccgtcagcggcggcaagaacacggctgtggcggtcatccccgccgtgctcctgtgcgacgagccctgtacgattgaaaacctgccggatatcgacgacgtgcacgccctgatcgagattttgcagcggttaggggcggaaacggagtatgtcccgggcaaatacctcaccgtggatccccgcggcgcgaccggctgccgggtgcccttttccctgaccaagcgccttcgcgccagctactacctgctgggcgcgctgctggggcgcggcggccgggccgaggtggcctatcccggcggatgcgatatcggcagccggcccattgaccagcatttgaagggctttgcggctctgggggcggagatcgaggaccggggcggcatggtgtatgccaacgcggagcatctgctgggcggcgacgtgttcttcgacatggtcaccgtgggcggcaccatcaatgtgatgctggccgccgcgcgcgccgagggcaccactgtcatctacaacgcggccaaggaaccccacatcgtggacctggccaacttcctcaacagcatgggcgcgcgcgtcaagggcgcgggcacggatgtgatccgcatccgtggcatgcagcacctgcaccactgcacctataccgtcattcccgatcagatcgaaaccggcacgctgatgattgccgctgccgcgacccgtggggatgtgaccatccacggctgtattcccacgcacatggaggcgctcaccgccaagctgcttgagatgggcgtgcgcgtcaccgaaaacgacgactccatccgtgtccgtccgcagggcgaacagcgggcggtaaatgtcaaaacccaggtttatcccggctttcccaccgatctgcagcagcccatgacggcgcttctgtgcatggcgcacggcacctccaccgtatgcgaaaccatcttcgagcagcgcttcaagcacttggacgagctaaggcgcatgggcgcgcatatcaagctggtggaccgcaccgtgctcattgagggcgtgcgcgagctctacggtgcgccggtgaccgtcaccgacctgcgggcgggcgcggcgctggtggtggcgggcctgatggccaagggcgtgacggagatttacgaaacgtcctacatcgaccgcggctatgagcgcatcgaagaaaagctgcgcgcgctgggtgcggagatccgccgcgaaaagatctgacgttcccgcgccgatgggaggtggtgttttctgtacgacctcaatccctttgagctgctgggcctcaggcccggagccgacgcgcaggaggtgcgcgccgcatatcgccggctggtcaagacatgccaccccgaccagttccaggacccccagcgccagaaggccgcgcaggaacagctgcttcagctcaatctggcctatgaggcggccctgaagctggcgtcgcagcaccgcgtgggcttcaacctgatttcccaggaggaggccaagcactttgcccagcgcctgatcgatcagggcaatctggaaagcgcgcttcggcagctggcccgcgccgatggcaaggacgcggactggtactttttgcagggcaaaatcctgatgggactgcggcagtatgacaccgcccatcagagctttcgggaggccgtccggcgtgatcccgacaatcacaaataccgcgagggcgcgctggacgcggcgctcgccatgaagaaaaaccgtcccctatcacagaagctccgggatgtgctgggacgcagatagcgcgcggaatcatgcgcagggcaggctggcaaaaaggcctgccgtgtttttttatgcctccgcacggctccgccatccttcgcgctgtgtttcgacatatccgccaccctgtgtgcactatactagttgcatgccagacaaagggaggcgcggcctgtggtgcacgcggaggcttattttttgtggaatgcggccatgtgtctgtgcgcgctgccgctgggcggcaggctggcgggcctgcccgcgccgggcaggggcgcgctggcggcctccgccgggctgggcggggcgctggcgctgtgcgccctggtgctgccgcccctgcaaatcctggcgctgggcggcctgccctgtgcggtggcgctgtgctttcgcacgcacgggctgggtccctgcctgcgcggctgtgtatccacgctgggcgcgtcgctgatgctgggcggcggagcgcaggcgctcatttcccgtggcgtgcccgtgccgctcgcgctgatggccggcgcaggcgtggcgctgctggtctacctgctggccacccttctgcccaatgccctgtgcgatgtgcggcaggtggagctcagggtggacggaaacgccgtgattcttcccgccatgctggacagcggcaaccttctgcgcgatcccttgacggggcttcccgtgctggtggtgccgcgcaaggcggcaaggctgctcttccccggcgtatacgatctgggcgacctcgcctccctgccgctgggcttccggctgctcaacgtgcgcacggcggcaggctcggccctgctgcccctgttccggcccgacgagtgccgcctgtacctcaacggacatccctcggaggcgcgcctgctggtagcggtggccggcccggaatacggaggcgcgcaggccctggtgcccatggccgccctttcggcgtccttttcctgacgatctgcggcccgcgcatgcggggtgaggaggcacacggtatgaatcagtcacccgaaaagctccacttggcatttcagcggcttctgatgcggctttttccgcaggagctgttctacatcggcggccccgatcccctgccgccgcccctcacgcccgaagaggaacgcgcgttggccctgcgcctgaaggagcatgacgaggccgcccggcgcacgctcatcgagcacaacctgcggctggtggtattcatcgcccgccggtttgagaacaccggcatcccgctggaggatctcatctccatcggcaccattgggctcatcaaggccgtaggcacctttgacgcggaaaaaaagatcaagatggccacctatgccagccggtgcatcgaaaacgaaattctgatgtttctgcgcaagacctccaagcttcgtctggaggtcagcctggacgaacctctcaaaaccgactgggacggcaacgagctgctgctcagcgacgtgctggggacccggccggatacggtgtcgatcaacctggatcaggagatcgagcgcgagatcctgcgcgacgcgctggagcacctgggggcgcgggaaaagcgcatcatcatgctgcgctttggcctgggcggccagcgcgaacgcacccagaaggaggtggccgatctgctgggcatttcccagagctacatctcccggctggaaaagcgcattctaaaccggctgcataccgagctcaagcgcatcggatgagggccgggccgtgcacaaaagtccaaaatgtggtatactaagcctgccggtcaaccggccaaatcaccagcttaggagcgcgccatgagcaaacgcatcgtactgacggggggcggcaccgccgggcacgtgaccccgcatctgagcctgattccgcatctgcgcgaggcgggctacgaaatccactatatcggcacggagaacggcatcgagcgccagatgatggccaggttccccgacatcacctatcacgccgtcaaaagcggcaagcttcgccgctacttcagcgtgcagaacttcaccgaccccttccgggtgatctggggcgcgtttcagagcatcgcgctcatgcgccgcctgaagcctgatgtgtgcttctccaagggcggctttgtgagcgtgccggtggtgtttggtgcgtggctgtgccgcgtgcccgccgtatgccatgaaagcgatctcactcccggcctggcgaatcgcatctgcgcgcgatttgccaccaaggtggcggcgaccttccccgaatgtgcccgcgcgctgggtaaaaaaggcgtactgacgggcaccccgctccggccggagctgttccgcggcagccgcgcggcggggctggcgctggccgggttcgacgggcagaagcccgtgctgctcatgacgggcggcagcctgggcgcacagagcgtcaaccgctgcctgcgcgaagccctgcccgagctgctcacccgctttgacgtacttcacctgtgcggcaagggcaacctggacgaaagcctcatgggaatgaaaggctactgccagaaggagtttctttccgatgagatgcccgacgcgctggccgtggccgacgtggttttgagccgtgcgggcagcaacaccctcagcgagctgctggccctgcacaagcccatgctgctggtaccctatccgctgggagcaagccggggcgaccagatcgaaaacgccaaaagctatgcccggcaggggctggcgcgggtgttgatgcaggaggacatgaccgcccgcacgctgacggacgcgctgttcaagcttctggacgagcgcgcggaactgcttgcggcgctggaagcatacccggtcaaggacggcacgcaggccgtgcttgcgctgattgaggatgcgcggaaaacgcattcaagaagccattaatgccattgcagaggaagaaagaaatgcaaaagcaacatttggcaggaatatttctttttctgattctaattctcttttccgcagcggcaacagctgatgaaacgcttttcttttgtgtaacgtcagaaacatcagatagggtccatttgcgctccggcccttcatccgagactgaatccttgggattgtactttgtaggtaccccagtaatactgtatccacaaacgaataaagagtggttgcaggtaagcattggcgcagaaactgggtacatgtattgcgataatctcactcctgtaaaaaacgcatatgacatgcccgttcaatggaaacaagcttctgtgcaaccttccaaattggatggatggatcaatttgcgcgcttatccttccaaggaagcacctgttctggaaaagaaacaaaaagacgaatcgctgcttgttttaggggaaaccaaaagccactggtgctatgtgcgcgatggggacgtctatggttatatcatgtcatcctatctagacataggtgatactccactgaatagcagaatatattgttccaatatacaccagccggtcaacttctgcggagactggctttttgcgagtggggtaggcgcctggtcaacgcaaatacatgtgtttcctgatggaagctttctaggatattatcatgattgggatgcttcgtgggaaggtgacgattccggcttgcttagcgcgctatatgaaagcctttttagtggacgtttctccgttgcacaaaaagtttcggattgggaatatcaagtaaaagtcgaatatattcaggatctcagctgcatggaaatgtatagatttggcgatgagatgcacatccctgtaactccatatggggtaacacaaaatgcgcatgtatccatttaccttcctggggctcctgaggagctccttccaaaaagttattgtgagcagatagaaaactatcttgccactataaatgaacaaatgggcttatattgctttgaacatgatgccgcatggatataattccctatctctaaaaaaggaggtgcctctttatggagacacctccttatcatgtttctgcctgctgttgccttgcagacaatgggcactcagcccttgacggcaccggccatcacgccgctgacaatgtacttctggcaggtgaggtagaagatgatgatgggcagaatgctgatcataatcagcgccatcaccgcacccaggtccacatggccgtagctgccctgcagatactggatgtggatggggatggtcttgtacttggtgcggtccagcaccaggtagggcaggaggtagtcgttccacacccacatgatctccagcacgcccacggaaatgaagatgggcttgagcatggggaacaccaccgagaagaacgtgcgcagaggtccgcagccgtcgatggcggcggcctcttcgatggccagcggcatgcccttgacaaagcctgtgaacatgaataccgccagtcccgcgccaaatcccagatagatcaccgggatggtccagggggtatccaggtccagcacgttggccgtcttggccagcgtgaacatgaccatctgaaagggcacgatcatggagaacacgcacaggtagtacaccacgcgggagaacacgtcatccacacgggaaatataccacgcggccatcgacgtgcagatcagaatcagcgcggccgacagaatggtgatgacaaagctgtaggcgacggagttaatgaagggatattcgcctacggtcatgccgttctggtagttggcccagcctacgaagctctccgcgttgggcagggcgaaggtgctggtgttgatggaggcgttgctcttgaaggagttgaagagcaccaccacaatgggcatcatgtacgcgatgctgataagcacaaacagcacggtcaggatgtttttgccgatgcgttcacgccgcattactgctgcacctccctgctatgggtggcgcgcagctggatgagcgcgatggccgccaccaggatgaagaacagcacggccttggcctggcccatgccgcgggagttggagttgaggtagaaggtattgtagatgttgagcgccagcatctcggtggagcggataatggtgccgtccggctggaaggtgaagggctggccgccggtaagcaccaggttctggtcaaaaagcttgaacccgttggtcagtgtgaggaacgtgcagatggtgatggaaggcatcaccgtgggaatggtgatgttccacaggatatgccatccattggccccgtcgatcttggccgcctcaatcatgtcgtcggacacggattgcaggccggcgatgtagataatcatcatgtagccgatctgctgccagcacagcatgatgatcaggccccagtagccgtaggtggcattgaggacgatggaggtgttgtaccgggacagaaagccgtcgaagatcatcgaccagatatagcccagcacgatgccgccgatcaggttgggcaggaaaaacacgccacgaaacaggttggagccgcggatgccgcgcgtgagggcataggccacggcaaaggccagaatgttgatgatgatcagcgacgtgaccgccaccagcgccgtatagccgaaggcatgcatgaagctggcatccttcaaggcgcgcgcataattgtccaggcccacccacttggcgttgctggtggtggtgaacttgcagaaagacagatagattccgtgaatgaatggatacagaaagccgatgcagaatgccacgaacgtgggcagaaggaagatggcgaagcaccgctgaatcggacggcggatgagccgcgagttcaccgccgcgttgcttcgttgctttttttgtttcatagccgctcctccgctggtgaaatgaaaccggggaagcggggctcatcccgctcccccggagctggcagcggcgctgccggagatcaggttgggattactggttggcgtactgggtagcccagccctgcacgaacgcggtaaccacgtcgtcccaggagccgccggcggaatactgggtcatggcagccacgaccgccgcacgccaggtgtccacgttgggggtgtagttgaacgcccagctcaccacgtacttgccctcggcaatgtatctgttggcgtcgttgaagaacacgttgtcggaagccttggcggccttgaaggggatggggccgaactgctccgccatcatggtggtgccctcgtcggaggtcacaacccagtacaggaagtccagggtggccttctgatcggcctcggaagcctggctgttgacggcccagcagttttcggtgccgcaggccagaccggcgtcttcctcgccctcaacgccgatgtagatcgggatcatgaccagatcggcggggtccatgccgaacttttcacccgtcaggttggcatattcccaggtgccgttctggtagaacaccgccttgccctcgccgaactcggccagcgcctgatcgcccgtggcggaagccagctggctgggatcggtagcgctgttgttgatgtagaggtcccagatctgcttgaagttatccaggtaggtgcccttgatggtggcgggctgagaggtgatgccgtcatcgcggaactcgtagtacaggggcatgttggccaggtggccggagaagcgccagctggaggagccgtccatgccggaggaggtgaaagcgtcaaagcccagctcggcagcgcgggcgtggatgtcctccgccacggccttgagggtctcaaagttggtgatatcctccacggtgtagccggccttttccagcagggccttgttggtgatgatgccgaaggcctcatagcagtagcccacggccagcgcatcgccgttctcaccgtagaggttgaactcatcggtgctcagctctttgtagaagtcggtgtcctgcaggggcaggaggtaatcggcccaggtatccaggccggcctgggtgccgcactggaacagcgtgggggcggcgtcgcccttgtccatctcagcggtcagggtttcggaataggtgccggaggcggcggtgaccacggtgacgggcacaccggtctgctcggtgtaggtcttggccagcgcctgccaggcctcatcggcctcgggcttgaagttgaggtagtagaccttgccggtcgcttcggcggaagccgcgcccgcaaccagggtcaggcacagcgcaagcgccagaaccagagccaacagtttcttcatgaatggaacaccccttttcaatctatatgcggcacaggccgcttttgaacccatgtgcgagcaaaaatcgcgcaatcgtttgcgcgtattttcaatctcgtactttagccatatcataccattcattgtggatgttgtcaagtgcttcatgttttttttgtgaaaatcgtacgacgccccatcccggcctgtatgtttttgatgagaacggcgcatgctgatggacgaggaccgcagcggccgctgtgcgcgtccgcgcgaattccggcgtgaaaacaaacaaggagtgagggctttatgaaaaaactgctcgccgtattgtccatcgccctgctggtggtaggggccgttaccattttcagcatggcggaggatacggccgcacccgggccgtccgcgccaaccgcgccggcgcaaaccgcctctccctccgccgtggggagcggagcggtctattacctgaattttaagcccgaacagtcccagcaatggcaggcgctggccaagacctacaccgagcagaccggtgtgcccgtcaccgtggtcaccgccgcctccggcacctatgagaacaccctccgttccgagctggaaaaggcggacgcgcccacgctgtttcaggtcaacggtccggtgggcctgaaaacctggcgggactactgtctggacctgcgtgacaccgctctctaccgcaacctcaaaagcgacgacttcgccctcatcgaggacgggcaggtactgggtgtggcgtacgtgatcgagacctatggcctcatctacaaccgaaccctcctggacaagtatatggcgatggacggcgcggtggttcagtccgcagaccagatcaacaattttgagaccctcaaggccgtagccgaggatatccaggcccgccgagaagaactgggcgtgctgggagcctttacgtccgccggcatggatgccagctccgactggcggttcaaaacacacctggccaacctgcccgtatactatgagtataaggcggacggtattacctccaccgaggccatcaagggcacctatctggaaaactacaaaaaaatctgggatctctatctcaacaacgccacctgcgagcctgccgtcatcggagccaaaacgggggaggatgcggcgagcgagttcgctctgggagaagccgtgttctatcaaaacggcacctgggcctatgccgactgcatcgccgagggcctgaccgacgatgatcttggcatgctgcccatctacatcggtgtggacggggaagaaatgcagggtctgtgcacggggtcggagaacttctggtgcatcaacaagaatgcaaagcccgaaaacattgaagccaccaaggcttttgtggaatgggtcatcaccagcgatgaggggcgcgacgccctggccaaccagatgggctttgtaacccccttttccacctttgacgccggctataccgcgcacaacgcgctgctggacgccgccagcgaggacctggctgtgggtcatacgcccgtgagctggaccttcccaaccatgccgtcggaggcctggaaaaacggcgtgggcgcggcgctgctggagtacgcgcaggggacgaaggaatggtccgcggtggaaaccgcgtttgtggacggctgggccggcgagtacgcggcggcccagaaataaaggcgcctttcacgacgccattcacatacgggagggaatttgccgatggagagggatcttgcaaggtactggccggtatttctgctgccgacggcggccgcctttgccatcggttttctgattcccttcgccatggggctgtacctttcgttctgtgatttcaccaccctgtccaacgctacgtttgtaggctttggcaactatgtgcgcgcctttgaggattcggggggctttacgcacgcgctgtggtacacggcgctgtttgccgggctgtccacggttgtgatcaacctgttcggactgacggtggcgctgcttctggtgcgcggctttcgcggcacgaacctgttccgcacggtttttttcatgcccaacctgatcggcggcatcgtgctgggatggctgtggcaggtcattctcaactacggcgtgctcgcacgctacggcgttacgctggtcaccagcgaatggtacgggttctggggcctgatggtggtgatgctctggcagcaggccggctacatgatgatcatctacatttccggccttcagtccattcccggagagctgagcgaggccgccgccattgacggcgcttccgcctggcagacgcttcgctacgtcaaattgcccatgctgatgccctccctcaccatctgcacgtttctgacactgaccaacggcttcaagctcttcgaccagaacctcgcgctcacgggcggcatgccctccaaccgttcgcagcttctggcgctgaacatctacgacaccttctacggccgtgccggctgggagggcgcgggacaggccaaggcggtggtgttctgcctgatcgtggtgacgatcgcgcttctccagctccggctgacccgcacgagggaggtgcagcaatagcatggcggcaacacaaaaacggcggcgtgccgccgacgcagccctcaccgccgttttttcgctcatctctctggcctatgtgttcccgctggtcatggtgttcctcaacagcttcaaacgcaaggcctatatcagccgcgcgccctttgctctgcccaccggaaacatgtttgtccggctggacaactaccgaaacggcatccgcctgacggacttctgggcctccatgctgtggagctttgtcattacggtcctgtccgtggcgctgattctgctgtgcacctccatgtgcgcctggtacatcagccgcgtccgaaaccggatcacccacggcgtctatctgctgtgcatcttcagcatggtggtgccctttcagatggtgatgttcaccctctccaaggtggccaacgtcctgggcctcaataccccctggaccatcccggtcatctatctgggctttggcgcggggctggcagtattcctgtttaccggctacatgaaggcctgccccatcgccattgaggagagcgccaccatcgacggctgctcgccccttcgtacctttttcagcatcgtgctgcccattctgcagccctcgctcatctccaccggcattctgcaggccatgtggatctggaacgattacctgctgccctacctggttctggatctcaagcgcttcaagaccattcccatcgccgtgcaatatctccggggcggctacggcagtgtggatatgggcgcgatgatgggcatgctggtacttgccatcgccccgattcttgtgctgtacttcctgtgccagaaatatatcgtcagcggcgtgatggcgggcgccgtcaagggctgagcttacaccagccccatcgccatttccaccagcagggccaccaccacgagcgcggagaggataaatccgtgcagcatggggcgaaggcccgctttttgcatttcacggaaatcggtgttcaggccgatcgcggccagcgcggccaccatgaggaacttgctcagatccttgaggaaggcggaagccgcggcgggaatcagccccacgctgttgaaaagcgccaggcccaggaaacccaggataaaccacgggaagagcgtgagcacgttgacccgctccccctccacagccacgttcatgcggcacttttcgcgcacgttgatgacggagaagatcaataccgtaggaatgatggacagcgtgcgcgtgagcttgaccatggtggcaaaatcgcccgccgcctcgctgaaggcatagcccgcggccaccacgctggaggtatcgttgaccgccgtgcccgcccacaggccataggccatatcgctcatgcccagccagtgccccaggaagggaaacatcagaatcatgaccatgtcaaacaggaaggtggcggacatggcgtaggcgatatcgcggtcctgcgcgtcgatcacgggcgcgatggccgcaatggccgatccgccgcaaatgcctgtgcccgcagagatcaggttgctcagcttccagttgagccccaggctgcgccccaccaggtagccgccgccaaaacaggtgagcagcgtaaagcacatcaccatcagcgacagcctgcccacggtgaggatatccctcatgctcagcgatgcgcccagcaaaatgatcgccagcttgagcacccgcttggaggtgaacttgagtcccccggccaccagcgcagacggcttgcgcagcgcgttgattcccatgccgatgaacagcgcaatgaccgaggcgccaatgaggtgaatgggcaaaagcccctccagaaaccgcgccgcagccgccaccgccaccgcgatcagaaggcccggcaccacgcttgcgtactttttcatcctttgcatatccaaatccctccgtttctttgccggaccattgtacccgcaaagcatcataaagtaaaatatcgtttttgaataaacgataaatttatgttatgatgtcgagggagggagccaccatgctggatgccaagattcaaacctttctggaggtggcggcgcagggcagctatacgcgtgccgcagagcgccttcacctgacgcagcctgccgtaacgcagcagatccaccggctggaggaacactacggtcaccgcctggtggatacctgcggccgtgtggtgcggctgaccgaagccggcatgcttctggagcaacatgcccgcatgcagcttgccaacgagcgccgcttcatggagcgcatggcggcagaggaaccgccgctgagtctgggcgcgacgctatccattgcagactattatctgcccgggccgctggcccgcgcgctggcgggcggccttgccccgcgcgtaaccgtaggcaatacgcaggttcttaccgggcgcatgctggctggcgaactggactgcgcgctggtggagggcctgtttgaccgcgccctgtttgaggcgcatgtgtggcgtgccgcgcgatttgtggcagcagcgcgcgcagatcatccgctggcgggaaaaccctgcacgataagcagcctgtgcgccttcccgcttttggtgcgcgagcggggggccggcacgcgggcggtgctggagagcgcgctgttctcgcgggggatggacctgtccgcctttgcgcgcacgctggagctgggcagtttcggactgatcaaggcagcgctggccgccaccgacgccgtcaccttcctctatcaggatgtgctgaccggcgagggcggccttacggcgctggacgtaaccgactttgccctggaacgcccgctgtactttcttacgccgcggggcggaagcgaacgcgagcggtgccttgcgctgcttcacgccctgagcgctccggcctaggccccgaaacgcaaaacggcctcccggcttccttgcggaagcgggcggccagcaggcccttgcggatttgcccggccgggaaatcctgttgccaggctatccgtgttaaaaggcgccttccgtctgccatagataccagtccgtgccgtcggttaccgcatacaccgtgccgtcgccggagaaaaacgtgggcagatcgcggcttttcagctgattgatcgattttccatccaaatccttctggcgattggtggcaacggcggcttcgggagccacggcatccagaaatgccggcaccgtaggggtgatggcatggtggggcagcttgatcaaatcggccttgagctcctgggccggcagattttccagaaagtaatgctgcacctggccgataatatcggagcagagcaaaatcgagctttcgccgtaggtaaccttcagcattaacgcacgggcgttggtattggtgaattccgtgcattgatgcacctggatggtggcgcctccaagcgacagcgtgtcgccctccagaatgcgctctaccggcacatttgctttttgggccgcctttacggtacgttcgcccagctcggaattgcgtatggcccagtcattgtaggaatgcaggtaggcatccgccgtaaagccgtttaacagcagctggtacagaccgtcgatatggtcgtcgtgataatgggtattaagaaagtatttcatgtggcgcaggccgcgctcatcaagggcctgctgcagatcttcgcggaaaggattggggccgccgtccaccatcatgctttcgccctcgcaggtcagcagcatggcgtctccctcgttcacatcaaaaatcgtccattgcagggtgtgctccatatcccagtcctccgggggctgctgggataaaaacacctgcgcacaggccatgtgcggcagacatatggcgaaagccgcaagcacgcacagaacccatcgtttcaccagagaatgtaaaggcatcctttgttcctccatcattgctttcatcatcatgcggccaagcggacgggtatccggggcgcagaaggggcgtcctcttctccgcccgcttcctaggcgttctccggtcgccgcctccgtcccttgcgctgcaaggcgccggaccatcgccattccaatacagccctccgggaaaacgtccggagggccgtaagccgagcatgcgcgccggcctggaaagggccttacttgaggtactcaaggagcagcgcgcgggcggcctccacatcgcgcaggtcgatcacctcacaggcgctgtgcacatagcggcagggaatgctcaccgtgcccgcgatcacgccgccgcgggaaagctgaatggcgctggcatccgtgccgccgaagggcagcacctcgcgctgggttttgacgcccgcgcgctcgcccgccgccagcaggtcacgcaccagatcggggttggagatgctgccgcggtccatgatcttgaccgccgcgccctcgcccagcttcacagcgggcagcttggtttccggcgtatcgccattggccgtcacgtccagcgcgatgccgatgtccggctccacgctgtaggcggcggtcttggctccgcggcagccgacctcctcctgtgtggagaacacggcgatcacggtgttgcgggtctggggcagggcctgcatcacgctcaccagcagggcgcaagcgatgcggtcgtccatggcgggcgcggccacgcgatgctcacccaggcggaagcagtcgttggcgtacacagccacgtcgcccaggctgaccatggagagggcctcggtttcatccgccgccccgatgtcgatgaacatgtgcttcatggcgggggtctcaccctcgcgcacgggctcctgcacgatcacgccctgcacgccgttttggaagctgacgtgacgggtacggctcacggccagccccacgccgcccacaggcatcacccgcaggaagccctccttttccacggccaccacaataaagccgatatgatccatatgcgccgacagcatgatgcgcttgccgtccgggtccgtgccgcgcttttcgcaaatgagattgcccagtgcatcgcggcggatggaatcgacatggtccttcacaagcgcctccacggcgtcggccacgccggcctcgcgcccggtcgcgccgtacagattcaccagctgcctgatgagttcaaacatcgaaaatgcacctctccttttatttctccaaaaatgccttggccaggcggtactgcgcctcgatatccgacgcggcgcatacggtagacgggctgtggatgtagcggcagggtacgctgagcacgcaggtgcggacacccgcgccggtgcgctgcatggttccgccctcgttgccgccgctgacgctcatcttgacctgatggggaatgccttccttctgcgccagggcgagcatgtccctgaacagttcaggattggcaattgacgcgttatccatgaagctgaccgtcgtgccctgacccacgcggcacacgtgatgcacggcgggcgtatcgcccatgtcgttggcggtggtcccctccagcgccagcccgatatccggcatcaggcggaaggccgcgcccgccgcgccgcggcagccgacctcctcctggcaggtgaacacaaaatccacatcgccatgcgcatcgcaggtgagcaggcgaagcatgttgtagcagccgatgcggtcgtccagagcgcgcgccagaatccgcccctcgccgaaaggcgtgaaagcggtgtcgaaggtgatgggcgtacctgccggggccttctccagcgcctcgtccttatccttggcgccgatgtccacgtagagctggtcgatgggcagcacgcgcttgcggtcctcggcggtctgctgatggatggccatggcgccgatgacgccgctgagcggctcctgagcaggcttgccgtccctggtgggcacggcgtagcccaccttgacccgcttggacaccagcacccgcgggtcgatgccgccgatgggccgcacatg

SEQ ID NO: 3887 - DNA, 9981 bp, Unknown
  16S sequences of unknown bacteria
gatacagtcggtgatgcgccagactgagcttgtccatcgtctccagatcgatgttgagcagcgatgccatctgatcgatgaaggcgcctgttcccccggcacaggtggagttcatgcgctgctccaccgctccctgaaagaacaagatcttggcgtcttcgccgcccagctcgatcgcggcgtccacttccggataatgcttgcgcacggcctgcgcgctggcgaacacttcctgcacgaacggcaggtctccttcctggctcatgcccagcgcggcactgccgctcagtgcgaagtaaaacggctcatcgcccagcatttccttcagctcttcgatcttcttgagcgccatctcgcggatctgcgccatgtggcgctcatagctcttatataatatcgtgccgttgtcatccatcacaacagccttgatcgtcgtgcttccaatgtcaaatccgatacggtacgtcattccatcaccccgtcattcatctctatcctttttcacctatatagtccttcagcccgttcatcagcaggccgaggctgtagccgcagaattcctgcgcgctcatcacgcatcccttgcgcagccattccttgcacagatacatgaaggcattggcgtaatacagcgacagctcctcgctgtcatacgccccctcccatctgccctcctgatccaggatggcgcggatgcccctgcccgcatgggtcaggaacatggtatcaaaatcgttttgtccctgcacttgaaatgccttgcggaaaaaccccgcatgatcatagatctctatgcagagcgaacggatatagctttccatctctcctgcagcgatcagcgcctggcgcttctcacacagcatcatgccgcagacatagtccagcgcagcgtacttgtcttcaaaatgattgtagaatgtggcacggatcacgcccgtgcggtcacagatctgtttgatcgttatcttctcgaagggcttttcctgcatgagcacgaccaggctctctgccagaaaatccttcatcctcgccttgcgttgttccataccatccactccctgtcgtctgattgccgctggtcctatgccggcagcagcagaagcagcgtcgtggcataatagaccacggatgtgcccacgatcatgatcttctgataagccgcgcccagatagtagccgatccacagcgccgcgaatatcgcggcaaacgagatcaggaacatcccgctcatcaccggcagcggcgcgatatgcagaaagccgagcgctgcgccgaggatcagcgtatccaggccggtctccgctgccaggcaaaggctcttgcggtaacagaagcccagatcgagatgctccacatatttcctgccatggatggtcttgaccagcagaaaggtcgccagccccaccaggaagcacgccggaaggatccggccgtcctccgggttcagcgccgcgcgcagcagcccgctcacggccatgcccgccgccagcatcagcgtgttcacggcggcgaagatcatcgcatggcagccgcccttggcaaagcgcatttcccgcatgttggatccgcgttccatcatcgcgacgaaactgtctgtgcaagtggcgctcagcagcagcaccgtcagtactgaatgcatgttctttcctccccgattttcatgcagccgagatcgactgcagtgatctgaacaattataacagagtcaaaataaactttcatctatacatttcattttgtgtgtataaatttcaggaaagctcaaacattcccgtatatagctggtaatatgtgcctttgcgcgcgatcagctcatcatgagagccccgctcgatgatccggccatgatcgagcaccatgatcgcatcggcattgcgcacggtggacagacgatgcgcgatgacgaagacggtccgcccctccatcagggaatccatgcccttttcgatgagccgctcggtgcgggtatcgatcgaactggtcgcctcatcgaggatgagcaccggaggatcggcgatcgcggcgcgcgcgatggccagcagctggcgctgtccctgcgaaagcgaagcgccgtccccgctcagccgggtgtcatagccattaggcagacggcggatgaacgaatccgcattggccagacaggccgcctgcacgacttcctccatcgacgcatccagcttgccatagcggatgttgtccgcgatcgtcccggtgaacagatgtgtatcctgcagcacgatggacagcgaacggcgcaggtccgccttgcggatcaggcgcacatcgatgccgtcataagtgatgctgccttgatcgacatcatagaaccggttgatcagattggtgatcgtcgtcttgcccgcgccggtcgcgcccacgaaggcgatcttctgtcccggcttcgcatacagcgagatatcgtgcaggatggggcggccgctgtcatagccgaagcgcacatggtcaaagcgcacatcgccgcgcagctccaccagctccacgcttccatcagcgcgaggatgccgccatgcccacatcccgctgttctgcacacattcatacaaggagccatcgctgcggcgcgccacgctggtcagcgtgaccctgccttcgtctcgttccggctcctgctccatcagctcgaagatgcgctctgcgccgctcatggccgtcaggatcaggttggactggctcgtgaactgattgatcggcatcgcggtctgccggacgaagaccagatagctggccagcgagcccacgtcggtccagccgttgatggccatgatgccgccgacgatggccacgatcgcataattgacataagagaggctgaccaccatcggcaccatcgtgccggcataagccagcgcgctggtcgccgcctgctgcagctcgccgttgcgcgcgcggaactctgccatgttcgcctgctcatggttgaacaccttgacgaccttctgcccctggatcatctcctcgacaaagccgttgagccggcccaggcagcgctgctgctgcccgaagtaatggcggctgcgctgcccgctgaagcggatatacgcaaacatgaggatatagcagagcagcacgatcagcgacagctgccagttgaggatgaagatcagcgtcagcgtgcccacgatctgaatgaagctctgcaccatcatcgcaaagctgttattgagggcgtccgagatcgtatccacatcgttggtgaaacgactcatcgtatcaccgttgggattggtgtcaaagtaacgcagcgggagcgattgcatacggtggaacagatcctcgcggatctcacagacgatcttctgcgcgaccaccaccatgatctgcgtgtagccataggccgaaagcacaccggcgccgtagatgcaggcagtgagcgccaccgcgtggatcagcccgttcacatcgcgggggatgatgtagtcattgacgatcggtttgagcatgtatgtgcccagcaggttggccagcgcgctcagcgagacgagcacggccacggccagcagcaagaaacggtgattgcccatgtaatgcagcagcgtgcgcagcgtcttccagaaattctccgggcgctttccgatcggcttagccattttcgctcacccccttctgctgcgacgcatacagctcctgatagaccgggctgctggccagcagctcgctgtgcgtgccgcatgccgtgatgcgtccctcatccaggatgatgatctgatccgcgtgcatgatcgaagtgacccgctgtgcgataatcagcttcgtcgtgtccttcagcgccgccagcccctcgcggatgcgggcatccgtcgccgtatcgaccgcgctggtggaatcatcgaagatcaggatgcggggatgcttcaacaaggcccgcgcgatgcacagccgctgcttctgcccgccggagacattgacgcctccctcttccaggtaagtatcatatcccttatccaggccgcggatgaactcatcggcacatgccgtgcgcgccgcccattcgatctccgcatcatccgcatcgggattgccccacttcagattttcccgcaccgttccggaaaagaggacgttcttctgcagcacgatgccgatggcatcgcgcagatgagccagcggatacgcacgcacatcatgaccgcctacgcgcagcgtgccctcgctcacctcatagaggcgggggatgagctggacgagcgtgctcttcgcgctgccggtcccgccgatgatgcccagcgtctctccggccttcacccgcagattgatgtccgtgagcacgttctccttggcctgcgcatggtatttgaagctgacatggtcaaactcgatgtctccctgcgtcaggcgcagcgcaggatcgccgtccgtgatatcggcaggttcctcgagcacctccacgatccgtcccgcactggccagcgaacgcgtcagcagcaaaaagacattggagatcatcatgagcgagttcatgatctgcatgacatagctcaggatgccggtcagctctccgaccttcatggagcccgcgaagatcagctgcccgccaaaccacaggatggcgatgcaggcggcatacatggtcagctgaaaggccggcagattcaatacggcgtaatggaacgtgttcttcgatgtctgcatcagctcatgattgaccgcgtcgaatttctcttcttcatattcgccgcgcacgaaggccttgacggcgcggatggccgtcaggttttcctgcacgatggcattcacccggtcgatcgccttctgcagcagagcatacatcggcgcgatcttgcgcacgatcagaaacaggatgatccccagcagcggcgcgcagacgatgaacacgaatgccagttcgccattgatcatgaacgccatcgcgatgcccagcacgagcatgatcggaccgcgcaccatcggccgcagaccggtgctgacgatgttctgcatgacattgacatcgctcgtcatgcgcgtgatcagcgatgcgttttcgaaatggtcgagattggaaaaggaatatgtctggatcgccgcgaactcccgctcacgcagctcggccgcaaacccattggccgcaatggccgcatagcgcgcatacagcaggccggtgatcagggagagcagcgcacagccgcacatcttcacgccctgcacgaggatgtagttcacatcatgcgcggccacgccgacatcgatcacatcggccatgatcatcgggatgaccatctcaaaggcgctttccacgatgacgaacagcgccgcgagcacgaacgcgccgcggtatggcttcatgcacgaaaagatcttgcgcagatcacgcaccttgctcatccccttttccttcgttcagattgtcataagcgcgaagcagaaaatcataaaactggtcctgctcgctgcggtcaaagccctgcagcatctcctcttccagccgggcacaggtctcttcccactggaccagcgcctcctctcccttctttgtgatgtgcagaaagacgctgcggcggtcatccgtcttgcggctgcattccagaaaaccatcgcgctgcagcttctcgatgatcttcgatgccgtcgccggcgtgatgctgcaatactgcgagacatccttcatccggcaggcgtcatggtcgcgtacatacagcagcaccttcggctgcccgctgctcagcccggccttcgtcatccccggccgcaggcggctgcgtgaagactgatgcaggcggaacatcatcaggttaaacgacttttccattgtaagccctcccaacagttagactcctaacaattcgcaacctaaatttacgcctgtttcccgccaatgtcaagcaaaagaaaagatgccctcaggcatcggcgttttccagctgtcttgccagcgcgcgcaggatcagcgaacccgtgacgccggcagcggcagcgatgaggcagcggatgaagatcagacagaaatcccacagcgccgcaagctgcgcagcggtgccgttggaataataaccgaaagccaggccgcttccgtaaagctgattcaacagatgctcgccaaggccgcctgctaagagcacgagcgccagcgcgatcccgccccaccataagatcttgctccagcagcgcaaggtgtgaatgagcgcatcatcatgacatgcaggtgcgctttgcgcgggacgatcctctgccggcgcgaaggtctcatgcctttccccggcatcgtccaaagccttcagctgcctgctgacctgctcaacggtaatgacaccattgagcagcggggcgcaataggcgttcaggtccatgcccggcgagcggggatgctgcgcaatatatgccctgatccgctcgtcgatcatccgctcctgacgctgagagaggacagcgatgtccacggcggcgcggatctcctcctcgctgaagccatactgacgctgcatggcctccacatactgctctacgcttcgtgccagcggttcatccgcgctgacgacgatcgtgtcattggctgtcttcagcacatcttctgtacgcatatatgctcccttcctccctacatgatcggggagatgatattgaggaacgcccgcaggaatcggcgcggcacgctcacgctgcggcattcctccagcgtgacctgctgcgaacgtgcgaagcattcctccaggtcctttcggatgtcccgcagacaaggcgtctgatacatccacactccacattcataatgcaggtaatacgaacgataatccatgttcacggtccccacgaccgcgctttgttcatcgctgagcatcactttgccatgcacgaagcccggggtgtattcatagatctttaccccgccctcgatcagccgctcataattgctgcgcgtgacctcaaagacgatcttcttgtccgggatatgcggcaccaggatccgcacatccactccgttcttggccgccaggatgagcgccatgcgcgtttcctgatcgatgacgagatagggcgtcgtcgcatagaggaagcgccgcgcgctgttgatgagattgatgtgcgtctgctgtcccacatagtcctcatcggtcgggctgtcacaaaaggggatcacgacgccttccgccggcatcgaatgattcatcgagcaggccatgaaggcgctgggatcgcttttctcctgctcatcaaagttccagaactgcaggaagatggcggtaaaggtcgccaccgcctcgccccggatcatcacggccatatccttccaatggccgaaccgctcatagcggttgatgtattcatccgccagattgacgccgccggtaaaagcgcagagaccgtcgatcaccgcgatcttgcggtggtcccggttgttcatctgcatcgccagatgcggctcgatgggattgaacagcttcgccttgatgccataacgcctcagcgtcttgcagtaatccggaggaagcgtggtgatgcagccggcatcatcatagatgagccgcacatccaccccttcctttaccttatccttgaggatatccagcacgctgttccacatgatgccttctgcgatgatgaagtactctaagaagatgaatttcttcgccttgcgcagctccctgagcagcgcttcaaacttatcttctcccaatgggaaatacgtgatctcacagccggcgtagaccggaaaatacccgctgttccaggcaaagcatgcctgccggaacgcatccggctctgcctcgcgcagatactcgaccatctcctgattctgattcatcaccgtgcgcagctcttgcagcgactgctgatcgcgttcccgcagctccttgggcaccttgcgcccgccgaataagatatagaataatccgcccatgaccggaacggccatgatgagcagcacccagaggatcttgaagctgggattatcttcccggttgatgacatagatgctggccagaaagctcaggatgaccaggatataataaaaccagtaaaactgatagctcagcagcatcgtcaatacggccagcacgatcagctgtgccagcatcatgatgccgacgaagaagatcttgctcttgaaaaaggaaaggatccgcttgacgctcagcggcctttgcttttgttcatgccggcggttcatatcagaggcgttcagcggccttcatgagcagctgcttcaccgtgctgagattgcgttcctccatgacacggtccttgccgttctgcgtgttggaaacgagcagtccgcctttttcatccggcgtgccgcagctgatcatcacgcccttctcaaaataatacatcgaggtctgcagacagcggtctccgttcatgtcgctcatgcgggtcttcatgccgttctttcccgcgttcagcagcgcagcgagccgcttgccatgcatccgatacccgatgcccacggtgtctccggtcccgatgcagttcagctcgatgatgtccggattctttttctgttcctgaaaatacttcatgaggatcgctgccccttcacagcggcggcgattgcggtcagtgaagacaaagccgaccctgcgcttttgatccttgttcagcgactgcatgaattccaccgcggcgatgacggcagccgagttccggttatgattgtgccggttgctcacgcccttgatcagcagcacgatcagcagcagcgtgcagatgaacaccaccaggttgatgaatccctggaccaacggatcctcaaacagcggaaccacgaaggtgatgaacaacaggatcagcacatagaagatcacggccggcacatacgtggcgaccatattgctgttcagcgagcggttcccatcaaggggataatgcttggtcttatgccagaacagacgctccggcgtatcataaggcacgacgacatacagcttggcggtcttctcgaacgcatacatccgatccctggtcagaaacagacggcgtttgtcgatgtccttgcccgcatatccttcttcttcaaatatttcatccagcgcgctgaggaagcgtttcttgtttctccggctgaaccgggacgggcacgtctccagcgcgagttttctgatgtccatgaatatccctcctgttttcgcttatctctgccattatacacgaaagaagaaaaaaaagcgagggagcgctcatcggctgagcatctccctcagtttatcaaagccgccgttacgatagacgcggatatcgcgctccttccggttgatcagacagtccgtcaataagaacacctgcatgccggccgcggaggccgcctccatgtcctcgctcacatcgttgccgaccatcagacagcgctgcggatccagtgacagcctgcggatgagatcccggtaatacgccgggttcggcttgcagtagccggtattctcataggtcgtatacagcgcaaactcctcgggctcaagtccggcccagcggatgcggctctctgtggcaacggccggaaagatcgggttggtcgctaagacgacctgcatgccggctgcctgtgcctcgcgtacgcactgcgccgcagccggcgcatagccgcaaaacgatctggcctgctggaagtccacggcatagaatcgttcgaacagcgccttgtcctggatgatcttatccccgtagatctcatagacacacgcccagaaggcctcctcattggtccggctgccatcgttcttcaccatggcggccgttcccgcccagatggaatcgaccagcttctgcggctcatagccatgcagcatcatggccgcagcgagcagcttgaaataccctttggtaaaggcatcattatccatcggcagcagcgtgccgtccagatcaaataagaccgtatcgatctctctcatcgctcatccctcatttctcagcattcgtcaagcaagattatacacgaaagggaagaaaaaagcgaggaaggaagagcgggaaaagaaaaaggagatcatatgatctccgataaagacctggcagcgtgctgtcttc

SEQ ID NO: 3888 - DNA, 17511 bp, Unknown
  16S sequences of unknown bacteria
ctccgccgtttccggaaaacatctccgccacattgaggaaccacacgtttttatcacggcacatcgcatcgagcgccttgttatattcttcaatcttcgaattccggagcatggggtcggtcttgtacgcatcggcgctgacggggatcagcgactgaacgatgatcttcgcgttgggatttatcgtgcgcaccgtgtcgattatctcaccgtacttttctatgaaagcctccgtatagatccagccgagctcgttcactccgagcatgatatatacgcggtcgaacgtcggatcggacttcagcgcttcaatgactgtcatgctctgaccgccgaccttgataaccttatcggagaatacttccttcaccgacattccgacatgtgtgtatatccgcgcaccggacgaaggcagacgcgtatacagtgcaagtccctcggtacgggaatcgccgacaaacaccgattttgaaagtgcggaaagctccgccggagcggactccgggatattctgataccgataatcggtatcgggaacgaacggcgcaagagtatcgggcgattccgtcgtcggaggctcgggcacggtctgtgtattcttttcggtcggaggcgcagtcacgggctcgctgtcggaagcatcgggggctgatgccgaatcggtggttttcaccgtcggatcgggctgctgcgtactgccgccgatcgacgtatcgggtgtttctctccgtgaagaaattccgtgcgccgcgatcccgaagacaaccgccgccagaaccgccgcgcaaactatcgcaataacaaccgtaaggtcttttttcttgttcatttcacccattccccgtctcccttcgtgccgcagcagcatgtcaatatacgacaaaatcttcgtaacaatattatatcataaagggatggtattttcaatagaaaaaactttttgtttgcctgttttttaaatcattttgttccattttgtgccatcatactcccgataaatcatcggagtccgcgataaacaaaaaaacgcacacaggcgtttttctgccgcggaggcggagtgaaaattccgcctccgtccgttattttcccgcatatcgggcgaatttattcacggacaaagctcatgctctatatccgatcggcatgtatgcggcggcgaagccgcagaagatagtacgacgtcaccgaggtcagcgcaagatcgtagagcacgaacatcgcattgcccgtgaggtatatgagccggccgaacacaagtccgtcgtcgggactcagaccgagcacgaattgagagatgatcgtacacacggtcagcatcaagttaaaaaaagcgaacttgacggcgaggcacagcgggcgcttcatccgctcggcaaaatgcttgacggaggggtatatcccggcgaagaagaagtactcgcacccggcaagcttcgcgggaagaaacaaaatcgcaagagcggacgatacgccccacagaaggtacgggtacgcaccgcccgtttcgataacggcaaacatgctgatcgcagacgtaatcaccagcgccgtgaggtccataactcccgacagctccccgaaaagcattatcacgaagttgagcgcgcagagaagcgcgcagagcacaagtcttaccgtcctgcgcttggcggcagccctcggaccttcgttcgggatcggcttttcaaacgagacgttgtacctttcaagctgaaagaaacgttttacgatattcatgtcagcagcaaggaatcagatcgccgccgcacatttcgcacaggcagtcggcgcagatgagggtcgaacacacatcgcatactccggtcgaatcggtgcgcatctgaccctgaccgtacctgcgggcgtaaacgtccatatccgaaagggcttttctgtattcctcgtttccgggatccatatagcacgcggtctcgatatggcggcgcgcgtcgaagtacgctccgcgtctgagcatgatgcagcccttcaggtagttccattccgcaccgcgctcgtttaccgatatcgaatcgaggataagctccgcatttgcgtagcttcccgccgcgatcaggcggcgcgcttcggcaagtccgcccgaataaccgccggatgacgagaacgaggacgactgtccggaatatgactgccccgtctcgcgcatcttcttcaccgcgtcgtaagcctcgttgacttccttcatcttctcttcggcaaggtctgcgagatcgcttccgttgtagttgtccgggtggtactttcgcgcaagagcgcggtacgctttctttatttcatcgtcggacgcgtcgggaggcactccgagcaccttatatggatccttcatagaacgagtcctttcactgtttcgtgtctgctgccgcggtcggcggcggcacaagtccgagtacttgcctcagctcgcccggaatgccgagcaggattatattttcgattatgccgcgaagctccgggcaggcggagaaatccgcaagagccgcggcggcgttcagatcgcggatgatatatgaagccgagcagagcacgtcctcggcagccggacgcttaagcacaccgcgcactctgcggtgtccgcgaaggtcgtatacctcgcggcgctcgcagatatcactgccgagagatgccgcaaacggattgtagctcccgttcgcaatatcgcggaatgcatcgtcggcggcatccgtgatgtacacgatacgtccgagagaacgcccgaccgacgctgccacgcggtgcgtgtcgccttcaagcccgaacgacataacgtccgagagaagatcgccgaacaccgcggaaaccgtatcgacggatttttctccggcaagctcgtattcacggagccttgcaaggtgagcacacacaaagtccgcaagatcggggaggcttttttccgagcggcggcgcagagttcggcatgcggcaagctcaagccttgccgccgcgcgcctgacagcgcgttcgtctgcgatatcatcgcggatcttgcccgccgtaagtatcgccgatgcgtatgaggcatacgaaagcgcgccgttcatcccgacggacgggcgcttcttcaccggatgaacggggcaccggcggagggaaagtttcgttcttgcaccctcaaaaacctgcctcatcattgcgagaaaaacgagatcgtagttcagggagaagcgggacaactgcccggtagttctacccatcgcgcggcaaagcccgcagtaatacgccttgtagagctcatgctcgcgcacgcgcagttccccgtaggcgggttttacataaccgaacaatcctccccctccctccgttttatatttataaatataataaaccgaagagcgcactattacaataaactttctgtaaatattttaaatcgacggaaatgcagcaaaaaattctgttgtgcactttctctgcctgcgcgggtgtctgcgcgaccggatgcggggaagcgattctccgcggtcgcgcggcaagcgaacgaagacgcggcacgcggacgaagcgattctacgcgctcaagcgtgcagacaaaatatcctccgcggtgcccgccgacgtgcggtcgcctctgcaatatccgaacgggcggtcgtccatgcacagcaggcgcgcggtgcgctttgatgcagtaccgtgcggtaagacgtgatacatccgccgttcgccgcgcaccggaaaacgcagcaggatccgaataccgagggcaaatctcccctccgccgtgaattcacccgtacttcaccgctttcacggcaagcggccttgaagccggatatcccgccttcgtgaaatctccatttccgtccgatccgcttttttcgcacgatttcaaattattttcggaaaaggtattgacaaagtgccgaaaacatggtatcatattcgagcgtttaagatatgcgggtgtagttcagtggtagaacaccagccttccaagctggtcatgtgggttcgattcccatcacccgctccactttttgaagagcgaacgcgatgttcggcagcatcgcacacgcaaaagaatgtgcggcatttcctttcgggaatgccggaatttttaccgacacgggattttatgtacctttagctcagtcggatagagcaactgccttctaagcagtaggtcgagggttcgaatcccccaaggtacgccaaatgcgatacggcagtgacggacggcggttcttccgcggtccgtcggtcggacgcacatcacacatggttttgcgagaacgcacttcaaaaaagaaaaacaaaatcatacggtgggcgtagctcagttggttagagcgccaggttgtggccctggaggccgtgggttcgaatcccatcgctcaccccattagaaagcacttgcattcgcaggtgcttttcgattatattcgcctttcgtcgggcatgatccttctgccgatcgcagccgggctctgcgtaaaaatcgcaaagcgccttcggaaacagaaaaagcgcacggatttcgaaaagccgcgcgccgaagttcgtattcacagcagaagttcgtattcgcgtcaaagctaaggcagccggaaatctcccgcacggctgcccgttttttatttctttaagctttgctctttccggtgaattttccccatgccgccgatatcgcaagactgagcaccgctcccgcaagagccgtgaccgcccatattccggcgatgtagctccagctcttatcgttcgtcagcagcgcaatgccgtaggtcgagaccgcgctcccgacgtatgtgcacgaattgagaagtcccgatatgaacgaaaccttgccgtacttcacgaaaaacgccggtgcgaggcaggtaaggaggtagttgattccgtacatacatcccgtggtgagcgcaagtgcgacgatcgacgcgggcgcgctctttccgccgagcagggcaagcagcgtcgagctgagcgccgcaagcacgaatatgataccggaattcagcatgatgttgctgacgaatctgcggttcacgaaggaggtcagctgactgcatatgatgctgaataccggaagcagtatgcccgagaggatcgagatctcgctcttcaggttgaacgtctcggatacatatgtaggcatccatgtggttattccgtcgcgcaggcttccgtgaatgactatggcgatcatgacgagcgcgataagcaccgcggtacgcccggtcatcttttcgtatttgcggtcgccgcatccgcgcagaacgctgatatcctcaagctttccgttcactctcgggaaaaggatcatccatgcggcgctcataagaagtgctgcggtcgatgcgaagaagaacaccgctttccatcccatcgaatgtatgataagcggagacacaagataaacgaatatcgttgcgcctgagctgccccatgacgaaaccatgaccgtcgctttctgataatccgcgccttcggttttcgcagtcagtatcttgacgatcggcggccacatcatcgcctgcgcgaatccgtttaccgtccaaattgcaacagtcgccgcagtcgatgcaaacagaggcaggatgaagttcatcgccgccgtacagagaagtcctgcgaagactatcctgtgcggctttatgcggtctccgaagtatccgcttacgagttgtccgatgccgtagctgagcgcgcttgcagtaaccgcaagcgacgcttcggttttcgatatgccgcggctgttcacgatctctaccagaacggcggaatagtttatccgcgtaagatagctcacaaaatacacgatcatacacaaaaccgcaagaagtcttatgtatctcttattgtccgttttcataaatatctctctttccgaaacaaagacggacttctccgcccttccgacagatgccggagaaagctccctgcaaagattgttttcaccggcatcggtcgggcatgcacctctcccgaggtgcaacttcacggcgacacatcccccgtgccctcggggacaacgtcacggacggcaagcacgccgtccttcaccgtaaactgtatatcatatcccgcaaaaagcacgccgtacagcctgtcgggatcgtcgtggtactgcggacgcggatcgtgagcaagcatgccgagcgcaccgccgcgcttatcctccgggagcctttcgagaaggctatccggaaattccacttcgagcgaatacgagcggacctcgtccgcatagccgcacagtgcctccggatggctgtccgtataaggaaggtacggctttatatcgatgatcggcgtcatatccataagatcggcaccggatacggtgagcacgggaccgagcgtgtccgaatactcgactctctcaagcttcaccgaggaaagtccgagcgaattcgggcgaaacggcgagcgcgtagcgaacacgccgagttttttgtttcctccgaggcgcggcggacggaccgtaagcgaatgcttgccgtccggaacggcggaaatgcgccatatcagccacagatgagagaactgctctatcccgcggacggcatccggatttgtgaatcccggctcgaacacgatccgcgcgcgcagaccgtccacgatgccgctctgtctcgggatgccgaacttggtcggaaaatccgtccggatgtgagcgatcgcgccgatcgaatattcttctgacattttatctccgatcctttcgccgaaattccccttaaaccgcgcgggggacacgaaattcggggagcggtgcgttttatgaaaaaaagcacagcccccggtcgcttatttttcggcgaaaactttgttcagtatgactgtcacggcgattatcactccgattatcacgaatatcgccgccatgccgagtcccatatatctgagattatttataaaattaacaggtgaaaaatccatgttcgatcctccgtccgttcaggcgccgaaaaatttcagtatcagtccgccggctataaccgacgcgatctgtcccgaaacatttacgcctatcgagtgcatgagcaggaagttctgcggatcctccgcaagccccatcttgtggacgatgcgtcccgacatcgggaatgcggatattcccgccgcaccgatcatcggatttacctttttgcggaggaagaggttaaggaatttcgcaaacagcacgccgcccgcggtatcgaaaataaacgcgacaagcccgagggcgagtatgagcagcgtttcgggtcgtaagaagctctccgccttcatctgcgacgctatcgtgatgccgaggaagatcgtgacgaggtttgcaagcaccttctgcgcggtctcggaaagagaattgagcacgccgcattcgcggatcagatttccgaacatcaggaatccgatgagcgacgaggaggcgggcacgacagccgcaacgactacggttatgacgatcgggaaaagtattcttgtacgctttgaaacggtcttctgctcatacggcatacggatgagacgctcttttttcgtggtcagaagcctgattatcggcggctgaattatcgggacgagcgccatgtacgaatacgccgcgaccatgatcgcgccgagatatttagaattcagcgcctgcgcaacgactatcgaggtgggaccgtccgccgcaccgatcacggcgacggaggccgcatcgtttatatcgaagaacatcgacgaggtgcagagggtgaagaaaatgccgaactgtgccgccgcgccgaaaagcatgagcttcggattcgaaagcagcggtccgaaatctatcatcgcaccgatgccgatgaacaggatcagcggaaacagctcgttcgcaatgcccgcgtcgaacagcgtcagcagcggtccgcggtgggtgatcccgccgatcacggtttcgagggcggcatcggcgttcgggatatttacaagtatcgtcccgaagccgagcggaagaagaagcgtaggctccatctccttctttattgcgaggaagatgagaagcgcgcctatcaggatcatcacgccctgctgccatgtgaattcaagcagattttcatatattatactcataaacgctccttttaaaaaagaaaccgactttcaccgtcggcattccgctttctttgtatcgcccgagcgcaaaacgtaagacatccgccccgttcacgccgatgttttgttcatttcaaccgaagtttgcacaaaaaatgaacacaaatacactgtgcgaatgcacgacccgatcattttaccacgtctccgtgtaaaatgcaagtaaaatatgcgttttcgtgttcatttcataaattatttacttgatttccccgaccgattttatacgcttttttaattacgccgtcaaagctgcgcacatccgcccgcggggacgcaaaccgtatttccgtttgcaaagatccagacatcgagcgcagagggatttctcacccacgtccgttcgaggttgaaatcgagggatccgaacgctttcgcgtatctgcagtatccgatgaacgtgcagtaccagatatcgttccgtccgccgagtgtgcgcgcgatatcctccatcctgccccaatcttccctgtgttcaaactcatacgaatgtgcgaacaccgtaaagagcttcgcttcgacaccggggaaatatatccccgtctccggctccgccgagatgaacctttcgcacagctccggcacttcatcctccgcgtagtggcagctcggtctccacgccgtcatatcgcgcggcagatcgaatccgtgtgcggagcccgcggtgcgcgcgtattcgaatcccgcgctccgcacaagcccggcaatcctttcgtcgtatgcgccctgcggatacgcaaagccgcgcacgctctcccccgtcagctcctcgagcgcggcgcggtcgcgcatgatctcccagagcacgccctcgtcgtcaagcttcgaaagatcggcgtgaagatatccgtggcaggcaagctccatgccgctctccgcgaacacgcgcccgattgcggcgcggctcattcttctctgacaccaatccgccgcgggaaaaaccgcgcggtcgagcgtcgagaaatcgaagctgtcgtccggcgggagcagtcccatgttcagattgaacgtggcgagcagtccgttttccgcaagcagaccgacaagacgctcatcctgctcgcttccgtcgtcgaaggtgaaggagagcgccttgctcagtcctccgggaaatctcataaatacatgactgtgcttcatctcgttttccctccccgactgtgccgtcggtcatttgtcagatgtcattttcgacatgctgcgctgcgacatgacaagtccgtagtatatcccttttttgcggagcagctcctcgtgcgtgccggtctcggcgatctttccgtcgtcgagcacgatcagcctcgtcgcgttgcggagcgtcgaaaggcggtgcgcgatcgcaagagtcgttctgtcctttatcagcttctgcagggcatcctgtatctgacgctccgtctccgtatcaagggacgccgtcgcctcgtcgagtatcagtatccgcggattgcgcagcagcgcacgggcgatcgacaccctctgccgctcgccgccggacagcgtgcagcccttctccccgaccttcgtattgtatgcgtcgggaagcttcattataaactcatgcgcgcccgatatcttcgccgcggcgattatctcgtcgcgcgacgcatccggcttcgcatacgcgatattgtcgtagaccgatccggcgaagagaaacgtctcctgaagaacgacgccgatctgagaacgcagcgactgctgcgacagatcgcgtatgtccgtgccgtcgatcttgatcgagccgcccgtcacgtcgtagatgcgcatgagaagatttatcagcgtcgtttttccgacgccggattttccgacaatgccgatcatctctcccggctcgatgtgaagatcgatcccgcggagaacctcggacgctttgtcgtatccgaaggacacgtcctcgaaatcgaccgttccgcgtatcttcatctccagcgcgtccgtgcggtcgggaacgtcgatcttttcgtcgatgatctcgaacaccttcgcggtagaggtcatgaactgcacgatacgccgcggaagcgccgcgatccagcggagcggtccgtagatcatgctgacatacgcggagaactgcgacatttcgccgagcgtcatcgttccgccgagtatgcggtttccgacataaaagagaagaaagaattcaccgatccccatgagaaagcgaagccacggccacactctcgaccagagaagctcccctttcagggatatatcgcggtactgagccgacgcgcttctgtagcgcaccgcctccctctcctccgtaccgtatgccttgaccacgcggatacccgaaaagatatcgtgaagcaccgcatccgcctttgaatatgtatgccacgatttgtcccataggcgccggattgacgaccaaaacagtgcgcatgccgccactacgagcggcgcggggcagattatcatcagcgcgagccgccaatcgcagaagaaaagcatgactccgaccgcgatgagtatcagcccctgctcgatgatatcgggcatcgtgttcgtaagaaactgctgcatctgaacggtatcgttgttcacgcggttcataagctcgcccgcggtgcgtttcgaaatgcgcgcaagcgacatttcctgtatctttgcgaataccgtttcgcgcagactgactatgacacggctgcccgtatagacgagcgcgcggtttctgaatacgaaaagaacgttcgacacgagctttacaacggcgatcgacgaaacgacggcggcaaactgccacaggacgacgctgccgggatcgggtgcttttatgaaatcgtcaacgataatgcggttgatctgggggatcagcatatcgaccgcggttataacgaagaaaagaatcaccgaaagcgccatatgccgtttgtacggcgcggcgacggtgaaaagacggcgtatcatcttgagtttgtcggcgcagtacgggcacgacgtcgatcccggagggagcggacgcccgcatttctcgcaggtcttggcggtatcggcggcaagctccgcgcggaattctccggttctcgcgtaaaggtcggtctgcttcatcgccgcgccgagctcttcggtatgtgaggagtccgcgcggcagatgagcgtatccgagccgccgagcgtacattccgcgctcacgcttcccactcccggggtcacacggaagctgtcggcagccgaaagggtgatattctttactctttcgccgtcgatatataccgaaagctccttcgagccgagcacgcatatgccgttcacctcggacagcacgccgcccggagcggcgcggtcgggcagattgaacgaaaatgcggtaagtatatccccttccggaagaacacctcccgccgccttcagcgcacgcagacatttgtcccgcgcggcggcatgtgcggcaatctcctccgcggtatggtttccgttattgttttccgtaattatcacttcctttccgctttgcgccgcggcgcattacaggtacatctcgatcctgcgcaagctctgcgtgtcaagatgtccgacgtcggggatctcgtaccggtttccgtcaacgtcgattatgcagacgcggtctccgccgtctgcgttcggtgtcttgattatgctgcggaaggtgtcgcggagcgtgaaatccttctcgccgaactcgcactcggtcttccaatacgaaaagccgtagcgctccttcaccgacattatccgctttattacgggggtgtagtatttcacctcaagttcccgctcgagaagcgctctctgatctccggagaaatccccgagagagcgtatcatgccgatctccttccggtcgcggtcgagcaccgatatgtattcgctcttcatgtcgaacggaaacgctcttgcgagaaatattctttccgcgattatgtgcgttcttccgtcgggcagcttctccgtgcggcgggcgggcgctttttccgcgcggtctttctcttctccgtcctttgccgcacctttcgcgtccgattcgtccttcttttctccgcgctccccgttcggcgcgtccgacgcgctcttttcatcctccgttccgtcgtccgcgatctcaacgacggcgtcgattccgatgaatccgtttttctcagtgatccggcagttgtccccgccgagatatactatccttgcaatatcgccgaaaacggactgcgtccggacgatattgtccctgttctgttcatccataaaatatacccgcgctttcgttttgcgaaagcttcctttctcggtgagatcgggcgcgctttccttaccgctccgccgcgcgcaggcggcggagaaaaagcgctctcccgttttcgggtgaaaaatcccgctatgcctcgatgccgatattcctgagcgcctgagcctgcatcctgtaaaggttgtagtaaatgcccttctttgcgatcagctcggcgggcgtgccgctctccggcatctttccgttctcgatgacgatcagcttatccgcgctgcgcagagtcgaaagcctgtgcgcgatcattatcgccgtgcgtcccttgatgagcttttcgagtgcggtctgtatgcggcgctccgtctccgtatccatggcggcggtcgcctcatcgagtatcagtatcttcggatcgcgcagtatcgcgcgggcgatcgagaccctctggcgctcgcctcccgaaagatccttgtagccgaagccgatcctcgtcgaatacgcatccggaagcttcattatgaaatcgtgtgctcccgcgatcttcgatgcggcgatcacctcttcgaccgacgcttcggggcgcgcgtaccgtatgttatcgagtatcgttcccataaagaggaacgtctcctgcgacactatcgatatgttctcgcggagcaccgaaaacggaagatcctttatgttcacgccgtcgatcagtatctccccggcgctgacgtcgtacaggcggatcagcaggttcgcaagcgtcgattttcccgagccggtgtgaccgacgatgccgatcacgttgcccgcctcgatgtcgaagctgatcccgtcgatgacctttctgttcttgacgtaggaaaactcaacgtccctgaacgtgactctgccgcgtatctcgtcgggcacgaccgggtgatcggattcaacgacgtccggcacggcatccgcgacctcgaacaggcggacgcaggcgttcacgcagtcgctgaaccaatacgttatgtcgatgaagaagtacatcggaccgtagatcatgttcatataagcggtgaagctgacgagcataccgtatgtcatctttccgcgtatgaccatccatccgccgaagccgagcacaagcacgttgccgagatagaggatgaaatccgcgaacggaaacgccgtattctcgaaatcggcgagcttcttttcgttctcggcgaggcgtcgcgccgttctgccgaagcgctttatttcgtttttctccctcgagaacgccttgaccacgcgcattccgccgaggatatcgccgagcgccgagttcatcgagcgcgagcttgaataacgttttgcatgaagattgccgagacgtttgaaaacgaatctgaccgtcacgacgaaaaacggaagcgttacaagagatatgaaagcgagcagcggattgaagatgaacataatgaccgcaaggaccgcgatctgcaccacgttcatgaggaagtacggaactccgtcgcagaagaacgtgtagatcgtctgcgcgtcgccgtttacctgactcataagtccgccggtctgacgtcccgtgaaaaatccgagggacaggcgctgtatcgctccgaatatcgtctgtctgaggtcgtaggtcatcattgcggcgatcttcgacgtcagcatactgttcaccacatcaaacagcgccgaaaacgcgcgcacgctcaccacgagggctatgacaagtccgagctgaccgtagaacgatccgtctgcctcgagcacctcgtcgtagaagaatgcggagctgatatacggcgagataacgccgagcacgcttatcacgaaaagacaggcgaacgaaagtgcgatcttcgacttgtatttgaaaaggaacacggacaggcggcgcatcagctttcccttgtccgtacagtgcgggcagatcttcaattcgggatcgggatagcgcgcaccgcacttcgggcagaagagacgctccgccgaatcctcctcgtcaagctcgacccgctcgccctttttcaccttgacgatatactttgcgaacatctccgcctgaaactttgaagtgttagtaaagacggcaatcagcacctgcccctccgccttctttgagaacgcggtaagccttcccgacgagataagctcctcgaccgtaaagtcatcgagatcgcagagatcataccgctcaaacgaaagcacggtaaactccgcatcgatcctcctcgccgtcggcgaggtaagaaggcgcgtctcgcgccgggtgagcacggtgatccccgacacggcaaaaagctccttcgcagtggcgataaggaagcagtcgcagtgtgcgccgtccttgttcatatcgcattttgcaagaagctcggcatcgccgaaatccgcgccgttctccccgagtatatcggtgagggctgtcggatagctgtcaagtgcgaccatttcgtatcacttccttccgtgaaaaaataagtgcggaaaaagtttccccgtcccatgaccccggtggagcttttccgcacggcaaacccgataatttcccgccgtcggcagacagcgggcgcgatactgcacgttttccgatgcgcggtatcattttaagtataaccgaatttttacctcttgtaaagagtttttcggcaaaaggtcgtttttttccgccaaaaggtcgcaaaatactcaaatcatgcggcacggcggcacaaaaaacagtgccgtatgacaaatttccgtaaaacgcggcgtgactccgtgcggcactgtcctttccgcatctgccgatttgccgactgctcaaaaaggctgctgcaagctctcgcctgcagcagcctcattcggatattcgttttttagggttcggtcaagcctcgttgccgtccgccgcttcctcttcggcaagatttgccttttcctccgcggctctcgcaagctccgtatcatacgccttcagaacggcttcctcaagcgaagcccggaagggagcatttatcggatgaacgatgtccctgtacgttccgtccggatttttacggctcggcattacgataaagaatttgtcccgtgcgtttatgacctttatgtcatgcaccgcaagctggctgtcgaaagtaaccgatacgatcgccttcatgggaccttcgtcaaaaagctttctgatcttgatatccgtgatttccatagtctgtccttcctttctttacatcaaagtgtacaattatcggaccgtaaattcattatacagcgtctttatgaaaaaaatacaatctaaatggaagatttttttgaattctttgaattgggtatttattttttttgaattttgtgtataatataaaatgtatatacgaaacgcaggatattttttgaggattttgcaaggagaagtttcccgatgtcattgccgaatacgcactacggtacagaatacataagctcccttctcgacggaaagaagaagatcttcttcgccgggatcggcggagtgagcatgtgctcgctcgcccatataacccatctgcgcggtcatgaggtctgcggatacgaccgcacgccctccaaatccaccaaggctctcgaggacgagggcatcgccgtatactatgaaagcgacgcggatcacatgaaggatgtcgatctgctcgtctacaccgtggcgattcccgccgacaacgaggaatacgcctacgccgggaaaaattccgtcccctgcgtatctcgcgcggactatctcggatacctcatgagcggatacgagaagcgcatcggggtctccggaatgcacggaaagagcacaaccacgtcgatgctctcccacatattttctaccgccgggctcgatccgacggtgagctgcggcgcggtcatgctcgatgaaggcaacgcctacaggatcggcggaaacgaattcttcatcttcgaggcatgcgagtacatggactcctttctcgatttctatcccacgaccgcgatcgttttgaatatagaaatggatcacgtcgattacttcaagtccatggcgcagatcgaaacatccttcggcaaattcgtccgccgatgcggtgctgacggaacggcggtcgtcaatgccggcgatgcgaacgtcatgcgcgccgtcacaggatttgagggacatacggtcaccttcggatcgaactgcacagaggcggattacagcgcgtcggatgtctccttccggcgcggctgcgcgcacttcaccgtgtcgctccgcggacaccgcctctgcgagatcgcgctttccgttccgggagcgcacctcatcgacgactcccttgccgcgttcgccgcggctcatgtgaacggcgtcggcatcgacaacataaagaacgctctcgaaagcttcacgggcgcggcgcggcgcatggaaaagtgcggctcgacccccgcgggagccgacgtgttcagcgattacgcccatcatccgacagagatcgccgcaactctcgccgccgcgcgcgaaatggggtacaaccgcgtattctgcgtattccagcctcatacatactcgagaacggcggagcttttcgatgctttcggcaaggctctcgccgagggcggctgtgcggagatcgtgcttgccgacatctattcggcaagagagaccgattcgctcggcgtaagctcttccatgctcgaggaaaggctcaagaagctcggtgcgcgcgcgtcctacattccggacttcggagacatggcggattacctgcttgcgaaatgcacggacggcgacatgataatcataatgggagccggagacatatcctccgcggtgcggcttctcctacagtaaagcagttccttttaaggcttgacaacatgggtatttcggcaaaaatttactattaatatttgtcacttatgacggattattattgacaagcgtattttcaactgttataatataaataccgaaatcgggagcacaaaggcggatacggctgttttgaagcataataccgtcctgtctttcgccgcaccgagaaaggaatcaatctccgcagcataactcattaaggcggagagcatgtttttcacggttcgctaatccgcaaggattataaataaaaacacagagaggtaaaacaatgaaaaaacttattgctgtttttcttgctttgatgaccctcgtgtgcgcagcatcacttacttcttttgctgcggacggcgaggagctgaagagccccaaccccgttcccggaagagctaatccc

SEQ ID NO: 3889 - DNA, 6286 bp, Unknown
  16S sequences of unknown bacteria
ccccagccgatcggcaaacagaccgccgttgcgggccgccatgatctgcgcaaactgaaagcgcagcccttccacccgctccaggtccgcatccgccagcctgacgatgccctcttgatacatatcgagcttgtgcgcggattgctgcagatacaagatggagtcttcctgcggcggcgcgaagcaggaatcaaaatatgcgcagcgccgtcctctggtgcagaccgcgctgcgcgcgggatgaggacgctgcggctgcatcagacagcgctcacatgatccagccagctcacgcagatcgcgctgcagcggtgcgcacagctcacgaatcgaatgctgcggatggccgcggacattgaacagatggtcttcttccacgagcatggccttgatatccagctcacgccctctgacatacgccggatccagacagatcacgcggacatcctccaccgggatatccaacgcctgcagcacactgagatgatctgcgatcatctgcgcctcgctttcgcgcgggaaacagctgcgataagcaaaatacaccaaaaatccgctctgtccgcggatcatcagcgggatcttcacccgcacgccctgcgccgcaaagcgggcattgaccaatgcgggcgcatcctgcagcgcctgcatcgccagcgcgggatcatccccggcatgcccttcgaagcatgtctgcagatcaaaatagatcttgcacagctcgctcatggagagcgaaggatgcagaaaagggaaatacggctgcgggtcatgcttgctctgccacagcagcgcctcgcatttctcatatttccggatatcgctcagatggatcatgcacatccccctcttcttcatatcgcttcagcatctcctcgatctgtgtcttcatgcgctgcaccagatgagaaggcgacttcagcaccgcgtccggccccaggcgaagcagcagatcgaacagcgcatactcggtctcgatccaggcgtcgaccgctaatgtctcctcatcgatccagcgcatcttcgaggaaatgcctacgctgcgctctgccacccggcgcgcctgttcatgccgcacctcaaagcgagcatggatgaaatcgccgcggatcagaccggtgcgcccgacatagcggtccaccgcaaaatccggatcacgcacgaagcgccgatcgctcagccggaagtcatacatccgctgttcgctgaagcggaaagagcggaaatcatgcgccttcatcgaataagccaggcaatagcacgcgccctgaaagaacagcagctcataaggatggatctcgatcgtatatgcctttgcggcactgagcgtgcgatacgtcagcatcacgctgcggcagtcgcggatggcctcgatgcagcggttcacatagcgctgttcctgctcgctgatccccggcatatgcgcttgcaggtaaacgctgtcgcttcgtccccgggaaggatgagagatcaagatcttgcccatcgcgcgctcaaatgcctcccccgcgataaagtccgcatgtgagcgcagatagcggcaggcttcttgaagcgcgtcttcctcctgagcatccagcgccggcgcaggcagaagcgcagacgtatccagctggtatccgccatagcggccggtcgtctgtatgatcggataaccagcgatctccagctccttgcggaattcccgcacattgcgcggattggtctccagcgcttccgcgatttcatcgatacgcatccggccgcgcaccttcagcagcgccagcatgcggatgcacagagcagtccggttcatcagttcctcctttattgtgacaccatttatgtcacaataaaaataccacagatctttcactgtggcaaacaaaaagaaggatgccaaacatccttcactctgtcgtggaagactcgcgcattgcattgctggtcacgccgcctccgctgtaatgattcatcgtctccacaaagacatggacatctgcgcctggatcatgcagcagcagatagtcttcaaacaaggttccgctgtaagaaagtgtctctccatccttctccaccttcacgctgccatcctgcttcagctgcgcgatcaccttctgcatcgtctcatcgttggtgtcgatgcgatacagatacatctgcgtcccatctactgaaaagctgcgtccgtcataggcggcaaactcgatggtatccagcgtctgttcatcttctaccgcgatgccttgatcgcgaaggtattgcatcatgtcatccagcgtcttctccccctgctctttcgctttctctgcgctcctgccgatatcctccgccgcattttcagcgccgttcttcacttcatctgcggccttttccgcatcgttcttcgcttcatccacggcctgctgcgccccgcagccgctcaccagaaacagcgcgcacgctgccgccgtcatcttcagccagttcatccgatcaacctcctgtcagttacagtatggacacgtccggcggtttcatacaggaaagaggcggcagcctcagttttccttcttgatgaaggaaactttttcagccaccacctcatagttgcgatagatcacgccatctttgttatgggtacgtgtcgtcagcctgcccttgaccgccaccacatcgtgaagcgcgcacacctcgcaggtcgtctgcgcgatgcccttccacagcgtcacggcgatctcatctgcttcatagactccgtcactgttggcaaaaggcctgtcgaccttcagcaccatcgtcgcgcactgatagcccgacggcgtctctcgcagatagggcagctcgatgacctgcccgaccagaacgatcacattcatgcgttatccctccctccggtatgagaatgttctcatcagtatcaccccgccttcgggcaacatgttaccacgttcccgccaaacgcatcaaaagcgccatttagcgctcaggatcgctattttccagaaaaacagcaaaaaactgccgaaattcgacagtttttttcaaatagctacttttttttcggattgacgatgaccacggccttgcgctgcggcacgatgcagcggcatgcctcgctcacctcctgcggcgtgatcgtctcgatcacatccatcgcctccaggtaatcatagcccgcgaacgcgctgcggatatagccgatggcaatgtcatcgaagctgttgagcgtgcggaccgactgtccgtaatagcggtgcttcagctgatccagctgacgcgcggacaccggctcctcttgcatgcggcggatcagctcatcgatcagcgactcaaactgcggcgtcttttcgctctccgtgtaaaacagcagcaccccataatcttctcccaggtccgcatcggcgcccacgaaatccgagatgacgccttcgtcgagccacttctgataatcctcgttcatggaagaaaaccagaggtcctgcgccagacgcaggcaccactcctgccgcatgcgcgcatggacatccgagaccggcttcagcttataagcgaccgcgatcttaggcgtagtgatctccatctcgaacgcatgatgcgcacggaccacctcatccggctcgcacagcggtttccggcgccagttctgccgcggcgagaacgtcttgcggcgctgattctccttgatgatcgccatgatctcctcaggatccctgccgcttaccgccaccagcatcatccgggaaggatgataattgcgcgcatagcactcctccagctgtgtccgggtgatggaacgcacgctttcctcatccccgccgatgtcatatttcagcggatgttcatgaaacaatgacttatacgtctccatgagcaagcggttatcgctcatctgcagatacatgttcagctcagagacgatgatgcccttttctttctctacggaagcatcactgatgtccagatcctggacaaagtccagcagcaggttcagcggttcgcggacatcttcgctcgtcgaaaaataatatgcggtctctccataagaggtgaaggcattcacgctggcgcccatccgggagaaatcatccatgacatccctgtcctttttctcaaacatcttatgctcgaggaaatgcgcgatgcctgccggatacacgcactgtgtgccgtgctcgtccacctggcagatatccatcgcccccagcggcgtcgccatcatgaacagcgaacgcgcatagcccggcttatgccagatcaccacacgcagcccattgtccagcgtctccacatcatagctttcctgataccgctcatttctgatcgtcttcatccgcatcctcctttctgcctacgatgcaggtgagcctgtgctccagcctgcgcgccatggcgatgacatcttccctgctgacctgatccaccagcgagatgatggtatcgctcgtgtagtcccggcccagcagatcattttgatattgcagcgcgacgatggagttcatcacatcgtccccggctttcaaggaactgcggatcatcgtctggctcaccgtgagcagctcatcgtcaaaatcgccctgccgcagcttttccacctgttcctcgatcagcgccagcgccttgtccacatgctgaggatccacgccggtcatgatgcccagcgcaccgtcgaaagagatcaggttggaatagatggaatagcacaggctgtttttctcacgcacgttctgaaacagcaggctggtcgaatattgaccgagcatggcattcatcacgcgcagcgcgtaataatcagggtccagcacatccgtatgcgtgtaatagaggaccatgatgctcgtttgcggaatgtcgcgctcctccagcagcgtctcaggctgtccctcgcccgtcacgacataatgcgtatctgccgccgcctcgcgcgggacaaaggaaaaatactgtcggaacagcgggccgacctgcgcttcctgcagattaccgcaaacgaggatctcgatcccgctgcgctcgagcagcgcctgatgcgtctgcctcatgtcttccaacgtcagcccttccagctcttcgatctcgcccagcgaagagaccgcgagcggatgccctttcccggcttccttcagcccgcggtggatcacatactgtgcggcgtcatcctgcatgcgctcgatcttcatgcgcagcacacgtttcgcctcttccagattttcctcgctgaacagcggggcgaagatcagctcgcacagaaaacggatgccctcttccagaaaagacgcgctgtgagcaaagcgcggatggatcatgcgtgcgcgcatctccatcacctgcgcggcgccatagcccaccgtctgcgtgcccagcgagagaccgtacagctcatcgctgcggcggctcatcgcctgcttggtgggataagcctcgcagcggtccgtcatcatcagcgccatcagcgagcactttgtcgcaaactgcggcgtcagcgggtggatgaagcgaatatagatgccgatgtccttgaacttgacgctcggcaataccctgaatttgacaccctgtgtgagttccatatacctacctccaatgctttatcttcatgcatgttatagtctaacacaatccgctctttttttataccgatcagcgctcctgcacctctttcatatagcggtaaggcacctgcttgatcagccataccccattttgcgaaaggtagaagacatacgcgtcccggcgcatcgcggcacagtcgatctcataaacgatgggttcgccatgtcgcgcacctaccttgcgcgcggtctgcacatccgtcgacagatggacatacaggcggttcatcggccgcaaaccctgtgcggcgatagatgcggcgaagcgcttcgcgctgccatgccacaggcgcgccggcggctcaccttcgcgcagctctacatccaccgcgatggaatgcccttggttcgcgcggatcttcgtcctgcgttcatcgaacgcatagcgctgcttctgatcggccgccacgatctcctccagctgcgccctggtgatcctgtgcttcttcatccccgccagcagctgatcgacatccgcccagccatgcgcatccagcgtgatgccggcctccggatgatggcgcagcagataggacaagtaacggcttgcccgattcagatccatgatcttccctccttaaaaaagcccgtgcacatgcacaggctgatctcacgaaatatgaatgaataccggtccggaaccgagataagcgcttgccaccacggtctcgctgccgttgaatccgccatgcacggcctgtccgttgccgatatat

SEQ ID NO: 3890 - DNA, 2347 bp, Unknown
  16S sequences of unknown bacteria
cgaaaggaatacagcgaccaccgatagccgaacagactttatagtcaagctcaacgagcagaaatgcggcgccggtatctttgcctggtcgcgggacgatttacctgatgtcgtaatagagtttgaaagcggcagcatttccaataatactgctgggaattacggtgcaggcatctatctgaaagcgaatgagggtaaaacggcaaccattaagatgacaggcggcattattgaagaaaatacggcaaaatacggcgcaggcgtctatgtcctatctggacaactggcgatgagcggcggttctattatcggtaacactgcaacggtatatggcggcggtgtttattacgctccacttgacgagcatgtggtttatctttccggctgcccgaaaataatgggaaatacaagcagcgggaatgaagataatatttatatggatagtctgcaaaatgatcaagatattacacggacgatcgttctcacaggcgctcttacccaagaggcggtggtaggcattacacgttggaaaacgcctacagatgacgctcctgaaaagatagtggcagaaccatcggcagatccatcttattcaatcacagaaaatgaccttgaaaagttttacagcgatgatttaacatatacccttaaaatgcaggatggtaatatcgttatgactactgctgttcgagttggcggtcttatggtttctcctacggaattgacgatgaaggtgggcggcacttctacgcttacagcgacggtaacgccggaggatgcttctaacaaagcagtaaaatggacttctagtgatgaaagcattgcgacagtggatgaaaacggcgtcgttaccgcgaagtctgtgggtaaagcgacaattactgctgagacggtagacggcggacataccgctgcctgccgggtaacggtaaaagctgctaacagcggaggcacaaccacttattatacgctaacttttgaaacgaacggcggcagcaaagtggaagacatacgcagatcttccggcagtataataacacttaaccagacaacagagcgtgaaggttatgtgttcactggttggttcatagataaagagctgtctcaaaacacggaatctatagttttaactaaaaatacaaccgtatatgccggttggcagaaagatgtggccgagccggccgataccggcgtatccgattggctgaatacccgtgaccatatggagtatttacaagggtatccaaaaagtatgtttggtgcagacaatgatatgacccgtgccgaggcagcgcagatgttctacaatctgcttttgagcaaggatatttccattaccgttagcttcgatgatgtcgaagataccgcctggtatgcaaaagcggtggatacgctcgcctctgtcggtatcatcaagggagtaggagataataaattcatgccggagcggagtatcacccgcgcagagtttgttgcaatggctatgcgctttgcaaaattggatacctctggtgaaaacatctttagcgatgttttagaaaatgagtggtattacgattatatcgtcggttccataaaatacggttggataacaggttattcagacgatacttttgaaccgaataatacaattacccgtgctgaggttacggccatagtgaaccgtattctaggcagaaatgcagataagggatatatcaacacgcattcagatcgcttagtaaaatttgaggatctggcaaaaagtcactgggcgtactacgatattgttgaagcaaccaacgcgcacgattatacaaaaacaaatggtgtagagcattgggattaaacttgtttataaatatgaaagagttcgctgatttaagcgaactcttttatttgataaggaaagcaacaagatttatgaggcagcaatgaattttaacagtggaagaaagcaaaacattttgcagtatttaaaagaattgatactttccgaaaatctgcttgagaatcgcatattcgacagtaaaggaggctcttttaaagtaattatggctcggcaatgtctggctgttgtaaaggagaaaagaacaaaggcaatagcaaaacgctgtgccgccatgcagccacctatttacttacttaacaatatcattctttttcaagtttcagattgcttttaaaataggttctgcctacaccaaatactttattttgcggtgtaaatttggcattttctattcaataaaattagctgcaatatcattagtaactattttcccagttctatttattgcgctaattgttgctaaagtcatagaagtatcgtctgacgaagcttctttaggcatattatgacttctgt

SEQ ID NO: 3891 - DNA, 8685 bp, Unknown
  16S sequences of unknown bacteria
aatacgggcaaatgaatccctccgttttctaaacggaaaaccatatttgttatctgttttcttatctgtttggattcctttttacacaaaattttccgaagtgccgctgtttttgtctttttgcagaatttctcttactcggttcggaaactcaacaccgaaaaaagctggactgtatatgaaacgggtaaagctttatcgggaacatttgaagttatgccgtttcagacgtttattctgtgcaaaaatattcagtaaaggtaagcgggttttaatacttcttattttgcaaagcaatctcggtgttgtagatagcctgcaccgccgccttatcggaatgtattactatataagtatatatcgcgtcgaaaatcgtaagctgtgctatacgcgagctcattccgagtattgagtgcttggtttcctcggactttgtaaaaagcgagatgtcagaagcctcaactatgggcgacgagccgaaattagtgacgcaaattgttgtagcgccgccgatttttgaaagccgcagagcctccacaatatcctttgacgagccggaatgtgaaatccctatagccacgctctggcggtctaaatgcgaggcgattatcgcctgcatatggttgtcggtacagctttgcgcgtcaagtccgagccgcagaaacttgtgcgccgcgtccatagctatcgcggcggagttgcccagcccgaaaaccgcgacacggcgggctttcataatcgtctgcgctgctttttcaaggtcgtcggcgttaagaatgctctcggtgctgttaagcgacagcgaaatatcgtttatgcgctttttgaaaatatcaaaacaggcgtcgtcctttttaatctcggttcctaccgaggaggtcgagcctatctctcccgctatgccgattttaagcgcctgaaagccctcaaagccgatacggcgtgagaaacgtacaaccgtagcgtcgccacagccgcatttttcggcaagctcggtgactgaacagctgattattccttgcgtgtccgcaaggatatagtcggctattcttttttccgcaggacccatcgcggaataaagactcctgattttatgcatagttgattccatttggcacctcaaaataaaaattattttcattattatagcctttttttaaaaaaaagtcaaataaataaaaaatattttcatttctactattgcgtttgcattcgttttttgttattctatgtatataaaaaatcgcttgaagcggataaaagggatatggtgaaaaaatgcttgattacaaggtaaaaatagggcttgttcctatgcgccgcaacaccacgaaccgtccggtgaaaacctttttgacatgggtttctgccgaggagcgcggtcacaggtttgtcgattatattgaaaacaattttgcaaccgaaaacgtaagctttgccgacagtaagggacttggctgtgccgaccttatttttgacgaaaaatccgccgacgatattgtcgagcgttttaagaatgaaaaggttgacgcggttatgataatcaactgcaacttcggaaacgaagaagccgccgctcagctggcgaaggccatgggaaagcccgtgcttttgtgggcgccgcttgacgacgagtattatgagcacggtatgagaccgaccgattcccagtgcggtattttcggggtttcccgccagcttcagcgctttcacattccgttttcgcacctgccttgttgcagagttgagtcggaggaatttaaggaaggctttgaaagcttcacccgcgtcgcttgtatggtaaagaattttaccgatatgcgaatcggtcagataggaatccgccccgcgccgttttattctgtaatctggaacgagggcgagcttatggagaagttcggtcttcgcatcaccccctttaatatggcggtaattcagaatatgtttaacgagaccgccgaaagctgtaagacggaaatagccgaaattgaggattatatactcaaaaactatacccttgacgagcttactcctcagtatgtaaaccgtatggcgaccttggctgttacatataagagactgtttgaggaaaacaagcttgatattgtttccgccgagtgctggacggcgacccccgagatgttcgacggacttgctccctgtgcggtttacggaattttaaacgatttaggatatataatttcctgtgaaagcgatatgcactgcgctataacaatgcttttactttcctgcgcctccttcggtaagaaaaagccgtttttgggcgagtttacggttcgccaccccgaaaacaaaaacgccgagcttttatggcattgcggacccttcccgctttctgtcaaggctcccgattccgaagcgcttcttgtaaatcagcgggaatggttcagggcgaaggacggggaatacaccgttgcccgtatggatcaggaaagcggagattatatgcttttaccgcttaaatgccatactacagcgggaccgctgacccacggcacatatatctggggcgagtttgacaatttgcaggcggtggaggacagacttttagacggtccgtatatccaccatttctgtgaaatcgagggcgactatacaaaagagctccgcgagttctgcaagtatgtaccgaatcttaaaatagatacctcattagactaaaatcaaaaggagataaaaaaatgcagtaccagatgaacgaatttttatttgcgatgattctcaccgagcttgaggacgcggtcggcaaggaaaactgctccacccgcgctatcgacaaggtgacccacagcgtggactactattggctgtcccgtatgtgggctgaccgcggctgccgtatgcccgaggcggattttgttgtctgcccgaaggatgcgacggaagtatccaaggtcgttaaaattgccaattactacaagctccccgttaccacctggggcgcgggcggcggcacacagggcggtgcaatccccgtatgcggcggtatcgttcttgacaccaagagaatgaacaagatttacgaggtcaacaccgaaggaatgtacatagaatgcggcacgggtgctatctataagcatattgaatgggcggcaaacgaggtcggaaaggcgacaatgcactatccctcaagccttacctgctcgaccgtcggcggctttttggctcaccgcggaatcggcgtatgctcaaccaaatacggcaagatagacgatatggtgcttcagatggaggtagtactcccgaacggcgacatcatcaacacctctcccgcaccaaagcacgccgcaggccctgacttaaaccagatatttataggttcagagggtactttaggtattatcaccaaggctcaaatccgcattttcgaccagcccgaggaacgccgtttcagaggcttccttttccgggatatggagggcgcgttcaaggcgtcgcgcgagcttttgcagaagttcaagccctctgtaatgcgtctttatgacgaggctgagacctccacacttattaaaaagattgtcggcgttgagcgcaagggcgcgtttatgaacatagcctacgagggcgaccgcgaaatggttgaggttgaggaaaagatactccttaagaccttcgcaaaatacggcgccgaggacttaggtgatgaatacggcaaaaaatggtgggaggagaagattaccttcttctatcccggtcatatgatggacattccgcaaatgttcggcacaatggacacgatagccccctacggtaagattgaagaaatctactacgctatgaaagaggctattgaaacaaacttccctcaggcaagatttattgcgcatttctcacattggtatgagtggggcgcaatggtttacgaccgttttattatcgacggtaaggacgttcccgaggatccggttgaggcattaagacttcaccaggcggtttggacctgcggcgttcgcacagcgctcgctcacggcggagttgtaaacgaccaccacggcgtaggcatcaagctcggcagacttatgaaggagcagtacggccccgcaatgcaggtatttgaaggacttaagaaaacgctcgacccgaacggcattatgaatccgtttaagttaggtctttaattaggaggaaaaacaaatgaatttatctgaaaaagctaaacaacatgttgattcctgccgtttctgctggatgtgccatcacatctgcccgataggcaacgcaacgggacacgagagaagcaccgcccgcgcacgcgcactcggtatctcccttgtaaaccgcggtgcgattgatttatccgaaataatggacaatatatatgagtgctgcacctgcggcggctgtgtaaacgtctgcgttacaggctgggaccctgttatgttcgcaaaggaggtaagacttaaggcggcgcttgaaaacaagcttcccgattacataaatctacttgttgataactgccttgatacaggcaatgcttacggcaagactgctacttgtgagactttaaccgcatctattaaggctcatgctgataaaaaggatacacttcttttcttgggtgttgatgctaagtttatggtatgtgaacaggcaaacaaggctatcaaggttcttgaaaaagcaggtgttgatttcacggttcttgaaaacgagcccgcatcaggcgttcagcttgacttccttattggtgctgctaatgagaccaaggctcaaatggaagaatgtgcaaaggctttgggcgaatataaaaccgttgttgtgtacgatcctaacgacgctaaggcaattaaacagatttacaaggaatacggcgttgaagtaaatgcaaatgttgttacatatacttcttttgttgcgggacttttgaaggaaggcaaattggcggctaaaaacagcggtaaagcagttgttttccaggatccgtatcagctctcccgcgaccttgaggaaacagaagaaccgcgcgaaatcgtaaaggcgtttgcagagcttcacgaattattccttaaccgcaaggaaacaatttgggcgggcaacctgcttatggcggagtatattcccgatgttattgaagaggttgcggcgcgcagaatctttaacgccgaaagcattaatgaaagcgttatagtcaccgcctgcgtttcggaatacgccgcccttaaatcggtaaatcaggataaggttgagattttatctcttgaagacttaattttaggtgaataattatgttggttaatttaaaaaagattatcgctatggctgaagaaggcggatactgtattcctgcttttaacgtttacaacaccgaaacaattatgggcgttgtagccgccgccgaagaagccaaagcacctgttattattcaggtatatccccgccttataaaccaagaggtcggattttatttagcgcccgccattgttgcggcggctaacagagcaagcgttccgatttgtttccaccttgaccacggacccgacgaatcaagcgcgcaaaaaatactgcgctggggtgctacaggcattatgtatgacggttcggtgcatccgcttgaggaaaacattgccgttactaagcatattgttgatatttgcaacgcagttaatgtaggcgtcgaaggggagctcggtcatatcggcagtgtaaacgacgacgcaatggatgagtttaccgaccccgatgaggcggcaaggtttgtcaaagaaacaggcgttacctgccttgcggtgcttatcggcaacgcgcacggacattataaaaagccccccaagcttgatattgaaagggtaaaggcaataagaaaggcaacaggcaatattccgcttgtccttcacggcggttcgggaattcccgacgatcaagtgaaagccgctattagcgcgggtgtccgcaaaatgaacatcggcaccgacgtttgctgtgcctttgcggagggagctaagtcggagcttgacaacccgaacagaagccttgcggttgacctctttatgaagccgtcaatcgagagtgttaaaaagctggctcttaacaaaatcgccttgacaggcgctttgggaaaggcgtaagatatgagtaaaatcgtaggaataggcgcctgcgttatggatacgcttgtaagcgtgccttattacccgaatgaagatactaagcttagagccgaaagctctaagcaggcgggcggcggtcctgttgcgacggggcttgtcgccgcggcaaagttagggtgtgaaaccgaatacataggcgtgctttcggacgacgcgggcggacgctttttaaaggacgatttcaaaaaatacggcgttgggacggataatatcacggtaaaatcgggtcaccgctcctttacctcggtaatctggctatccgccgaaacctccagccgcacctgcgtgtttgacaagggcgatttgccgccgcttgagcttaacgaaaagcagatgcagtctgtcaaaagtgccgagcttttaatggttgacggaaatgaaatgaacgcggcggtagaagcggcacgaatcgcccgcgaaaacggcgtaaaggtgctttatgactgcggcggactttatgacggcgtggaaagactgcttgccttgacagatataatgataccgtccgaggaatttgccatcggtcatacaggcgcttcttcggcagaggaagcggcaaagaagctttacgaaatatataagcccctgattgttgtcgtaacgcagggaaaaaagggcgggcttttatatcagggagacggtatagtttattacccgatttatcccgcaaaggttcttgattccaacggctcgggtgacgttttccacggtgcctttgcagccgcggttgtaaagggatttgactacgaaaagtgctgtcatttttcgagcgcagtatccgcaataaaatgtactaaagtaggcgcaagagaaagcgtgccagactttgaaaccgtaaaaaaatatttaaaggagaacggttatgaactataaaaagacatataaaccgactaagggctataccccgataagcaaaatcggcgaatgttccttaaaaatgctggaattcggtatgattgagcttgacggcggcgaacatttggaatacaatacagaggataaggaaaccgcttttattatgctcgagggtcactgcgacgttgcctttgacggtgtaaagtgggagaatatcggcaacagaagtaccgtttttgaaaacagaaaggcggaaagcttttatatgccgcgtgagcaaaagctcacaattaccgcaagagaccatattaaaatagcggtatgcgcctctttaatagacgagaagaccgagccgcaggtgctaagagaggatcatgttgtattaaagcttttaggcgaggtgccttaccagagggaaacgagctttattattgacggaaattcaaacgcaaagcatcttaccgtaggtgaagcatatgtcaccgagggcaactgggcgggctttcctccccacaagcacgatgaggataatatgcctaaggagtgcatagccgaggaaatctactacttcctgtttgaccctaaacagggctttgcggttcagtgcctttacacggcggacggcagtgttgacgaggcttaccgcgttaaaaatgacgagctggtagaatttccttacggctatcatacaacggttgctacaccgggctatcagacatatttcctttggcttatggcgggcgatcatcagggctttaacagaagctctgaccccgaacacgcttggattgaaaatgggtagttttgtttcggtagagatatgcttttcggcatatctctactgtgctaataaaatattataaaaaaagagtgggtttataatgattaggctgaaaaatgaatttttaacggcaacctttaacgaagtcggagcagagcttaaaagtcttgtcttcggcggaaaagaatatatctgggaaggcagaagcgaagtatgggcaggctcgtgcccgcttttgttccctatatgtggcggacttaaggacgataaatacacatttaacggcaaggaatacacccttaaaaagcatggatatgcccgttttataacctttgagattgagaataagaccgacagctcggttgtgtttttacataaatcggacattgatacaaagaaaagctttccctttgattatgaattaagggtaatctatacacttacagataaaacggttaagatagattattccgtaaagaacctgaccgacggtactatgtacttcagtataggttcacacgagggatactatacgcccgagggaatagaggattatgatgtaatattcccgcaaaacgaaaccctgggcacctatgtcccttacggaaatttactttcaaatcaagaactgcccataataaaggacagtaacattcttcctttatacgataaatattttactgttgacgcgcttatttttaaggatttaaaatctaagtctgcgacccttcgtaacagaaaaacaggaaaagcagtacgggttgatttccccgacgccgattatttccttttgtggcacaaaccgaattctccgtttatgtgcttagaaccgtggagcggaataccggatattgtcggcagcagctacgatataaccgaaaaagaaggaataatcccccttaaaagcggtgcagaatataa

SEQ ID NO: 3892 - DNA, 32759 bp, Unknown
  16S sequences of unknown bacteria
catatgccgatgtggctcaattggcagagcagctgatttgtaatcagcaggttatcggttcgagtccgatcatcggcttacagaactcaagaagttctgaattaaataatttatggatggattcccgagtggccaaaggggacagactgtaaatctgctgcaaatagcttcggtggttcgaatccacctccatccattttctatctgatgagatagagatttctaaatttaatatcgcgggatggagcagtctggaagctcgtcgggctcataacccgaaggtcgtaggttcaaatcctactcccgcaactcggtaacttatttactgaaaatcatatgcccagatagctcagttggtagagcagaggactgaaaatcctcgtgtcactggttcgattccggttctgggcattctgttttcgaacagatgacagatgggatactagctcaggtggtagagcacttgacttttaatcaagttgtcccgggttcgagtcccgggtgtctcatggaagagaagaagatcatgatgggtgatcttctttttttgtattacgaaataatatcagatgtgaacagcgattatgaaaaacgtgaggtgagcatgtgaagatagcggttgtagatgataatgagagcgaacggacaaagctttgcactcttttgcgggaatggggagaaaagcgaaagtatgagatggtatgtaacgaatttacagatggcaaagattttttaaaagcttctggaacgtatcaggcggtatttctggacatctatatggagaagctgaatggaattgataccgccagaatgcttcggaaatatgataaaaattgtaaaattatttttatgacaatcagtgaggatcatcgggcagaggcatttgaggttcatgcatatgattatctggagaagccggttactgcgctgcaaattgagcgggtgctggcagatcttttggaaactcagacagaagatcaaagctatctggtactttcagctggcaggagtcaggttccggtgattctttcagagctccggtttgttgtatcagacgccaattattgtgtgatacagactgatcagaaacagcgtgtgcgtattgttttttcggaactggaacggatgctctcctgcgagcggaggtttttgaagattaacagaggaattcttgtaaatcttgattttgtgagcagtatggaaaatagaatctgcatgatgcgaaacggggaacagtttccgatgaattcaagacgtgcagatatacttcggcaggaattggtatactatcgttttgaaaagagaaacagacagctgtcgcgaaaggcagaaaccgggaaaatacaggagcattttgtgaaaaaggaggcaggccgggtacagacaatggaaataagaccggagagaccggcacaatgcctgcctggaaaacggatatgaatggggcgatgatgcaggaattgctgattgcggttggagaatggttctttttttatattccggcagcaataattgcaatagcaccggtgataaaatggatgcacgagccggcaaaaagaatgtttcccttcataatgggaattttgtgtgctgtctgtgtggtatgcccaatgctaagtgtttttattgataagcatcctatttatggtctgattgatgtatcgtttgttacagtattgctgttattttatttgctgcttatcgatctggaaaaggtaaagctgctgtatctgatcatttgtgatatgacgttgatgtcttttggcgggctggtctatcatattacagcggcggtatttcatccagaaggaacgatgcaggattcatcaggctgggggctgcttgcacagataactgtaaatttattaatcgttctgtttttctgtgcggtagtccgaaaaaagctgacgtgggtgatcgaaaattttcataatacgacagtatgggctattgcgggagtgatccctgcgattattttattttgtaattatatgatggttccaaggtattatagtacgatcaagtttcggcgtatttttcgaatttcagttgtattaattgttacattgtttgtgctttttgttacactgcagattatgttgtatcttattattcgttacctggttgagaagtacgaaatggatcgttctgcttatatgcttcagatgcaggcagaacagtataaggtgctgaaacgacatctggaggagacgaggcggatgcgtcacgatttcaggcagatgatttattccatcagggagcttgcagaacggaaggattttgagcggctgcaggcttatatcggctcattctgtaaggagtacgcaggtaaatgcagggcgttttgacttttgcagaaatacggccttaaatgcgcttctggcacattatgcagcgagggcagaagagctgcagatagatataggagggtggagttttgagattgcggaatctgagcgtatttcggatattgatctgtgtgtgatttttggcaatattgttgaaaatgcaattgaggcgtgtgaaaaggtaagaattggcgagcgctatattcagttgtctgcggatcgcgaagagggtcagtgtctgtatattacaatggtgaacagctcggatggatgtagtataaagaaaaaagaagtgttcttatcaagcaaaaaggaaaaaagtgggattggactttcttcggtgaaaatgcttgcagaaaagtatggaggacttgcagaatttcatgaagaaggaaatgaattttattcgaatatcatgctgaagctgtaagtgaagtagcaaatagaataacttagagccagaacagagtttttatcccagaaaatgatacttcctcccaacttaattgcaattggaaaaaatttcgtatatactttggaatatcttcgggaatacaaagagagatcagaaaaagaaaggctgatcagtcggtagacctgcaggtagagtaaaagaaagattatgtggaggtaagatttatgaagaagaaactttttgcattactgatagctggtgtcatggcaatgtctgtgaacgcttttgctgcagagacagaactgacagaagaaatgacaactgagagtgcggcagataccagtacagtagtacttcaggggctggatgataatggaattacatggacgcttgcgctgaatgcggagaatgctatgggatgtgttgcgctgacaccggaaggtgatgagacaacatatattacaggagcgcttgcatttggtgatggcacatttacaatcacagatgaggaagacggacaggattacgaatttggatatcaggatgtttcacagacagaaacgatcctgacgtatgagccaactgattctgaagtaaagcttgcagtggttgatcagagcatagtaaacgagaatccgaactattctgtttatgcggggattgaaccggacggtacacagattacaatgggattcgactgggacaatctggaaatggcaattgatgagagaagtgaagaaggacaaaatgcattaagcggcacatttacggtaggtgaagatagacagaccgtaacctttacgactacggaaggcgctgaggtttcctttactgttgtagatgtggaaggtgtggacaatcagatcgatgtaacgctgaatgatactgtaattcgtctttctctggtggatatgaatacattgaagtaagactgcgtgagcagaaagagctgcaaaaaagagattgtaaaaaaagattaagaagaaatctaagatgtactggtgtcacagcaaattcagagggtatgccgaaaaaaggcatgcccttttgtgcgttttgtggattctgtgaaaatggattgacattttatataccgttcggtacaatacgaatagaatcaataagaatgactgataaaagtgaaaacggatgagaaaggagtacgcctgtggaaaatagagaaatgatcatgcggtgtgcaaagacactgttttatgcaaagggatacgatgccgtgggcgtgcaggaaatagtggataaagcaggagtcacgaagccgacgttgtattattattttggcagtaagcttggactcttaaagaccttgattgaagaaacttttcaggagtttcgaataattctgcatgaagctgcagatatggagcagcggattgaagagactttgtatcaggtggcgcatagatattgcatgttttttgaaagcgatcgtgagttttatatgctgtttatggcgctgttttattcagcaagagaaaacgaagcctatcaggcagtaaaaccttatgtggcggagttttatgatatgattgttgatgtatttggccgggcggcggatcagcttggaaatatgaatggacgtcagcgtcagtttgcgatcggatttatcggaacaatcaatcattatctgattcttcagtttgaagagggggaggaaaatggagggaaaattcaggaagaagagatcgatgcggtagtgcgccagtttatgtatggaattttttcgtaaaggaaaggtagacgcttcgggcagagctgccgcaggaaatataataacaggcaggaaatcaatataataacaggagatatgaaaatgagcaaatggtatgacaatacagtattttatcatatgtatccgcttggaatgagtggtgcaccgtttgaaaatcgcgaggagaagacggtacaccgttttcaggagctggaaaaatggcttccacacatagcaaagcttggatgcggtgccgtgtatatcggaccgctttttgaatcgactacacacggctatgatacaaaagattataaaatggtagacaggcggctgggggataatgaagattttaaacgatttgtaaaagaggcacattcactgggactgcggattgtggtagatggtgtattcaaccataccggtcgggaattttttgcattccgggatattcagctaaaccgggagaactctcgctattgcggatggtataaggggattaattttggatggaataatccatataatgacgggtttggttatgaagcatggcgcaattgctttgaactggttaatcttaatctgcagaaccgagaggtaaaggattatctgtttgatgtgattcgtttctggatccatgaatttgatattgatggtattcgcctggactgtgcagattgtctggattttgattttatgaaagaaatgcggtggatgaccggtcaggaaaaagaggatttctggctgatgggagaagtaattcacggtgattatgcaaggtgggcaaaccaggagatgctgcactcggtcacaaattatgagctgcacaagggattatattccggacataacgatcataattatttcgagattgcacatacgatccgtcgccagttcgatgaaaacggaggtatttacaggggacgcgtactgtattctttcgtggacaatcatgatgtggatcggatttattccaagttaaatgataaacgccatttaaggccggtatacacgcttttgtatacgcttccgggtgtgccgtccatttattacggttccgagtggggaatcgaagggagaaaggcaaacggtggagatccggcgctgcgtccacatcttgtgcttgaggaaatggagcgtcatccgaatgtgccggaacttgcagagtttcttgcattccttggaaaatgcagaaaggaaaatccggtgattgcagagggaaaatatcgtgaacttctgctgatgaaccggcagtatgcatttgcaagaatcacagataatgaggcagtgatcgtggcagttaataacgatgaaaatcctgcagagctttacgttccgattccgattgcagcggagaaaattacagatcttgaatcaggacaggctgtaaatgcagaaaacggaaaggtgaagattcatctggaagcaggaggaagtgcgctgctgaaagtaaattagaatgtacgctttactaagaaaagaagataaaggaatccaaatggataaagtggcaaaataatgcaggaggagagggtaattatggcaggcagagcaaaggcagcaacggaaggtacgaaaaagacggctgcagcaaaaacagcatctacaaaaacagcggcaagaggagtggcaaaatcaaatacagcaggaaaaaaggcggcaaaagctccggtgcaggaggagtatctgatcacagagctggatcagtatctgtttgggcagggaactcactatgatattttccgcaagctgggtgcacatccgatgacttggaaggggaaaaagggaactgcgtttgctgtatgggctccaaatgcaaagaatgtgcatgtgatcggtacgtttaatggctgggatgaaacatctcatgaaatggaacgcagagagccacttggtatttatgagctgtttgttccggggatcggagagggagagctgtataaattcctgatcgaaactccggacggaagaaagctttataaggcagatccgtttgcgaattcggcagagctgcgtccgggcacggcatcaaaaattgcagatatttccaaaattaaatggtcagattctgcctggctgactgcacgggaaaaatttgtgcaggatgaaagtccggtatcaatttatgaagtacatccgggcagctggaaaaaacatccgcacggcgatgacgaaccgggatactataattatcgtgagctggcaccggaactgacgcagtatgtgaaggatatgggatatacacatgtcgagctgatgggaattgcggagcatccgtttgacggatcctgggggtatcaggtgactggatattatgcaccaacctcccgttatggcacacctgaggattttgcgtattttgtaaattatctgcataaaaataagataggtattattcttgactgggtaccggcgcatttcccgcgagatgagcaggggctggcaacgtttgacggaacatgcctgtacgagtacgcagacccgcgcaagggtgagcatccggactggggaactaaggtatttgattatggcaaaaatgaagtgaaaaatttcctgatcggaaatgcgatttactggattgaacagttccatatcgatggactgcgtgtagatgcggtggcatcgatgctgtacctggattatggaagagagaatggacagtgggtaccgaacaagtatggcggaaataaaaatctggaggccattgaatttttcaagcatttaaacagcttgatggtagggcgttatccgggattgatgatgattgcagaggagtctacggcatggccgaaggtgaccggaaaggcagaagacgacggacttggttttacaatgaaatggaacatgggctggatgcacgatttcctcgagtacatgaagctggatccgtatttccgtcagtacaaccataataagatgacgttcgccatgacgtacgcttattccgaaaaatacattcttgtactttctcatgacgaggttgtccatctgaaatgttcgatgctcaataagatgccgggtgagtatgaggataaattctcaaacctgaaggccggttattcctttatgatggggcacccgggcaagaaacttctgttcatgggacaggagttcggacagctgcgtgagtggagtgaggaacgcgagcttgactggtatctgcttgcggaggagaagcacaaacagctgcagaattacgtgcgagcactacagcatctgtatacaaagaacaaggcaatgtatgagctggactgcagaccggagggctttgagtggatcaatgccgatgactgtttccgcagcattttcagctttgtgcgccacagtgcagatggaaagaataaccttctttttgttatcaattttacgccggtagcaagaccggattaccgtgtcggtgtaccgaagcgtaaacagtacaagctgattctgaacagtgatgatgcacagtttggcggaagcggaaagcttcagccggaggtatacaaggcagtgaagagtgagtgcgacggaagaccgtattcatttgcgtatgatctgccggcgtatggagtagcagtgtttaaattctgatcggagcggacttggtgaaaagatcgactgcgtttatgaactatcacagggaggctcccgtttataggtggatttcttatgatcctgcaagtcgcgaaacggattgtaactgccgcctgagacaggacatcaggaaaatagaatgacagacaggcatggcctacagtgaaatggaaactgtgggctgtgctttttgttttgtaattgccaaatttagaaaaatagtttatagtaattatatatgcgcaaatacttggaaaaggacgtgaaaatacatgatatccagccagattttacagaatacaatcgatgaactgcacacgatcacaagagttgattttgccgtgatggacgtggagggaaatgaagtggccaccacgatgcagccgggttttgtacagcagcaggctgcagtacagtttgcgaattcaccggcagacagccagattgtgcagaacgcacatttctttaaaatatacgatgaaaaggcactggagtacatcttagtgtcaaacggcacctcagaggatacctacatgcttggccgtgtggcggtcagcgagattcagaatctgatcgtagcctacaaggagcgatttgataaaaataattttatccagaacctgcttctcgacaatatgctcctgatcgacgtgtacaaccgcgcgaagaagctgcacatcgatacggaagtgcgccggattgtttacatcattgagacgaaatacgaaaaagataatacggcgatggagatcgtcaagggacttttcagcagccggacgaaggattttatcactgcagtcgatgaaaagagtattattttagtgcaggagctgcgcgagggcgacgattacgaagaggtggagcagaccgcgaaaatgctgcgcgacatgctcaacaccgaggcaatgtcgagtgtgcgcatcgcttacggcacgatcgtcggagagatccgtcaggtatcgcgctcttacaaagaggcgaagatggcgctcgatgtcggaaagatcttttacatggaaaaatcgatcattgcctacaacacgctgggcattggccgcctgatctatcagctgccgatcccgctgtgccagatgtttatgaaggaagtcttcacggagacgatgccggatgcgtttgatgaggagacgctgacgacgatcaataaattctttgagaacaacctgaatgtatccgagacggcgcgtcagctttatatccaccgtaatacactcgtataccgtcttgaaaagctggagaagagcacgggacttgatatccgtgcgtttgacgatgcactgacattcaagatcgcaatgatggtagtaagctacatgaagtacatggagcagcaggtgtaaaacgtgatgcaggcagtaatatttgatatggacggcgtcatttttgattcggagacgcttgtccttgagacctggaaagagacggcgagacgccatggcgtagcaaatgtggagcaggtgtgccgcatgtgtctcggactgaatgcagcggcctcaaagaaggtatttctggagtattacggtgcgaattttccgtatgaccgctataaagaggagatgggaagactgtttcatgagcgcgcggatggcggcaggctgccgcagaagccgggtatccgtgaacttctcctgtttctgaaggaacaaggtatccgcacggcggtagcatcgtctacaagaagcgatctggtgcgaaaacagctgtgtgagggaaagcttctttcattttttgacgcggtgatcggcggagatatggtagagagaagcaagccggagccggatattttcttaaaagcgatggaaacacttgctgtaagcccggagcagtcctgggtgatcgaggattcctataatggtatccgtgctgcggcaaaagcaggcgctgtaccggtgatggtgccggatcttgcaccgccgacggaggaaatggagcagctggcgaagtatattctgccgtcacttacggaggtgcgggaggagattgagaggttgtctggaggtgcggatagaaagcggccgattccaggcagataaagaaaatatgtaactgttcagagccaagcaaaatttcataaaacaggcgtaaaatgctcgcatttttaagcctgtttttgaaattttatttggcggatacgccacaccgacgaaatgcgtagcattttggaggttggctctgaacagttacagaaaatattatattgcaaagagcgttggcagattgcaaactggtaaacgtaataattcagccagcttatagcaatacaataaaataatgcaggcaagacgatttggcagagtacgaaagacaaggatgaaatctgcaggcgtgctgacgcacggcaaagatttctggcgcagtatttcacgctctgatagatcggatggaatgcattattttgcagaattgctatagattgtgcttataacagaactgattggcaaacaggtgattaggtatctctgcacgaatcagacacagaaacgaaaggtgtctcgttcgtgcagggatctttttttatgtaaaaatatataaaacagcacttattatatttatatacatttcacaaagatgaataaatgcatcataatacctttacaaactaacaaaaagtgatatactacatatcacaaagaaacaagaaaggagagatgaagtgagaacggcagcgataacgggattgctttgcatgacgatggcggcgatgctggcggatctaaaaacgggaaagatcccaaacggactgatcgtggcgggtgtggcgatgggcgtatcttatcaggtactttctgagggcgtggcgggggttctggtttttgcaggcggactgcttttgccgctgctgctgatgggcggcctgttctattttcgaatggcgggcgccggggacatcaagcttctgtgtgtgaccggcgggtttctgggtccggcagacggatttcgaacattgattgcttcgattctgatcgcgggtgtgatttcggtgtggatcatgatgcggcagaggaattttaccggccgaatgctgtatttcgtggaatatgcacagcggcgggcagcgggagcgaaatgggaaagctacatggcggaggtgccggaaagtgcaaaattttgtttttccgttcctgttttcttaagcgtacttgggtatataggagggattttttgaaaaagagtatttttgcggtctgtgatcttgattcgtcatatgcgtgcaatctcatggactatctgaatgaaaaaagaagtacgccgtttgaagtacaggcgtttacaaatgtggagagtctgaaggaatttgcatcggagcaggagattgaaattctgctgatctccacgcgggcgatgtgcaatgagatccgcgagcttccgatcagccgggttgtgatcctttctgagggtgagcagttccaggagacggatctggagtatccgtttgtctataagtatcagtcttcggatcagctgatcagtgaagtgatggagtattatgccgggacgaatccgagtacctgcctgcttacaacgacggtaaagacgaagctgatcggtgtgtactctccggtcgggcgaagcggaaagacttcatttgcgctggctctgggagaaattcttgcagaaacgaagcaggtgctgtatctgaacctggaggagtattccggttttgaagatctgtttgatctgcattatcggacagatattacggatctgatctactttgcgaggcagaaagagggaagcctgatctacaagctgaattcggtgatccagtcatttcattcgttgcagtatattcctccggctctgttttctgcggatctgcgcgatgtttccggcgaggaatggctggcttttctgaaagagatcatgacgtactgtgagtacgatgtgatcattctggatattggcagccaggtggatgagctgtttcagcttctgcagaagtgcgagaagatctatatgccgatcgcgcaggatgcggcggcaaaagcaaagctggctcagtacgaccggcttcttggaatgctggatctgcgggatttatcagaaaagacaaacaggattacactgcctgcggtgcgtgtgcgaaaagaagacggtgacgtcacacagcagcttgtatggggagatatggggaaatttgtgcggcggcttctctgggaggaggaacagatggattcatgacggaagaaaaatttcaggagatgcggcggacgctcatagagagactggagggataccgggaaatccaggatgaggaaatctattatcggatcgattcattgatccaggaggcaggggcggaatattatatccggctttcggaccgtaatacgctgcggagagagctgttcaattcaatccggcggctcgatgtgcttcaggagctgatcgacgatgacagtgtgaccgagatcatggtaaatggcacagagggcatttttgtggagcgcgccgggcagctgtttgaatggggaaaaaaatttgcctcacaggaaaagctggaagatatttctcagcaaatcgttgggaagtgcaatcgtattgtaaatgagtctgttccgattgtggatgcacggcttgataacggcgcacgagtaaatatcgtgatgcctccggtggcgttaaacgggccggtgatcacgatccggcggtttccggatcatccgatcagcatggatcagctgatccgctggggtgcggtttcacaggaagttgttacatttctgcagatgctggtgtgcgcgggatacaacatttttatctccggtggcacaggctccggcaagacaacatttttgaatgcgttgtcgcactatattccgaaagatgagcggatcatcacaatcgaggataatgcagagctgcagatccagggcgtagcgaatctggtgcgtctggaggcgagaaatgcaaatacggaaggaaagatggaaatctcaatccgcgacctgatccgttcgagcctgcgaatgcgcccggaccggattatcatcggggaggtgcgcggcagtgaggcggtcgatcttctgcaggcgttgaatacgggccacgacggttcgcttagtaccggccatgcgaacagtccggaggacatgctctcgcgtctggagacgatggtgctgatgggaattgagattccgcttccggcgatccggcgtcagattgcatctggaatcgatgtaatcgtgcatctgggccgtatgcgtgaccgttcgagaaaggtactgcaggttctggaaattttaggatatgattcagctgtcggagagatcaggacgcgtgtgctctatgagtttgaagagagcggtgtggatgaaaacggaaagatccagggaagtctggtgaagaaggcagagatcagcagaaggaagaagctggagcgggcggggtaccggatggaaagagaataaagatttttgaaaagaggaaattttgacggatcagatgacaacagggaatgaaaggtgcgggaaagtggtggataaaagggagagcaaaaaacggaagatggaagaaatctgcgaaatgaaagggaagacagaggatggcagagaaaagaatacccaccggaaaagcggagagccgggtaagaagtgagctgcggctcgattatacaacatatcgcttctcgaaaaaagaaatcgcgcagtacgcggcaatgtatctgatgctggatgcagcaatcagctatctgttcttttattcgccgattgcatttttcgttcttctgccgggattgtggccgtttttaaaagagcagaaagtttcactgaaacgaaagcgggagagtgagatgcgcaggcagtttctggatggaatccagatgacgtccgcctcccttcaggccggttattcggtggaaaatgcattccgggaagcggctggtgagctgacacggatttataaggaggacgaatttattctgcgggaatttcggattttgagtacgcagatggatgtgagccggaacatcgaagatcttctgatggatcttggcaggcgcagcggtgtggaggatatcatcagctttgcggaagtatttctgacggcgaagcgaagcggaggggatcttctgctgatcatccgcaacacagcatcctgtatccgtcagaagcatgagacgatgcaggagatcgagacgtgtctgtccgggaaagtgatggaacagaacatcatgagtcttgtgccggtgctgatcctggcgtatgtcaaaatttcttcgccggaatttctggatggcatgtatggaaatctgaccgggacggcagtaatgacagtctgctttgcagtctatgtcatcgcctgtctgtggggaaaacggatcgtgcaaattgaggtatagtgtgaagaaaatcagaggattttacgaaaagatgggtgcgtttctggtcgatctgtttcaggcagatcagccgggaaaggggaagcaggagctgcaggaagaactgacggcacttcgcaccggaagtaatgagacggtgaggtcctattacatccgtaaattttctacagtgctgatggtgctgacgatcggggtggttttatccattgtgtgcttttttggctacgcgggaaaaacgtcagatgtggaagatcagaccttaatgcggcctggctacggggaaggaaacagacaggaggaactggcggttgaggtagatggaaaggaggtgcgtcagcttgagataacgatacaggaacgaaaatataccgagaaagaaaagcgagaactgacagagcaggcaattaaagaactggaacagattctgccgggacaaaataagtcgctggatgaggtacgggaagatcttgtatttccggaaacgctgatggatggagcggtgacggccagttatgtgacgacaccgtacggaattgtggatgagagcggtgtgctgctggatgtggagaaggaagatggcgtactggtggaaatacaggtgacgctcacctgcggcgaaaatgagatgcgccatgtggtacatgcaaaggtatttccacggattctgacgcaggatgagcagctgcagaaggaaatcagaagagcagtggagcaaagggatgcaaaggaaagccatgaggagacactggaattgccggggaacgtagatggaaggaggcttgtgtggcagtaccaggaagagaacccgtttgcgacggtatttgcgcttgccctgatcgcagcagtgcttgtgtatctggaaatggacagccgggtgcatgcgcgggcagaagatcgaaaaaatcagctgatgctggattatccggatctgatgtggaaaatgacaatgctgcttggggcggggcttacgatcaaaggaacgtttcagagaatggcgaagcagtattacagggacaggcgaaagctgaggtatgtgtatgaggaggtattgtatacctgcagagagatggagagcggcgtttcggaggcggaagcatatgagcggtttggcaggaggtgcggacttccggagtatatccagctcggctcagttctgtcgcagaatctgaaaaaaggtgcacgcggcctgacagcacttctggaggaagaagcgctttcctccatgacagaacgaaagaacaatgcacgcaagcttggggaaaaggcaggaacgaagcttctgtttccgatgattctgatgctgggaattgtgatggtgattttgatggtaccggcatttctggcattttgaggaatccaatcagagggagcagaggaaaaacaaaacaagagaaggaaaagaagaggaggagcagtatggatcatgtaacggcatttttgaaagaagaagacggagtcggcgtagtggagatcattttgatcctggtagtattgatcagcttggtactgatttttaaaaagcagctgacgagcctggttaagagtatcctgagcaaggcagtaagccagagtaataatgtctgataagagttgaaaacgagtaaactgaaatacaggacaggaaaacagtgaggaaacagaatgcagaaaacaaaaagatgcagtaccaataacagaatatggagcggttcgatcacagtttttctgagtcttctgtgcgtcctgtttttcagtctgatctgtacggcagtggagtcagctagagtccagggggcaaggacacagacggcaaatatagcgggaatggcgacgttttcgatacttggagagtttgaaaagccgcttctggatgagtatgaaatttttgcagtggacggttcgtatggcagcggctcttttaagagtgaaaaagtaaaaagccgtctggagcattacctgacaatcaatacaaatccaaaggatggtgtgttttccgtctggtgttttgacccctggaatctgtcgctggcagatacaaaacttaccggctatgcattgctgacagatgagtttggcgaaccgttttatcaacaggcggttcgctatatgaaggcgaatgcggcttcgcttgcgctggacaggctgacggagtattcggaaaataccagtacgatacagaaatgggaaaaggaatatgaaaggcgaagaaaagaaaacgacggtcagctttccgggttggaagataaaaagcagcagaaaatggaacaactggagtcagaagcgacggagagcggaactgagattgtggaagtgccgcgagccgaaaatcccctgaaagagatcgcgaagctgcgccggaaaagtacgcttgagatcgtgacgggcggaaaaaccgtttccaataaaaaggtacagacaggaaaacttccgtcaaaacacagacccgggaacggtacactgaaattaaaaaaagaaaacagcggatttttggcaaatgcactgttccgggagtatctgatgcttcattttccaaattacttaagcagtgaaaaaacgggtaagctggattaccagctggaatacatactgggcggaaaagtgtcggataaaaagaacctgaagtatgtggtgaaccgattgcttttgattcgggagggaatgaactacctgtatgcgctggaagctccggagatgaacggaaaggcggaaggacttgcggtaacgctgaccggatttcttgggatgccggcgcttacggcagctacaaagcacgcacttttactggcgtgggcttacggagaaagtctgatcgatgtgcggacgctgctggatgacgggaaggtacctctttttaaagatgccggatcatggaaactgacactggaaaatcttggacgcattaccgagattttggagcagggaaataccggaggaacgcaggggcttagctattcggaatatctgagaatccttttgaatcttggctcactgaccgaacagaagatgcgggcgcttgacatgatccagtgcaatctgcgggaaaatgcggagactgcaaatttttatgcagcaaattgtgtggttggaacggaaatgacagggcagtggaagtgcgcaccggtatttttccggattccgtccgtgtttcttggaatttcaggtgaaacgatgacctttgagcagcaggcagggatggcctattaagagaagcggggtgaaaaagaatgctctcatatttcagatttacagcaaaaagtttcgtgaaacaagcactgcaaataactacaaaaaagaaaaaaggaaaggacagaatctctcccccaaatgatttcgaatgttcctcgaatgtcccaggagatataagagcattctttttgactccgcttcgtgcggccatgaccgtggaggcagcactggtactcccgctctttcttttctgtatgacggcgctgatccaatacgggtcggtcatgggtacggcggtacagatcggtaccgcgctgacggagacgggaaagtcgatggcgacagctgcctatgcaatgaaatatggcggggagggcagtgcgccgggacttggagtgagtgcattgtcagcggggtatgcacaccataaagtgattggaagagcagggaatacggatcggattaaaaatgtaaatatggcgctgtcctcttttttacaggaggaggaacagattgatcttgtgatgacgtaccagatcaaaactccggtggcggtcataaaactgccgggaaattttttccttcagcgtgcctgtgtgcgggcctggacagggcgcggtgcacagggaggagacggctccggtaccggaaatgaaaatggacagggagaagtctatgtgactgagtcaggacgcgtatatcatgaagatccggagtgctcttatttaaacccttccatccgggaggttgatgaggatgcgatcggcggcctgcgcaaccgcagcggtgaaaaataccggccgtgcgagagctgcggaggcggaagtggaaccgtatatatcacagatgaagggaaccggtaccaccgttcgatcgattgcagcggcctgaagcggacaatccatacagaggaaaagggcagctgcggtctgcggccatgtttgaagtgcagtggaggatgagaaaagcagggtgaaagatgtttcagaatattgcgacagtaatagtactgataatttgcagttacgtggatatcaggcagcgaaaagtagaaaaaagaatagccggaatttatgcggcagcagtgcttgcaggcaggctggctgaaggtggaactgggctggcaacactttttaccgggcttgtgccggggattctgtttctttttctctcctttgtgacgaggcaggggatcggctacggagacagtatcctgatcctgcttcttggagcttctgttgggatagaagcggagcttgaaatcctgctgctggcatttgcactctccggtatctgggcggttgctttgctttttcgaaagaagggaaacgtacagcaggagtttccgtttgtgccgtttttgctggccggggcagtgctggagatgatatttgcgtgacaaaggcaaacgaattttccggggggagtaaggatgaagaaaaggaaattcgattggtaaaatgcgggaaaaacagagaggcgggatgaaatgcagagcatggggaaaagaaaacacagagaagaaaaagtcggtcaggacacctggaaaggcagctataccgtggaggctgcggtgattcttccgcttaccgctttgattttagctgcggtgattctggctgcattttatattcatgacagaagctgtatgcagggaatggcatgtgagattgcatctgcaggaagcaactgcattacacaggagcagcgcacaaaacgagtggcgcagcttcggcaggaagtaaaacagcagcgatttttaggaagcagaaatctggctgccagtgcttcgagcggaaagacggaagtaaatgcaaagcttgaagcttcgtattcgattcccggcatggtggcacggttttttacgaaaggatcgctgccggtaaagtgcagctggaaaactaaggacatagaacctgcgaaaacaatctggcagattcgcggagtggcatcgatcctcggaggtggaacgtgaaagcggaatataaaagagatctgagggataattatctgatcctgagcgccctggaagaaaaagaagaggacgattacagcatttatatggtcgaaaagaataaaatcccggggctgcttccggtgcatcgctcgcgtatggacggtgcacttctgttaagctacgagatcacaggaaaacagccgctggccagtctgtatgagcaaaagcagcttggctgtgcagatattttattgattttgtcggaacttggagagatccttgaaacgctgcagaaatatcttttaagtccggagaatctggtctttgatccggaatacatttttctggaaccagatggaaaaaagctgtctctgtgctatgctccgggggtaaaaaatgaagtgtcaattcgatccctcgcggagtttattctgcgcaggctggatcataaggatgcgggggctgtggcagccgggtatcggttttacgggaaaacactggaggaaaatttcagcctgcaaagttctttaaaagagctgcttctggagtatcagaacagagaaaccagtggcaaagtgccagagagatatccgcaaaaccagagtgtatatgcggatgaacgaaaagatggacagcaggccgagatatcaaaacgccgtgagggaaataaggaaggcaacatgcgttatgatgttttgccaggatacggagaaaagacacgttatggtgaagcatccggatatgcagcttcatctaaatacagtggggcttcattatacgaagagccggaagttatccataagacgagaagaaaggatcggaatgtttcgaaagaagatttccttcaggagcgggaaggagatgcgggaaaaaacaaccgcggaaaaactgaaaaagaaagtacagtgagaacaagaaatgcgaaagaaagaggcagcgagcggtttgtggatcggatttttcaggctgtacatccggctgtactgctttccggtctttttttgctggcatcactggaggttttgttttacctgggctatttacagttgacagagaccggaggagcgttttttctggtattgtcagtggaactgctgattaacagtgcctggaagcgtgcgaaagaagaaaaacagaaacagaaatttgagcaatgggcggctgaagaagaggatgatgaggaataccaggcgctgatgcatgagatgtatcaaacaccggaagcatctgtgcagccggaagagatcggggagacaagatgcttgtcagatctgaagccggaggaggaactgagactgataccggtacggccgccggaggggagcgattcggtgaatggtggatttccggatattattgttcggcggggcagcgtgactgttggaaagatgcggcagcagtgcgaggcggttctgatggctcctgcgatcagcagaatgcatgcacgcctggaatatcggcagggaatctattatttgaaagatcttaacagccgcaatggcacattcgtaaatggagaacgactgatgccgcaggaggccaggattgtcagccatggagaccgggtggcctttgcggatgttcagtatcgggctgtaaggatgtgagcctgacgaaacgattacacagcagctttgcggtttgtcagtcaaaatccgattgcggcaggctcgcttttacgcggaaccagtaggtgtaaagatcctgaaaaccgagcgaggtataaagagtttttgcataagtattgccttttacaacctgcagatatgctttagaggcaccttttttgcgggcctcggaaagaatggagctgcagattgcgcggccatatcctttgtggcggcagcttgcgtcgacataaatggcataaagccctacgtgaccgcgatccatgatgccaagggcggaggccaccatgcgcccgtcgatctcgatgcttgctacgatcgtttcttttgggattgccttgaacatagacgggacgatacggcgcagcgtcgggttggtagtgccgttcaggcgaaagagagaagtgatccagtcatccgtgatgcggtcctgaaacagcacgatcgtgtcattggggtaaagaagaaaagagggaagtccggagtttcttccataatattcgtactccgcgccgatcgaaggatagcagacaaaatccttcatatccaatgtcataacttcggtgatatgctggatctcataaccctttccatccagcagtgaatcaaaagaaggatccagcagcgggctgatcttaaaaatgaccggcgtatgataattggcatatacagattcgcagtagcggattttttcatcaatcggaatctgggaggcgcccacctgcgtgacactgttggtgcggtgcgtataattatgtgaaaagcggatcagccagccgtcatacagctcgattttgtgggatggccatgcattcagcgagatttcttcaatcagtttaatgtaagcattgttttccgcagaagcctctgtaaaagtttcagtagaatgttccattaaaagcgcctccttttacttttgacctatcatatcatgggagacgcaaaaaatgcaagagatgtcagaaacgcttgatttgcccacgcagaattcctataatgtaagcactatcataagtaagccaagcttacttatgatagtgcttatgagcaagtagcgaagcggattgcgaatagccatgcagtgcatgcaagcagcgaagcggattgcgaatacccgtttggacttgccgaaaatagcgaaaagggggaattctatggaggaaataaagtcatttcttcgttcgaggcagccggtgaacctgatcatagcagcggcaaatattcttgtgtttcttgtgctgagtttttttggagacacggaaaatgctgcatttatggcagcgcacggggcaagtgttaccgcgtacgtggagcagggagagtactacaggctttttacgtgtatgtttttgcattttggcctggaacatcttttttacaacatgcttgtgctgatctttttgggagatgcgcttgaggaggcggttggaaaagttcgctatcttgtgatttatcttggcggcggtctgataggaaatgttgtatcggttttgattgagatacaaaagggcgaatcgatcgtgtcagcaggagcgtcaggtgctattttttccgtaatcggtgcgcttgtatttattgtgctgaaaaaccacggaaatcttgggatctattccggaaagcggctggtactgatggcagtactctcgatcctgcagagcatgacggcgaccggcgtagacaacagtgcgcacatcggtggatttgcggccggatttgtgctggcatttctgcttggtgcggaaaaaaaggcggctgcgcacacagattttgttgacaaggaacgaaaaaatttttaagatagaattatattgtttcatcgaatctgcgaagcagttattcggttaaacacaggaagcagatttaaaggatctgtttcgactacacagaaagaagggattctgatggagaataattgtattttctgcaaaatagcaaacggagagattccggcggcgaccgtgtatgaggatgaagatttccgtgcaattctggatcttggcccggcatcaaagggacacacattgatccttccgaagaagcacgcggcaaatctgtttgaactgccggaagagactgcaaaaaaggttctgccgcttgcgaaaaagcttggtgcgcgtcttgtggagggactgcacgcagaaggactgaacgttgtacagaataatggagaggcagcaggacagacggtgatgcatttccatgtacatctcattccgcgctacaaaaacgacactgtggatgtaaaatgggcgcagggtacactgacagaggatgataaaaaagaaatattgggcctgttttagtgaggctgcagggtatccgcaaatatcctgcaagtgaaagactaagggtagaaaatggaagacaaaaatgtgagttttgaaaagtattttctaaagtacaagaacctgattatccgtgtgatagtagacggttcgggtgactatcagctggcacaggaaatctgtcagctggtatatgagagattttataaaaatatggataaggtcagacccggaatggaaaaggtgtggctgatccgatgcgcaaagaatgcgctgacagatcattatcgcaaggcgagagtaaggcgggaaatctatacggaagatattccgccggcagaagttggaaatcttctgatagaaaagagcatagaccgtcaggaagagcggatcgatcagagagatctggcagggaaaattttaagtgaagtgcgggaagtaaatgctcagtggtatgatgtgcttgtacttcattgtgtggaagaacttcctcatgcagaggcggccagacggctgcaaatctccgagacagtctttcgggcccggctgtgccgggcgcgggcatatatcagagagaatttcggagaggaatacaaaaagctttaaaaaaatggggcagccgctgtttggtggaagccccatttgtaaaagatgctatttggcatttacgatatcttcaatcatggtgacgattgtattcacggcattgctggccgaacttttattcatggcattgatatagtcattccggttctcatacagcgctaaaatatgagagaaaagcacgtcaggagtaagttcctcttcctgtagcacatcgctgaacccctgttttttaaaggacttggcgttgagaatctgatctccgcggctggcagcagcagaaagcggaatcagaagattcggcttgcgcagctcaaggagctcgcagatggcatttgcgccggctcttgaaacgacaacatcggcaaacgcaaacagatcggccagttcctgtttgatatattcaaactgaacataaccggcagtaccctcaagggacggatcgagatttcctttgccgcacagatggatgacttggaatgttttcagcagttccggaagaataccacggatggcctgattgaccgcaacagagccgagacttccgccaatgattaaaagtaccggcttgtcgaacgtgaaattgcagaatttggcggcagccaggcgattgccggagcgaagctcagcacggatcggagagcctgtaacaacagcttttccggcaggaagatacggaaccgtctccgggaaattgcagcagacttttgtggcagccggaatcgcaagcttattggccagtcccggcgtcatatcggattcgtggatgatgaccggaatgtgcagttgttttgcggcctgtacgacaggaaccgagacaaagccgccttttgaaaaaatgatgtccggtttcagctttttcagctggcttttcgcctgaaagaagcccttgaccacgcgaaacggatcggtaaaatttttcatatcaaaataacggcgcagctttccagaagaaataccgtaatagggaacgcccagttcctcgatcagtttcttctcgatgccatcgtaggagccaatatattgaatgtcgtagccaagctcacgcagctttggcatgagtgcgatatttggagtcacatgaccggcagtaccgccgccggtgagtacaatacgtttcataaaaataccagatctcaaatgcggtgaggcatttgaacgcaaacgaaaagtgaaagaatcggtgtttgcattttcctttcacaaagattttctttcacatacttttacttacagtttaatccatgacagaaaaaagtcaagaagggactttaaggtgctatgaaagcaggaaagaaaaagaacagaaatacagcagaaaaaatcacaaagtttccgttaggtccatctgggatggaagacttggaggatacagaactggatgcactgctcgaagaagaactcaagcgggaagcggacgaattggaggctcgtctgaacagagatccaaagctcatcggtgtcggtgcttccgatgacctgtttgccaaaatcgttggttccctcaaagagcagggcgtgtgggaagaggatgagaaagctgtgaaagcacaggaagatgaagccggggaagaagatgcggaaaaatcagaaaagacaaaggatgaagttcaggagacagaagctgaatacgaaaatgggaaaagcagtgcgggagaaaagatagagccggaaaaagaagcagcggaaagagcaaaaagaatggagcagcagtctgtggtagcagcagagaagacagacagagttgtggaagtaaatacgggaagtcctgcagaaaagaaggaagcgaaagctgcagaagagaagacgaaaaaaaggatagaaaaaaatatagaagagaacacagaagaaaatacagcggcgagtgcagacgaaaatacacaaaaaataagaaaaatagaatcaaatgagacagaagaaaagaatgctactgagaatgtggcgttttcagatgataaagaaagagaaactaaatctggttctgaggaagcatattcgcagctctcagaagcagaccgccgtgcgatggaatacggctatcagatgcagcagaaagatgccgagaaaaaagtgcgccggaaaaagcgaagaaagattgcaaagcgagcaggaattaccgcggcagcgctggtggcggtgtttggcgtgagtatgacgagcgacgcgaatcggaagtatgtgctggaggcgtggaatacggtagcggggagtttggggatgcgaacctcgataaattatttggagaatgagcccgtttatttaggagatacaaaggaagaggaggcgcagaaggaaataaaagaaaaattaaatataaaaccgataagacttggctatttaccagaaggatgggagttttcttcatgtgatataaatgaggaaacagagtttggaattttattttatacaaatggagaacagtggcttagcatatatatgaagaaaaatagcgataataatgtctcatattatcaacctgatggaaagcgagagattatagaaacaatagaaaacactgaaaatatagaaattaatttagaaaaaataacaagtaagaataaagaaatatatggagcagcatttgaaaaagatgatgattgttactattgcaatggtgatgttacatatgatgaaatgaaaaaaatagcaaaatatttaatgattttggagaaataggatcacaaataagaatttaattcgttattatttatatctatattaagaagggagggaaaaaaatgaagcttttaaggaaactggtgatagtgttaacagtggttacttgtatattaggaagttttctatcagtacaggcggccgatgatcaacttggtacgatggtagatgggtctgttcttacagataaatctgaggtaacaggaaacactttaccattggcaagaggaacatatttagcctatggaagtgctacacttacagataaaggaagtaaagttcttaatgtaagtggctttacatcgtgtaatcaaacttgcaatcaagtaaaagttacattgcatttacaacggttagtaaagggtacatggacaactgtaacgacattagatacaaaaacggcatataatacaaattatgtttctaattctaaaaacgtaacagtaacaggtggttactattatagaattgctggaagtcatgtagcagttaaaggaaaagtaacggagtctacaagcagtgccaccgacggcatgtgggtcagcaaataagaagcacaccgcaaccgtctgccataaacccgagcatacaataacctgatcgcaagagaaggctatctgctcatttttatagcagacatagcgtcaatgttctattttgccaagcatcaacaatgatgcgacaaaaaagcgacggagagaattaaaatctccaaaagcaacaatacaaaaacagtaaagaaaaaccacgtaactaaaaatcacgtaactaaaaaccaaagttgttatacgccaaattatttttcacgaataaacacaaaacactgaatcagaaaatgcttcatgtcggaaatgggcctccggtgtgaggcattttctgctgtagggggaactgcggtggggtgatgagtgcaaaaagaaagagttgaagcggatattcgcaatctgtgtcgttatctgttgtttatgatcagtcagctgatttggacacagaatacctgacggcttgattttgtgaaaaatgtggaatatacatcaggctttttgtatggataatcagaaggaaaagtgttacaatagcagtaaaaagaactgatatttctgataaattcaaaagagacaagaaaacctgtcgggcaaagaaaagaagagaaggaaagaacaagcggtagcggaaagacgccaaaagtggatctggagagtagatgtgtttggcggggtgactcagaacagtgatggcaatataataaaaatacaggtgaataaaccagaaagagggggagattttatgaagctgacatttctcggggcaacgcatgaggtgactggcagctgttttttgctggaagcgtgtggaaaacgggtgctggtggactgtggtatggagcagggaccggatatttataagaatgaagaactgccggtcaaagcgtcagatgtagatatggtgctgctgacgcatgcgcatatggatcattcaggcaagctgccgctgctttacaggcagggatttcaggggcagatttttgcaacggcgtccacaacggatctgtgtaacatcatgcttcgtgacagtgcgaacattcagatgtttgaggcggagtggcggaaccggaagggaaaaagagcaggacgtgagccggtggagccgctttatgatatggatgatgcgatcggagtgctgaagtgttttgttgagtgcgaatataaaaaagaaattcgaattgcagagggcatgaggatccagtttacggatgcgggacatttacttggatcctcatcgatcgaggtctggattcgggagggagagacggagaagaagcttgtcttttccggggacatcggaaatacaaatcagccgctgatccgcgatccgcagtatctggacagtgcagattatgtgatcatggaatcgacgtacggtgaccggagccatgatacgccggtggattatgcggtggagcttgcgaaggtgatacagaggacgtttgaccgcggcggaaatgtggtcgtaccgtcttttgcagttggaaggacacaggaaatgctgtattttatccggcgaatcaaagaagaggggctggtgaaaaaccacgatggatttgaggtctgggtggacagtccgctggcgatcgaggcaaccaatattttccgcgagcacatgtggagtgactttgatgaggaggcattggagctgatccggcggggtatcaatccgatcggctttgcggggctgaagacttcggtcacgacggatgattcccggtcgatcaatgaagatccgaagccgaaggtgattttgtcggcgagcggcatgtgtgatgcgggccggatcaaacaccacctgaagcataatctctggcggaaagaatcgaccattctgttcgttggatatcaggcacatgggacgcctggccgggcgcttctggagggggcggcgaatataaagctgttcggcgaggagattgaggtaaaggcagaaatctgcagactgccaggcgtcagcggccatgcggataatcagggactgatgcgctggatttccgcttttaaagtaaaaccgcagcgtgtatttgtggtgcatggagaggatacggtctgtgatctgtttgcagaaaggctgataaatgaacttgggctggatgcgtatgcaccgtattcgggcaccgagtttgaccttgcagcaaatgaatttatccggaagccgcagggagtacggattgaaaagacgacagcggtagctgcagccgcaaaggtatcgaagctgtatcagaagcttgtggcggccggtcagcggctggtcggcgtgatccgcaaaaatgagggcggtgcgaaccgggatctggagcggtttgcgcgggagatccatgcactgtgtgacaagtgggatcgataaattaactgaaaattaagcagtggcgggaatctgcctgtattgtgacagggcggttttgcaggaaaataaagcaaatgataaatgaacaggaaggggtgcggaaagcggctggtattttcagtcgctttcgtgtacaataagggagaggtaagtggataagtccccgaatcactggcaagcctgtggataacagcggatgcctggttcagtaaggaagagtgaatgtttaaatttttaaagaagccagtaaaatacgtgaccgcggttctgtgtactgtactttttgcagggactctgaccggctgcagcgttgtggagcgggtgcagtaccagtgggcggacggcggagaggcacactgggaggaagctgcaattgatgccggactgcagacgcaggtggaagaatattattacgatcatctgccggaggagcttcacgaagcataccgtgagatttatgtgcatctcatgaagaatgaagatgagggcagttttttgtcggaggtcagcgtggacgatttctggcgtgcatattatgcggtgctggcggatcatccggagattttctggattgggacgagtgcgcaggtagaagaatccgggctgtcgcacacggtggtatcgtattcgctggagacgacggtagcgcagaaggaccgtgcttctttgaaggcggagctggagacggctgcagatgcgtgcatcgatcagatctcatctgaggcgtctgattatgaaaaaatcaaatatgtgtacgagtacctgatcaatacagtagattacgatgcgaatggcgtggatacccagaatatccagagtgcactgctgtatcagaaatcggtgtgcgcgggatattcgaaagcctttcagtacattctgcaccggatgggtctgttctgcacgtacgttacgggaacgatcacaggcggcggagaccatggctggaatatggtgcgcattggggatcattattattacgtggatgtgacctggggcgatcctgtgtttgtcaacaagattgacggggaaggcaccgacacggtgatcaattataattatctgtgctgtacgcagacagagctgttccgaacacatgtaccgtcggatgcagtggagctgccggagtgcatgtcggacgattataattattacaagctgaatggtttctattatgaaacgtttgattataacacgatctacaatgcactgatgaattcagtctggaacggggagtccagtattgtgatgaaattcggaagcagtgaggcgtacgagagcgcgaaatatgaactgtttgaaaatggaatgctgaccgatccggggcagtatctgatggagatcaacggcgtgacgacgtggaattaccgctatcacacggaagaggagttttgcctgattacgatttactggaaatgaaaaagagaaaacagagaatttttgtaaaattttttgcaaggttctctgtttttgtgtgtataagtatgcgacgatacaaaaaatacaagtattttatgaagttttgcacggtgctgaacggcaataaaattccgggaaaggaggaagcggtggatcacgatattattgaatttcttgcggcgaaggacgagcgggctgtggcgctgatggcggagcggtatgaaaaactgatccggtacattgcggtgacaattttgggagaccgcagcgaatccgtagaagaatgcatcaacgatgtctatatgaaaatctggctgaagggacatctgtatgattttgaaaaagcatctttcaaaacgtaccttaaggctgtgacacgcaatgcggcgctcaatcatctgcgaaagctgaaacggctggaggagctggaagggctggacgagtcggacacgattcagtctgagtatattgactacaggcagaacgtggagcagcagatgatttttcaggaggaagtgcaggcgctgaaccggattttgcgggagctgaagaaaaaagataaggaactggtgcttcgccgtttttactaccttcagagcacaaggcagatcgcggcagcaatggaaatgtcagaaaacgcagtggacagcaagctgtcgcgtctgcgcaaaaagattacgaaacgatacagaaaagaggtgggaaaatgaatctttggaatgaaaaccggctgatcgatatcatgggtcatgcagatccggcgcttctggagggagattttccggagtgcgatctggaaaaggaaacagccctgacgttgacggagcaaaaacacagcagaaaacgcactgtgctggtagctggcgtggcggcaggctctcttgcgctgaccggggtagcacttctggtgggcaggaagcatgagtggatgcggcatgtgcagcgggcagcagggaaaaatatgcatgcggcataagatagacaggaatgcgattcccctgaaaacgcccgctgacgggctgtgaagtgagttgggaaggtttgctttacggcagatataaagaatgaaacagatgcggaaaaggacgtccggcttcgataaggcggatgagggattttttatgcttttttaaagcaacgtatcatatataacaaatcacatgtaatgtaaaagacggatcgcatgtatctattgtgaagagaaatgggaagcggcagtaaagaaaagagatgaccgtgggggattttatcaatagaaggcacgtcatcttgcagggtgcaagagaagaaaaaagaacaatggaggaaacagacatgttagaaaaattaattgagatcgtagcagagcagcttcatgtagaggagacagaggtaaagccggagacagattttaaagaggatttaagggcggattcgctggatttgtttgaactggtgatggcattggaggaagaatatgatgtggagattccgacggaggatctggagaagttgacgacggtgcaggcggtgcttgattatctgaagcagaaaggaattgaggaagcatgagaaaaacagcaatctgtgatctgctcggaatcgagtatccggtgattcagggcggtatggcttgggtagcagagcacaacctggctgcagcggtttcaaatgcaggcggacttggaattattgcggcagcaaatgccccttatgaatatgtgcgcga

SEQ ID NO: 3893 - DNA, 7335 bp, Unknown
  16S sequences of unknown bacteria
ctaccggcttgaccatatagtcatcgatgccggcgcggaacccgcgctgcttggacgcaagatcatccctcgcggtcatgaacaagatggggatctcttcattgagctctcgcactgcacgcgtaaattcgatcttttgatagccatccacgacggcttcggcgatcttttcattcttctgcacgaactttgatcttgccatgatcgttcctcctttactttatccctttgattgccgggatctggcagatgagcagcacgatgcccatgataccgacgacgatgcctgcggccatgctgttccagatcatcgtcatgcacatgccgatgccaaggacaagcgcgccgatgatgcccagcagcaccgtgccgaccgttctggcactcagcttgacgatgaccggcttgccttccagcttgcggcgcaccagcagcatgatgagcaatacgacgagcccgatcactgagatgaccacgccttgattgaacgcgttccactgcggcagcagacacatgcacatgccgatggcaaacaggatgccgccgacggtccccatgatcaatgagatgaaattcttcttttccataaatcttcctcctttacatctcctcaagtctttcccttgcggatgtctctatcgtacatgcacgctgtttgggaaatgcttctgatttgttgagaaaagatcaaaaaacgcaggatcaattatcctgcgcgttttctgactgcggcgcgtgctcgacgacacgcttcagtttcttttcaaatttgacacggggcatgagcacgctggagccgcagccaagacacttgatgcggatatccgcccccatgcggatgatcttccactgctttgatttatgacagggatgctcctttttcatctcgatgatatcgttaagatcatactgtggcacttccatgtcctcgtcctcctttttcatgttcggcatacgcctccagcgtattttccagcaacatggcgatggtcatcggaccgacgccgccggggaccggagagatggccgccgctttatccttcacttgttcaaagtccacatccccgcatagtttcccatgctcatcacggttgatgccgacatcgatgacaacggccccttccttgatccagtcagcgccgatcagctttggacggccgatggcagcgacgacgacatccgcctcagcgcatacctccgcgatccgcgccgtatgtgaatgaacgatggtcacggtggcgtgcttggccagcaacagctgcgcgaccggctttgcccacgatgttgctgcggccgatcaccatggcccgcatgccgctgagatcatcatagccggctgcttccagcatgcggatgacgccttttggcgtacatggcagcagcgcctgcatcccggtcatcatcttgcctacattgaccggatggaaaccgtcgacatccttgccaggatcgattgccatgagcacctcgtttgcttcgatatgcgcgggaagcggcagctgcaccaggatgccgtcaaccgtctcatcggcgttgagccggcggatcacttccagcagcgcctgctgcgtagtgtcttctctcatccggatcgtctcgctcaagataccggtctgcgcacatgctctttccttgttgcgcacataggtcgcactggcaggatcgtctccgaccaggatgacgctgagcttaggcagccttttttctgcttctttcagattctcgatgcgctgccgcagcgtttcacggatatcggcagcgatcgtttttccgctgatcaatttcatcttgctctctccttcacatgatggcatcgctgtcaagccagatggtcaccggaccatcgttgagcagctcgatcttcatatctgcgccaaagatgccggtctccacatgaaaaccgcgctgacgcagctcctcattgaactgatcatacatcttgatggctgtatcgcctctggccgcttccgtaaaaccagggcggcggcccttgcggcagtccgcatatagcgtgaactgcgagatcgataagatggcgccgccgacatcttccagactgcggttcatcttgccgttttcatcctcaaagatccgcaggccggatgccttgtcggccatcttagcaataacggcatcatcgtcgctttcacggcagccgacaaacatcagaaagccttgatcgatctttcctgtatattccccatccactttgcaggacgcatatctcacacgctggatcaacactctcatggtttcattcctccttctgcagcaggaccgcacattgagccagcacgccttcttcccggccgacaaatcccagcttttcgcctctggtcgctttgatggaaacttgtccgatgccgcagtgcaggcaatgagcgatgttctcccgcatcttcatgatgtgaggtgccatcttgggccgttcgatcatgatgagcgcgtctagattgccgatcgcatatccttctgcttccatcatttcacagacttgagaaagcaggaaaagcgaactgacgccgcgccagcgctcgtccgtatcaggaaaatgcgtccccagatctcccagcgccagtgcgcccaggatgctctccgcaatggcatgggtcagcgcatctgcatcggaatgtccgagcagtcctttctcatgcgcgatctccacgccgcctaagatcagcttgcggccttcctgcagccggtggatatcgctggactgtccgattcgaaacataagatcacctcagcgaacattatagcagatttccgataaaaattaatgttgtgatgtgatttctatcttcctgtctgattactatatttagtctttccttatttctcctgatcttcgatcaagagagaggccatgctcgcttcatcgatcccattgcgtctgccatactcgatccagtaatgtctggacgctttgataaacatccatttaggcattggcatgctcacctgtaattcacgatgtcttcctgttgttaccgctctggcaagccgtatgatcgcggcattgaccagcaacgcaaaaggtgtggataaaatggcttctccgctgccgacctttaatactgagccgaaaggatatccttccatatgagcaaaacagcgcatgatcgctaccgctgagtcattttgccaaggttcctgaaaaccacagttgatcagtacagaaagcactggacggtgcgttggcggagcagcagaaagacttttcaagaattcgagcaatatggcaggaacaccatccgcataaagcggaaagacaaataacacatcgctgcaatcctcgaattttcgcgcctgctggacatgatccgcatgaagaagctgcacatgctccgtttccgccttgcatcgttcaccaaagatctgtgcaaaacgagcagaatgagaacgaggagcccgaggactgccattgatgatcaatatctttcccatgcggccacctcctcagaaacgacttgttctaattcttctggaatcgcaaacctcacacgccaccgttcgaaattcatatttttcgcatttcgttcgatcaactgtcggaatacctgctgttcttccatggtaagatcaccatacccgatcatgactgcatccttcacattgacctgacgttgcacatgatgagtctccccttgaacaagatggataaatgcctgctggatcggaattgcacgctccagcatcgtcttcatcaccgtatcataactgccataccgcaccttgcttacataaatgatcttgcggcttctggcgatgagcggatagacacgaaccgcatcatcacgaatgacacacttccccggcgtcttggtccaacatccaaagcagccgatgcatggtctgatctgcagccgggatagatccactattttgacatcgctgccggtttcaggcaagatgatcggtttatcgctcaatatcaatttcatgctttcctcctgctctcatctatagtttttctcatcactttattttctatccatttaatcatctgtcatggcaacatgcaagcaagatgtttttcatatgcccagtaacagatgcgattttgacaaattgacacgaactatcctcaaattctaccatcaaatagtaggaaaatgacaagatcctcattacaataaagatgaaagcgaggtggccatgatgaatcaaaaacagatcggacgatatatcgcagaaaaaagacgaatcaagaaccttacgcaggcacagctggcagagcagctcggcatcagcgacaagaccgtgtcaaaatgggaatgcggcagaagcatgccagattatgcgctgatccagcctttatgcgaaacccttgacatcagtgtcagtgagctcatcgagggcaagaatacagctttgcatgagcggcagctgatggaactgctgcgacgcacccaagaactggaaagacaaaacggcatcttgcatggtgtcatcatgctcatattcggcattgccttgcaggcccttgcaccgcatttcgttggttcgccgatgcaggatctgctctccggcatcatcctgggtctatctgtcggcatccttctcctcggcatatatttgatctttcaggccatgcagaaaccctgatccagctgctggtgtcttcctgatcttcctgatataatcatatcagataaacagggaggacatcgtatgcgcaatcacatcaagatcatctttttcgacattgacggcacactgatcgatatggagcgaaaagtcatttctgaacggaccgtagaaacactctgccgtctgcaggaaaacggcatcaagatctgtgtagcgaccggcagaccgcccatttctctccctgattttcacggggcgcgcttcgatgcgtttatgacattcaacggctcgctctgttacacggaggataccgtgatctaccgcaaccctatcccgacagaggatgtgcacatcatcatcaaaaacgcagcggacattcaccgcccggtgtccatcgccaccgcagagcggatgagcgccaatggcaaagaccaggacctgatcgattactatgccatctcaaaacaagaggtcaaggtcagcgaggacttcacgctgctcgcacagcaggaagtctatcagatcatgatgggttgttatccttcagaatatccgatggtcatgcgtgatgtccgccatgccaagatcgccgcatggtgggatcgagcagtagacatcatcccagccagcggcggaaaagggatcggtgtccagaagatcctggaacattttcagctcagtccggatgaagccgctgccttcggagacggtgacaacgacatcgagatgctgcaggctgtcggcaccggcatcgccatggccaacgcctcagccaacctgaagcaggccgcagatgtcctctgcaaagatgtccgtgaagacggcgtgtacatgtattgcaaagaaaacggtctgatctgatcgatcactagttgagcttcttgcgcatcgatcgatgcgaacgatcggaggagagaatatgcatatcgtaaacatttgtttcagcccgaccggcggcacacagcgaacggcggacatgctgatccaggcgatggccgcaaggtccacggccatcgatctgagcgactggcagatcccgttttccacactgtccctgcaagaggacgatgttgcggtcatcgctgtgccttcttatggcgggcgagtgccaaagccggccattgaccgcctttctgccatcaacggaaaccatgccagggccatcctgatctgtgtctatggcaaccgggccgtcgaggacgcgctggtcgagctgcaagacacggccgaagccgcaggcttccatgtcgtcgcagccatttcggccatagcacgacattccatcgtccatgagatcgcagccggccgcccggatgcgcaagatcagaagacgctgtccgaattcgccggacagatcaagaaaaaactggatgcatgcgatcggtctgtcccaagcattcccggtagccgtccatataaaaaccgcggcgtttcagccatgctgcccaagcctgaccaacactgcacggcatgcggaacatgcgcagaacgctgtccggtccaggccatcgaccgaaatgatcctgcccggatggatgctgatctctgtatttcctgcatgcgctgtgtcgctgtctgtccgcacgccgcaagaaaggcagacgaagagcatctcgccgctgtccgcgctatgctgatcaagacatgccctcagcgcaagtcatatgcgctgtacacttaaatgatatagaaaagcccgtcctggtgacgggttttcttgatccctgatgttcctctttctctgcatgcgtaccgatcaacacagggtcagcgatgcctcattccgcttcccgatcgcccacgctgtttttatagttcgtgcctcattctttcatgtcatccaggatcggcttcaggctgtatcctgtctcggtcagcgtgtattccacccgcggcggaacttccggatagaccttgcgtgtcagcaaaccgctctcttccatcgcgcgcagattagcggtcaataccttctgagagatattgcccaccgagcgcttcagctcgccgaagcgttttgtcccatccagcagatcgcggatgatgagcactttccagcggtcactgatcagcatcagcgtcgtttccaccggacaggccggcatctcttttttcatctgtaacccttccttctctttgatcacacaacgcgcttcaatgcggacatctccatttcccttgcatcgtcctgagctcagcgatcattcagccctgacgcgtctctttggcgtattccttcagggcatccttcactgcccgctttacggtcagatacaatgccgcgatcagcgcaaaaaccgcgatcacagcgattggcagccattccatcctctattcctcccatcattcccatctgttcttctgcattttaacattcgcgctcatcgatgacaagtcagcgcctttatggtttctttcaagtaaccaggccccaaaaaagtgcgtacttctcattccggacacgccgcgtatactgaacactgtaaacagcgaacaagctggtcaggagtgatcgatatgaacaaagcacagatcttgcaggaactgcggaagatcaaagatgtggcctttgccacggtggacagtgaagggagaccgcaagtgcgcatcatcgatgtgatgcttgccgatgaagagaccatctatttctgcactgcccggggaaaagcattttatcatcagctatgtgaaggaggatatgtcgccgtcagcggactgaataaacaatttcagatgttccgcatc

SEQ ID NO: 3894 - DNA, 32759 bp, Unknown
  16S sequences of unknown bacteria
aacccgcctatatacaaaaaaggggcttgggtggctaaaaaatcataggttgatatcccgccccggggactgggcgtttacacatccgcccaccttgccggcttatacgatccgcccaaactgtttttccagctcctgccgggtcagttcaaaacagaccggacgcccgtgggggcagtaccggatatcgtcgttttggagcacccgctccgccaagcggagcagctcggcggggtggctgacatttcccgccttgacggccgcccggcaggcggtggaatggtaaatccagtcgagcttttccaccgccacttcccgtccgcccgccagaaaaccggcggcaatctcctgaatagcggcggggatatcgcagccggtgagcatcatggggacactgcggatgagcagggtgttccccccgaactcctccgtttcaaaaccagccttttccagcaggtccctctgttcagacagggcggcgtattcctcccggctgagcgtcaccgataccggggcaagaagctgctgcggctcgctgtgatccgcacccttgagctcctcgtacagcagccgttcatgggccgcgtgcttgtcgacgaaatagagggatcccttccactgcacaagaatatacgtgcggaaggcctcgcccaaatagatcaccggctccttttcgggaagcagtgcatccggcttgtccggttccgcggatggggccaacgcgtcggcttcccctcccgcgggcggcgggccggcgttttcctcgaacagcacgtccatgtccacacggctgcgcggactgtaggccgccgttcccggatcccgcaggacggcgggcccgccgcctaaaatcggggaacgcctggccgggaacagcggcgccggaagcggtttacctgccggctccggcggcttgtccccggacgggacgggctcttccaccttcgaagcgatctgtccggcgagtcccttcgccgtgagcggacggtccgggcgcgcttcgtccggctttggcggcgccaccggcaccttggcgggcaaaaccgcccgcttgggggcatcccctgcctccaaagccgatttgaccgcgtgatagacagcatcaaacaccggccgttcgttgatgaaacggatttcaattttggccgggtggacgttgacgtccaccgtctccgccggcatggtcagatacagcacacaggacgggaatttccccaccatcagggaacccttgtacgcctgctccagggcggccatggcagtgcgggtcttgacataccggccgttgaggaaaaaatgctgcatggtgcggttggagcggctcgcggagggacggcagacaaagccggtcacccccaccccgccgagctgataccgcacgtcgatcagccccccggcaaactccttgccgaataccgcatagacgcaggaacggggatctccatcccccggggtgagcagttcctcccgcccctcccggacaaagcggacggaaacctcgggatgggacagggcgacccgttccaccacccccgcgacggcgtttgcctcactgacatcttttttgaggaatttcaggcgcgcgggcacattataaaacagatcccgcacgcagatggtcgaaccttggggacagccagcgtcctcgacggcggtctccacacccccttcgatcacataacgggttcccgccagctcgtccgccgtgcgggtgaccagctccacccgggccaccgccgcgatggaggcaagcgcctctccacggaagcccaaggtgccgatcgcttcgagatcctcctcccgccggatcttactggtggcgtgacgcaggaaggcggtgggcacatcgtccctggcaatgccgcagccgttgtcggtgataccgatatacgccgcgccaccgccccggatttccacctggatggtgcccgccccggcgtcgatggcgttttccatcagctccttgaccacggaggcggggcgttccacgacctcccccgcggcgatcagctcggcggtatgcttatcgagcacctgaatcttcggcatgaggctcctcctttgggaaggcagacaggtcaatgatgattggacacggacacccgcgtttccaggccgccgctgttgtcgtaaagaaaatggaattgagtgtaggcaaatcgtggtttcgtacagccgcgccggttgggggcgcccgccggccggcattcctacaggctcccggtccgctctttaccccgtttatgaagcgccgccgtgtcagtatgccccggcttccttgcagatgtcgtacaacgtctgcagagcctcgatgggggtcagggtgttgacatccatatccttgaggcggcggatcagctcgttatccgccgcgggcatcagagagagctggccgtcgtccgactcgaaccggtcgggggaggacacgggccggggcagttccatgccgccgctctcgatttgttttagaatctccttggccctggccaccacgctgtcgggcactccggccagcttggccacctcgatgccgtagctgtcgtccgccgggccccgcacgatacggcgcaggaaggtgatgtcgtccccccgctttttcaccgcgatgttgtagtttttgatgcactcgacctcattttcgatgacggtgagctcatgataatgggtggcgaacagggtcttggcccccagctttttgggattcgccacatgctccagcaccgcgcgggcgatactcatgccgtcgaaggtggaggtgccccggccgatctcgtcgaatacgatcagactgtcccgggtggcgtttttgaggatggaggccacctcgctcatctccaccatgaaggtggactggccggaggacaggtcgtccgatgcccccacccgggtgaaaatccggtccacgatcccgacggtggcgctctcggccggaacgaagcagccgatctgggccatgaggacgatcagggcggtctgccgcatataggtcgatttacccgccatgttggggccggtgaggataatgacccggttttcgtggttgtccagcagggtatcgttggggacaaagggagaatcctggagggattccactaccggatgccgcccgtttttgatctcgatgccgcccttcatatcgataaggggacgggtatactgccgccgcaccgccacctcggcaaaggaacagagcacgtcgagctgcgcaatcgccctggccgtcccctgaatgcggtggagctcctcggcaaccgcggtacgcacctcggtgaagagctgatattcgagggccaccacccggtcctgggctcccaggacccgggcctccagctccttgagctcctgcgtgatgtaccgttcggcgttggcgagggtctgcttgcgtatgtagtgctccggcacctcgccggagtaagcgcgggagatttcgatataatacccgaacacccggttgtagccgaccttcaggttcttgatgccggtgcgctctttctcctgggcctccacccgggcgatgacgcccttgccgtcggtcatttcgaaacggagctcgtcgatctcggcgttgtatcccgccttgatcatgccgccttcccggacggaaaagggcggatcctccacgatggcgctgtcgatgagggtatagacgtcctccaggggatcgatcccgtcccggatctccccgaggagggccgaccgtacctccgccagcttttccttgaccggcttcatctgccggatggtctgacaaagggagcgcagctccttggcgttggcgctgccgtagacgatccgggtcatgatccgctcgagatcatagatatccgccagctgcccagtaagatccccccgcaggacggtgtcgtgcaccagctcatccaccgcattctgacggcggctgatctgggcggggctgagcaggggctgttcgatccaggtgcggatcagccgcttgcccatggcggttttggtccggtccagcacccccagcagagagccgcgcttttccttgttccgcatggtttcgagcagctcgagattccgccgggcggtcaggtcgagctgcatgaactgcacgtccgaatacacgtcgaggtcagtcaggcgttccaatcccgtcatctgggtcgcgtagaggtattgcagcgcgcagcccagcgcccgcacggacgaaaactgctcccgcagcccgagctcctccagggagggcttgccgaaatgggccaggatccgctgctccgcctcattgtaatcgaagtcctcggccttcgccacctcgaccgcggcggccagccgctcggtgacgaaatgggtaatcagctcctgccccgaggccacgtcgttatacaggatctcgcgcggggcgaaacggccgagctcgttggtcacccgcaggggcacctcttccccggataggcgggtcagatggatttcccccgtggagcaatccacgaagcaaatgcccgcgtcggcggccccgtcgctgagatacagcacgcaaaggtagttgttccggccctcgtcgagcatgctgccctcgatgacggtaccgggggtgatgatccgcaccacctcccgcttgaccagccccttggcggtggcgggatcctccatttgctcgcagatcgcgaccttatatcccttggccaccaggcgggcgatataggattcgcaggaatggaagggtatgccgcacataggcgcccgttcctcctgcccgcagtccttgcccgtgagcaccagctcgagttcctgcgacgcgatcttcgcgtcgtcgaaaaacatctcatagaagtcgcccagccggaaaaacagcaggcattggggatgctgggatttgacctcgagatattgcctcatcataggggtcatttcggccaccggtttcacttcctctccacgtcctgccctatcggctcagtgacagcccgcgcagccggcgcaattgccgctgcagccgccctcctcgtagctgtcggggtcctgtccctgggccgcgagggcgaggatggaattgatggcgccggtaaggcggtccagctcggttttggccgcgttgtaggccgccatgttggggttctgcataatccgggcgtaaacctcccggagctccccatccagggctttgagcttctcaccgtcccgcgtcccctcgtccttggtcgtctcgttattgatggcaatgcgcttgaggttgaactccccgatcataccctggagctcctcatcctcgtccgcggcggcctgcgccatctgggtgcggatgtagcgctcgtcctgctgaatcgcatatgcgagatcttttgccatttccaaaatcggttccatgtgatgattcctccaaaaatataatggatagattggatcgcaacccatcggtttatgaccgtgcaaaactccggggccgcagccccgggactgcctcccggcaggttgctgtacttgttgggttttcagtccagcaaacggcggatatcgccgaacatgacgtagctgcgggcttcggtcacgacgatttcagccctgcggcccacgagggccgcctctccccgaactcgcacgatgctgttttcggggagcctggcctcgagctcctccccgtccgcccgctcgagcagggcggtatgcacgctgcccaccagccccgcaagcctcgaggcggagagctcttcctgcaaagcggtcagctcccggaaccagcgggatttctcttctgccgggatcgggtcgggcatcttcgccgccggtgtcccttcccgcggcgaaaaaatgaaggtatagagcgatacgaaacccacctgccgcacgaggtcgagcgtctgttcgaagtcctccctcgtctctccgggaaagcccacgataacgtcgctcgtgaacacaataccgggaacgatctgtctcgccgtgcggatcagatccagatactgctcccgggtgtatccccggttcatcgcccgcagcacccggttgctccccgattggaagggcagatggaaatgacgggagactttgcccgacgccgcgatggcttcgaacagttccggcgtcgcgtccttgggatgggacgtcatgaaccggatgaggaagtcccccggtatggcatcgatccgccggagcagctccgggaatccgacgccgtgggcctccccttttccgtaggaattgacgttctgccccagcagggtgatgtccttatatccctgtttcaccagctcctccgcctcggcggttaccgcctcgggcgtgcgggacctctcccggccccggacatatggaacgatgcagtaggtgcagaaattgttgcagccgtacatgatgggcaggaaagccttgaacgtcccatcccgccggaccggcagcccttcggcgacgacgccgtcctcctgcgggatctcgatgacccgtttttcccccatcagggccctcgccatcagctcgggcaggcggtggagcacgtgggtgccgaataccagccccacgaagggatagctgtcccggatccggcgtgtcaccgtctcctgctgcaccatgcagccgcacagggcgatgagcagccccggcttccgccgtttaagcgtcttgagcgccccgacgttgccgaacacccggtcctgggcgtgctcgcgcacggcacaggtattgaaaaggatgagatccgcttcctcggcaatgtcggtaaaaccgaagcccatccgggcgagcaggcccttcatgtgctccgagtcggacacgttctgctgacagccgtaggtacggacacaggcaagtggcgccggccggtcgccgataccataaaacgcgcggacctgctggatatacggctcctgcccggccagctcctccggcgggatcgttctgacgttggccatagcggcgtgttctccttctttgggaaaaggacggcctgcgtcgtccaagattcgggatcccgccaaaaaacagccgggaccctatcggtttattataacaaaccggcaggcgtttttcaacgcataattccaccccttccctccatttttcctcttttcccccatttttccgcaaacccgagaggcaaactttccattctttacaaaaaacagtttatttttccccaaacaggcaatataataatccatatgggtgaaatccaaacggattttcttcccatatctcaccgcatcggcgcaattacgttggcgcatccggatcggccggatggcgcgaaaggatgggcgtatcaatggaagcatcggcgcttctgccgggtgtccggcgggttcattttatcggcatcggcggctcgggtatgtgttcgctggccgaaatcctccatgccatggggtacgaggtctccggttccgatgacctggagtcggacaacgtggcccgcctgaggtctttggggatttccgtctccctgccgctggcggcccggaacatccgggatcccgaggccgtggtttacaccgtcgcggtcagcgacacgcatcctgaaatgcaggcggcgaaggcactaggggtcccggtcatcgagcgggcggcgctgctcgggatgctgacccggcattatccccgttccctcgccgtcgccggcacccacggcaaaaccaccaccacctccatggtttcgcaaatcctcctggaagcggcgctcgaccccaccctggtcatcggcggacgtcttcccctcatcgaggcaaacggccgcgcgggccgttccgatatcctggtgtgcgaggcttgtgaattcaaggaccatttcctccagatggccccggcggtctccgtaatcctcaacatcgacgcggaccacctcgaatatttcggctccctcgagaacatcatccggtccttccgccgtttttcggagcaaaccggctcgaccctcctcgtcaatggcgacgacgccaacacattgcgggcggtggacggcctggaaggcaaaaccatcgtccggttcgggctggcgccggaaaacgaatgggccgcgctgaacatcaccgagggcgggccgtacggccgctacgatctgtaccacagcgggacgtttgtggcccacatcgccctgagcgtccccggccggcataacatcgcaaactccgtcgccgcagccgcggccgcgagcctcctcggggcctcgcccgcacagatcgccgcaggactcctgcatttcggcggggccgggcggcggttcgaaaccgtcggcaccgtccggggcgtcaccatcatcgacgattacgcccatcatcccaccgagatcgccgccaccttggaggccgccaaatccctgccccaccgcagggtatgggcggtgttccagcccttcaccttctcccgcaccgcccggcatctcgacgccttcgccgatgccctgtccgccgcggatgaggcggtggtcagcgacatcatgggctcgcgggaagtaaacacctggaacgtctcctccagccagatcaccgaccgcctgcccggctcccattatatcccggatttcgaggggatcagccggtttgtgtcggaacatgtacaggaaggcgatcttgtcgtgaccatgggcgggggcaatatctaccagtgtgcccggatgatccgcgaccggctgacgcagggggcctgaatgtcccgtccccctgccggtcttcccgatatggcgcaaaacagccccgcgggtaacccgcggggctgtctgtatccggatcagcggctttggaggggggtatactcccgccggaccgccacgctcttgtaggacgggcggatgatcttgcccgcgttgatgagctcctcgagccggtgggcactccatcccgcgatacgggagatggcaaaaatcggggtgtagagttcgagcggcaggttgagcatgctgtacacgaacccgctgtaaaagtcgatgttggcgctgacgcccttgtagatcttgcgctcctccgcgatgacctggggggcgagcttttcaacgagggcgtagagccggtattcgtcctccctccccttctcgaccgacaggctctccacgaaattcttgaagatgttggcgcgggggtcggagagggaatacacggcgtggcccatgccgtagatcaggccggcgcggtcgaaggcctccttgtggagcagacggcgcagatatccgacgatcgcgtcctcatccgtccaatcgggcagggtttgtttcatgtcctcgatcatccgcaccaccttgatgttggccccgccgtgcttcggccctttgagggatccgagggaagcggcgatgaccgaataggtgtcggtcccggacgaggagacgacgtgggtggtgaaggtggagttgttgcctccgccgtgctcggcgtggaggacgagggccaagtccaggattttggcctcgagctcggtatactggctgtccggccgcaggatgaacagaatgttctccgccgtggagaggttgggctgcgggttgtggatatacaggctgttgccgtcgtgatagtggctgtaggcctggtagccgtagaccgacaaaagcggaaacagggcgatgagctgcagacactgccgcagcacgttttcagtcgtgatatcgttggcgttttcgtcataggaatacaacgtgaggacgctgcgcgccagggtgttcatcatgtccgagctcggtgccttcatgatgatgtcccgcacgaagctggtgggcagggtgcggtaatcggagagtatctgctggaattccgtgagctgctgccgggtaggcagttcaccgaataggagcagataggtcgtttcctcaaacccatagcgtttctcccggataaagccgccgacaatgtcctccacgttgatgccgcggtaaaacagcttgccgtcgcagggaaccgctccctcatcggtcatgatgctggattggatctccgaaatttcagtcagtccggtgagaacgccgttccccttgagatcgcgcagcccccggttgacctggtatttggtgaacagggtggaatcgatggtactgctctgccggcatttttctgccagtttccgcacctgaggcgtgatttccgagtacttgttggccatatgcctcctcctctttacagtctatttttatatgttgaatagatctagtatagcatatatttctgaacgaaatatgtccaaacctaaattttttcatccatcttttgcaaaaagaccatttgagggacggaaatttggaaaatcccatgaagttttcctaagaatttgataagttcccggcagaacccttgcactccggccgcgcctgctttataatgagaatgtaggcaaagcaggctcccggatatcggcagagggtcgggccgtctatggctcacgccgtattctttcgacgggatgcgatgtttttcgccccatgccgtcaacggcccgcgggcggccttacacgggcgccgtccgaaaacgtgcgcgacatcaccgaagaggaaaggaatggatctgacatggaagaacgcaaatgtccccagtgcggcgctcaagccgatccgaacgccaaggtgtgcatatattgtggtactccgctggaggaggccgccgctccggcacagcctgtaccgcccgcgggggccgcttccgctccggttgccccctccgcgtctccggcgggatctcccgctggtgccccggttccccctcagcagacttatacggcccctgtggggcaacagccacaaacgccgcccccgcctccggcttatggcgcgccggcctatggaactcctcccgcatcgggttatccccaatactgtaagcactgcggacggccgctggccccgggagctgcggtatgtgtgggctgcggcgtgccggtgggttcgggtgccggcttctgccccaattgcggccagccggccaatcccatggccgcgatctgcgtccattgcggcagcaatctcaacaaccccgcctatccggtcacggggggcaaatccaaaatggcggccggcctgctcggcatcttcctgggttccctgggtgtccacaacttctatctcgggtacaccggcaaggcggtggcccagctgctgctgtccatcatcggcgtctttgcctgcggaatcgggccgatcgcggcctggatctgggggctggtcgagggtatccaaatcctcaccggcaatatccgcaccgatgcaagcggacgccccctcaacgactgacggaccgtttccggttctgccgctttaccagccgcgcttttgtttcgaaacgccccggtatttcgtcgacgaaataccggggcgttcttgtctgtactgttgcccgggaaggcgggactgccaccctatcccatccgctttttccgcatggcggtgcggtaagaaagcggggttgtccccacatgctgcttgaacacgcgcgccagataggcgctctcccggaacccgcattcccttgcgatctccgccagagagagggaggtgaacgccaggctgctttttgcggcttccagacgtttgaacagcacatattcggacaccggcaggccggtatgggctttgaactgacggtagagagaggtgtggttggtggcaaatgtcctgcacaggctcccaaccgacagatcctctcccagatgggtcaggatataccggcagacccgcccggccgtctcctctgtcccggctgcgcagtcctcccgctcccggccctgcgccagcacggcaaggatccggaacaggatctggcgcgcccggcaggaccatttgggatccggctgctcctggagctgaacccggatccgctccagggacttccgcatatacgcgtaggcagcgtcgtccaggcccaggatacccggatcgtcggcaaacacgcggaaatccggatagccctgggtttcccggatcatttcataacaagagggatggagagccggggcatgcaggccgacgttgatgaactccggggcgaacgccagatgcagcccggaggaatgccggatttccaaagggcggaaggcactgtccggaggcaggcaaagcaaagaatgccctgcggccacatacgtcgtgttccccgtgcgcccgcgaaagcagccgctttccaagagcagaaggtggaaccatccgggatcgagcaccgtatccgcacaaagcggcgcgagcaggacgggtacctgccggcccgtcctatatgtgcacgtggtcatccggtgtccccctttcccggtcgatattgctcaaaatacaaaaaaacctgtcgaaaatacaatgacgaaaggacaggtatacgatatactaatatgggtttttttgccaaatacaggataccacgcttttccccgcttttcaagggggcagttttaccgatgaggatgtgggaatgtgaaaaccaagatggggaaacgaaaagcggcgctgataggggcgggcgccggactgctgctcatcctgctcgccgtgctgctgtggatatggctcggccggggcggcgtctataaaatcactctggccccggcctatcaggagctgtttacggaggagcaggccaaagcacaccggatgcatctgcccgagtacgataccgataccaccatcggatacctcaaccaggacggcacaaaatccttatatatatacgccgcccccatccggtaccagagcgcgaacgggacgtgggtggacatcgacacacgccttgccaacgttgaggatgcggcgctgctcgacgaggggtatgtctacacggcggcggccagcgacatcgtgccgctttttccgaagacactgagtggggaaagcgggatccgtctgtccaaaaacatcacttgcaccttcggcgtggattccgatcatgagatcgagagccgcgtgcggaaggagcgcaacttcatcggggaaaaaaagacgatggtgtcctacaacggtgcgtttggtgacggcaccagcgcccgcttctacccgtcctctctcggggtcaacggcgaagtggccatccgcaaggaccagccggacggcaagcttgtcatgtggctgcaaatgcccgacaaccaggcaaagctggaaatgaccaagggcggctacctggtgatgagcgctctcgggaaaaacaaagacatcctggctgtgatccagaaaccgctcctccgcacggcggacgggcagatcgattacagcggcacactcgatttcgtcaagctggactccaatctgtatacgctggagttcacatttgacaaaacggcgctgtcgaagggggccacggtctttctctcgtttgagatgcgcagggaaaagcagcccgacaacgccctgtattcccgccttccggatctcgagtatgcatatctccggaactattcggtgatcgggaacagcccggactacggcatcgggcagctgctcatccgctatcagttcacctcgactttccgcctgaaggcggacgatatccgcagcgcctcctattacacctactccctgacggaatctcccgaccggctggaaatgaaaacggttctggaggactggtgcagcctgacaggaaattggaacgaccattatgaaatcggcaaacgcaccgccctgctggaaagcgtcacgccggagctgcgcttcgacatcaccgacgaggtgaagatgtggtgtggggatccggacggacagctcgaacacaatggggtgctgctgaaatccgtcgacgaggccgtaggggtttacaatgtgctgctcagcaacgacaataccctttaccgcaaccggaccgaggttcttcttggataaagcatgaataaattgttaaattttgtaaattccgtaaaaagtattggatttttgatggagagtgcgctataataccttttggcagcgcccgccgtccattgggtggggggctgtggcaaggatggcccggctttgaaggcacatatttaaggggagaagcggggccgccttggaaaaagcaagagaagggaagaaaacaggatgaagaaagtactgtcgtttgtcgccggtacggctctgctgatggccatgtgcggcatgtcggcgtttgcggatgagaggacctacctcgatcccagcacgcccgagaaagtcacgattgccgaagccaaaggcgaccaggaagtcgtttttgccaacggcacgcccatcaccatcgtggagcggaccgatggagaagagggtgccctggttacatgggaaggcggtagcattgaggtcggcccgaatgcacacgtgttcggcggcggccatgatcatgacggcatttacaagaccacttccatcacgatggagggcggcaaggttcgcaacctgatcggcggcggcctgcacaagagccaggtggaaacctccgaggtcacgttgattgacggtgaagcggtcagcgtccagggcggcggcgcctcgtcgctgtttaaaaactgcggctgcgataacggtacgacctggtatgccggggatccgaaaaattcgccctgccgggtggaggtgacggaagtcaccattgccggcggaaaggtttcctctttggtgttcggcggcggtgagggtatcagcttcaccgagacggctggcgtggtcgtcctggacggcgacctgtccaccgcttgggtaacggccggcggttcgaacggttacactggttacgggatggttgctgtggccggcggcaaggtcaatgtcgtgcagagtgtcaaccgcggatcgatggatgaagccgcgctggtcgtgatgggcggcgaagtcaacaagctgtatgtcggcggtgaaaccggcgactccagtgtgaccggcaccattgcccagtcggttgccgcagtgaccggcggcaccgtgaccgaactgcatcccggcaccaccggcggtgtggaaatcacgcccgagaccgagggtgtcgaaatcggggtcgcgattgctccgaatacggtcggcaacagcgattctctctccgacgctttcggtgaggatgcggtccgtgccgtttacaccgccaccttcaatgcgaacaacggcaccgatcccgttgagatgccgatcgtagaaggcgagccggtggaaaaaccggaagatcctgaaaaggacggctataccttcaagggctggtttaccgacgaggccctggagcaggaatatgatttcgaaactctggtgacgggggatatcaccctgtatgcgaagtgggagaagattccggacaccagcactcccagcaccccggatgacaccagcactccgagtaccccgagtactcccagcaccccggatgacaccagcaagactgaaaacccggataccggcagcacaaccatggtttgggtggtcctcgcggccgctctggccggcgcggcgtccgttgtaatggtgaagtcccgccgtgtgcgctccaaataaggtttgataccttagaaaagaccggatccttacggatccggtcttttttctctgcatctccccacggagaagctccagtctctccgaatacgtccctctcatccttctatacgtttaaagagcggccggctctccagggagccggccgcctttagatgatcccaattctatttcaccttcagcccgtaggcttttaatattctccgggcctgttccacatcctccgcaccggccgcaggggtgtccttcaaggtatagggagcagccagtgcctcccatttgtactcccccattttgtggaaggggagcaactccacccgctcgatgcaggcataccgggacaacagcacccccaaggcacagaggtcatccctgccgtcggtcaggcccggcaccagcacgtgccggatccagaccggtttccggacgttttcacagtggttgagcagctcgagggtgttgtccatcccccggccggtgatttttcgaaacagctcgtccctggccgctttgatatccagcagcaaaagatccgcctgatccaccgctctccggcagtgaaacagggaaaccgagcccgcagtgtcgatggcggtgtgcaggccgttttcgcggcacccctccaaaatcgaagcggcgaattccggctgcatgaggggttccccgcccgaaagggtgacgccgcccttctgaatgaaattccggtagcgcaggatatccgccaccacggccttggacccgaccttctcccctccctgcgcattccaagagtcggggttgtggcaaaaggcacagcgcatgggacagccctgcagaaagaggacgtaccggatccccggcccgtccagtgccccgaagctctccaccgaatggatccggcccatcacgttttccatgctgccgcccccttccctttctccagccggtatgcctaaaaccgggtgtggaaggtgcggtggatgacatcgagctgctgctccctggtcagtttgatgaaattgaccgcgtagcccgacacccggatggtcagctggggatagagctcggggtggtccatggcgtccagaaggatctcccggttgaggacgtttacgttgatgtggtgccccccctccccgaaataaccgtccatcagcccgaccagattttccgcctgttcctcccgctcatgcccgagggcggtggggacaatggagaaggtgtagctgatgccgtcctcggaatagtcgtaggggagctttgccaccgacatcatcgaggccacgcagccgtggctgtcccggccgtgcatgggattggcaccgggggcgaagggctcccccgccttccgtccatcaggggtggagccggtcttcttgccgtacaccacgttggaggtgatggtgaggatggacatggtgtggacactctcccgataggtggggcattttttcagcttgctcatgaagagcttgaccacgtccaccgcaaggtcgtccacccgggggtcgttgttgccgaatttcggataatccccttctacctcgaaatccaccgccaggccggtctcgtcccggacgggccggacccgggcgtaacggatggcggacagggaatccgccaccaccgacagcccggccactccgcaggccatggtgcgcagcacgtcgttgtcgtgcagggccatctggagcttctcatagcagtatttgtcgtgcatataatggatgacgttgagggtgttgacgtacaggctggccagccaatcgaggatggcgtcgaacttcttcatcacgtcgtcgtagtccaggtatttcccccggcaggcgagcagctcagggcccacctgcaccccggttttttcgtcccggccgccattgatggcgtagagcagagccttggccagattggccctggccccgaaaaactgcatctgccggccgatccgcatggcagaaacacagcaggcgataccataatcatcgccgaatttcttgcgcatcagctcatcgctctcatactggatggagcaggtctcaatcgacattttggcgcagtatttcttgaagccctcgggcaggcgggggctccacagcaccgtcatattgggctcgggggccgggcccagattggtcagggtgtggaggaaacggaaggacatcttggtgaccagatgccgtccgtcggtggagaggccgccgatagcctcggtcacccaggtggggtcgccggagaacagctcgtcataggacggggtgcgcaggaaccggaccagccgcagcttcataacaaaatggtccacaaactcctggatctcctcctcggtatagcggccgtcagcgaggtcgcgttcggcgtagatatccaggaaggtggacacccggccgatggacatggcggcgccgttctgttccttgatggcggccaggtaaccgaaatacagccactgaatggcctctttggtatcttctgcgggccgggagatatcgaaaccgtacccctccgccatccgcttcagggcctcgagcgcccggatctgctcggcgagctcctcccggagccggatctccctcgaatccatgaccgggtagtccgccgcatcccgggacatctgcttttcccggataagcatatccaccccgtagagggcaacccggcggtaatcgccgatgatccggccccggccgtaggcatcgggcaggccagtgatgacgccggatttgcgggcggcccgcatctggggggtgtatacatcgaacaccccatcgttgtgggttttgcgatactggaataccgtttcgatctccgggtccatctcccggccataggccgccagggaattccggaccatccggatacccccgaagggcatgatggccctcgtcaagggggcggaggtctgcaggccgacgatctgctccttgtctctatcgatataccccggcgcataggcgtcgatgcccgaaatggtgtgtgtatcgatatcgtagaccccgccgcggtcccgctcctccttcatcagggccgccacctcgtcccacagcgccttggtccgctcggtaggaggcgcgagaaacccctcatccccgtcgtagggtgtcacattacgggcgataaagtcccgcacatccaccatcttttcccagatacccggtttgaaccccgtcatggcattcctatcctttcgcggccgcagggccgtcttcccatatcaacatacgcttcacttcatggatttagtataccaaaaacccggctcctatacaaggaagccgggtggaaaatttcggataggcgtgagaacaaattctggacactttgaatcggagcccgcagagccggcctacggctgcctcgccgaaggagggccaacaacgattctggtccccaagaaatcgattttatgaacgacgcaatccccggggccgtcgtcccctattgaatgggacgggcaacacccggatgtttgaatggtttttaaccgatactgttcatgcaacgggcgggaaagggagctctcccagttcacgcagaaattcgtcgtagaatacccccagctctccgatataccgtggcttccaaggcttgttgcggccgcaataatggatgaggaccgtgttttgccgtacccaggcgagatcggggcgtccttccccgaccgaacgcggccgcagccggcaggaaaggtaaaatttctctcccaggttgtactggagggcgtccaggaggagaatccggtctccatacaacgtgctgatgacatcctggtcgggcaaaaacaggcttttatgttccgcaagccattcctgaaccgtttcaggatgctgctcccgccgcagccgggacaggttgaggagcatgacccccgaattgatgtagggcgcgtccttcttcatccccaggcgaagctcattgagcttgcgcagcgaggcgtggacatgggaacaggcggcgaacagcgcgtctcccatgggggtggcgtacaacttttccaccggattgatggccagcacgtccgggtcgagatacaagacccggtccagctcgggcggcagcacctgggcggcgaaaatccggtagtacatctcccggggataacggtcggtggtgggggcaccgtccaacccgcctccgctgacgcggatctcctcgagcgtcatccgacagccctctatcgccctgcgcacagcgtccaaatcggccggggtcagggaggagtggaggacgaaaacccggaaatcccgctcgggagtccgggcggcaagggaacggagcatcacgcataaaggacgtagatacaaagcatcgagggtgacgaggaccgcgatgggctccttgtccggggaaagggtatgcatggcggtagggctccttccatgtggattggatcagcgtttgcggcggcgcatccggaacagcaggacgccgccgaccgcgagggccagcagatagccgataaaggccggcaccggcaggcccagtatccgcggtcccgtttcaagggaggagagcaggccggcaccgatgatcagggccgcatcgaggatcgccagggccagcttgtctgtccggcgttcggccgccttcaatggatcctccgagccggtgggctcgacgtgcagcttgagctgccccttgagggtggttttgagcaggtcggacatctgggaggggatgtcgagcgccttccgtcccgacgccagcagagccaggccgccgcttttcagttccttttccaggtcgaacggcccgacggcgccgcccgccatatggttgtgcatgatggtgatgatttggatatcgggactgatccgggccagcaccccctggatggtgacgatgcccctggcgagcatggacagccccttgggcatcgagatgccgtgggattcggccaggcccaggagctcttccatcagccgggccaggtcgatgtccgccatgcccatgctggcatatctcgagaggaattcatcgatgtccgcatacaggcggacatggtcgattttgccgctgtggacacccaaggtgagcagcacgtccttgagggtaccggcgtcgttctgcgccacggcgcgtacagcggtcttcaggagctcacggtccttctcgctcagccggcccatcatgccgaggtccagaaagacgattttgcccgcccgtatccgcaggttgcccggatggggatcggcatggaaaaatgcctcgtccaaaatctgccggacatagttttccgccagcttttccccgatctcaccgaggtcgtacccttcctcgcggagccggtcggtatcgtcgatggggatgccgtcgatatactccatcatcagagcacgggaggtggtatagcggtgctccacccgggggcaggtgacataggcgacaccggcgttgctgtcccggaattcatccatatggcgggcctccaagagaaagtccatttcctcctgcgccacggcccacatttcatcgagcaccatgcggaagtcgataaccccggcgatgccgcccgcccgttgcaggatgcccgccgcccggcgaaggaggacgatgtccctcgccatggtgtcccgcacccccggccgctgtaccttgacagcgacctcgttgccgtcccgcagcaccgccgcatggacctgggcgatggaggcggaaccgagaggtgtttcctcaaaggagaggaagagcgatttcatcgggacgccgtactccgcctccaccacctctttgacctcaccgaagggcatcggggagacgtccgcccgcaacagggtgagctcctggcagtattccgccgggagcatgtcctgccgcatggagaggatttggccgagcttgacgaaggtcgggcccaggtcctggataatgaggcgcagcttcacaggggtgaggccgcgcaggataccgtgccgcgcgaacacggccaggatctcccggaggcggtggcggttgtccgcccggccgcccggctcagctttccggttttccatggggatcctccgcggcgtccatcgccgcgagcttggctttgagggcagcgaggtcttccgggctcatccggtcgaggctgcgcaggagctggtccgcctccgaatcgggggggacggccctggacacgggaccggaccggtggtggagctcctcattgagcacccggccctgttccaccgtcaggcggcctttttcgaccagttccccgacgagggccttggttttttcggcggtaacggccgccgcacccactccggccaggaatagcgttttgagctcttcgttcagacggtcctgcatggtgacaacctcttttctgttgaaagggtattcttattatatcccaaatccgggaaaacggatgaaggatttatgaattcgggccgggccgtccggcccttgccgcgagggcggcggaatggtatactggacagagcaggggccttaagcccctacataaaacaccgcgggccgggtctgccggccgcaagggaggatacggacgtggaaggaaccggagcacgcatcctgatcgtggaggacgacgcggatatcaaccgcctgctcaccaccctcctgacaaaggagggatataccgtcattccggcctactcgggcagcgaggcggaaatgcggctgcaggcggaacgggtcgatttggtgctgcttgacctgatgctccccgggctgacgggggaggaactcctcgcgcgtatccggagggatcaggtgatgccggtgatcgtcctgtccgccaaggggcgggaggacaagctgcgggtactcgccgacggggcggacgattttatcggaaagcccttcgacgtggaggatgtcaaggccagggtcgcggcccagctccgccgctatacccgctttgccgccgctgtgcaggaagaggacacgccgttgcacttcaaaaacctcgttctcgatccagaaggccgccaggtgacggtcaagggccgggaggtgtccctgaccgcccgggaatacggcattttgagcctgctgctctcccatccgaaaaaggtctttacccgcgcgaacctctttgaatcggtctgggaggatccgtatctcggggacgacaatacggtcaacgtgcatatcagcaacctgcgtgccaagctggcggcggctgacccggacaacgggtatatcaaaacggtctggggcatcggcttcaagatgcaggaggactgaccggccgcggattcccggttctaggagtttcatcctccggaaaaaggcccggctttagagtttctttagatttcctttaaggctttttgaaggtacaggggtatactgaggccaatctcagacggaaggatgaatggtatggcggacaatgtactggtcacgcgggggctgtgcaagcggtacggcgccacgatggcggtggatcacgtggatctgcgggtggaacacggacagatttatggattggtcggaaaaaacggggcgggcaaaaccaccctgatgcggatgatcacctcgcagagcaggccgagcggaggggaaatcgagctattcggggcgtccgacccgcgttctctcggccggatgcgggaacggatgggcgcagtgatcgaaaccccgagcttctatccctttctgacggcggagcagaatctcgaatattacaggctccagcgagggatcgcgggcaaagactgcgtgaaagaggcgctgcgtctcgtcggcctcggcgatacaaggaacaagaaattcaagcagttttctctcggtatgaaacagcggctcgggctggccctggctatcctcggcagccccgacctgctccttctcgacgagccgatcaacgggctcgacccgatggggatcgtacagttccgcgacctgctgctgcgcctgaacgccgaacgtcagatcaccatcctgatctccagccatatcctgagcgagatcgccaacctcgccacgcactacggcttcatcgacgggggacggatgctgcagcagatcgccgcccgggacatcgaagaatgctgccgggaatgcctggaactgaccgtggatgatgccccgaaggcggccgtatcgctggaaagccgcctatattgttcctcgtatgagatcctgcccgaaaaccggatccggatctacgcatttctggaggatccggtaaaggtgacggcggcactcaccgaggatggcgtgcgggtacacacgatcaatacccgcgggaccaacctggaggattatttcctgcggctgctggagcgttcccgtccggacggaaccgaaaggaggtatgcgtgatgctgcgtgtgatcaaaagcgaactatacaagacccggcatcgcttgtatccctatattttcatcggcgttatcgtggctctcggcctcgcgggtgtgatgctgtttgccgttaccaaccattacctgccgcccgaagaacgggtgggctttgacggcatggtgagtatcgctctgtccatgttcccgacaggcctttttctgaccgtagcgttcgtggacatggtgttttcggaggaatataaaaaccagacgatgaaaaacacgctggccttcggtacatcccgggcgggcttctatctgggcaagctgctgaccgaattgatcacggctctcgtgagccttctcgtcatcctgggcgttatactgggagccggtgtcctagtgctgggtcccgtctatccggttccgtttctcgaactgttttccgagctcggcaaacgtctgcttgtgaccctgcccctgtggatcggggcgctctctttcggcaacatgctggctttccacgtcaagagcagcactctgtacacactgggtttcgtcggctttttcggtttcctgcccgtcatcctccagtttgcggcgcattattacccgtctctgagggaggtcagcctctggctgatgatcccgctgcttgaacagatcgtaagaaccgaactgaccagagaactcgtactgcgcagcgtcgtgacgggggccgcctatttagcggggagcaccctgcttggacttctctgctaccgcagaaaggacgtcgcctgagcctctgcgcaaaacgaaaaaccccgtccggctcttttcaagctgggcctggtatggtatactcaacggcacagggagggacgaacatggggctggccggatggatcatcgctatactggcgctgctgctcgcggtctgtgcgggtgcgctgatcgtatataaacggaatctgctcaaagtgcgccgctctctggaaaatctgcggcgcacacagtccaacgggcgtctgaggctcagcgtaccagaccgggatttggaacggctgctcgaggaagtgaacgcgctgctcgacgaacggcaggcgagcgacgccctccaccggcggcaggagcggcagcgccggcaggagatcgccaacatctcccacgacctgcgcacccccttgacctcgatcctggggtatctgcagatgatcaaatccgaaagcaccaccccggaggaacgggccgaataccttgccattgtggaaagccgcgcccatgccctcaaggccctggtcacgggcttttacgacctgtcctgcctggaagcgggcggctatgccctcgcgcaggaatcggtggcgctcgcgcctcttctggttgaactggcggcggccttttacgccgacttcaacgcggacgggcgggaggcggagatcgacatcgccgaggggctgtcaccgatcctgggcgatccccaggccgtgctgcgcatctacaccaacctgtttcaaaacgcgatcaagcatggcgcgggggatttgtatatccgggcgtttcaggaagatggggtggtggtcacctgtttcaccaacctggcgccgggcctgctgccacaggatgttgagcacctgttcgaccggttcttcaccgccgacaggatgcgcaccgggcaggacacagggctggggctggcgatcgtccatcgcctggcgatgcagatggggggcgaaaccgaggccctgctgctccagaacaagctcaccatcaccgtccgctggccggcggtcaagccgcccgagggacggcgttagcactctttggcggacagacggagcagcagaccgaaatcgtcgtcccgcgcggccttattccgcccttcgcctccgcatttcgtgcagcgaaagcggatgacatagccttttttggcggagatgtccagaccgaccggttccatcaggccccggcaggggttctgccggtctcccggatggatgtccacatgcagagaatagaggcagtgggggcaatggttacgggaggtgtagcccagcggctccaccgtctgtccgcagtgcgcacagacaaacccctggtcatttttgacaaagtgccgctcttccatgtccgaacctccaaacaagcccttttctccagtatagaggaaaaatgccgcaaacgcaataggtgatccggccgcccgggagagcggccggtctttttcttttcagagtctccggggtcttgttcccacgaaggaaatctggtatactggtagaaaaaggaagcgggggaaacccgatgaaaagctaccggaaagaactgtggtttcatctgcccacccgacggggcctcgtcaacatcacctcccaggtggagcaggcggtgcgggagagcggcgtgcgggaggggttcgtgctggtcaatgctatgaacatcactgccagcgtcttcatcaacgacgacgaaagcggcctgcatcgtgatttcgaggcctggctcgaaaacctggccccggaaaagccctacagccgctatgcccataacgggtatgaagacaacgccgatgcccacctcaaacgcaccgtcatgggccgggaggcggtggtcgcaattaccgagggccggctggatttcggcacctgggaacagattttttattatgagttcgacggcgggcgcgacaagcacgcgctcgttaaaatcatcggcgaatagaaaggggcaggaaatatggtacagccggttaccctcattgtatatccaccttgcaccacctgccagaaggccagggcatggctgctggagcagggcatcgaatttaccgagcggcatatcaaggaacagcggcctacagcggaagagctccgccgatggagccgtgaggcaggcctgcccctcaaacgctatttcaatacgagcggcctgctctaccgttcgatgcgcctgtccgagcgtctgtccgggctggacgaggaggaacagctcgccctgctcgcgtcggacggcatgctggtccgacgtccgcttctgctcgtcggggaccgggccctgcccggcttccgtcctgccgaatgggatgccctgctgcgggaaaccgtacaatccatataaaaggaggaaaccctatgccctgtatccagaccaaagtaaatgtcgccatctcacccgaacaggaggcccggctgaaaaccagcttcggtgagctcatgccgttgctgtacaaaaccgaggactggctgatgctcagcttcgaggatcactgccgcctgtatttcaagggcagcggcgaggccgccgccttcgtggaggtcaagctttatggggcagccgaccggggggcctacaacaagatgaccgcagccgtgaccgccctgctaaacaaggaactgaacatcccctccgagcggatttacgtcaaatacgaggaagtcaaatactggggttacgacggcagcaatttctaatccgccggacaccgcatacagggaagtgtcgagtatggaggtcattccctcccgcgatctcaatctgctctatatcctgctggatatcgggtttttgctcattttggccggggcgctgctgtggtgccgcaaatatctggcggccctgttcggcctattcggcgggctgctgtatttcctggtggattacggcgggttttatcttctgctcggcaccagggaggtcagcggcgccgacccgttctggttccttctctggctgagcatgagctatggcttcacgaatttcgtatggatctggctctggctcgaccgggacgggcatgccctcgaatggtcggtcctcatcgttgcgggctggctggccgttgctctgctcagccagaacttcggcgggggatttgcccggatcgtcatctccagggggactggaagctaccacggcatcatggccctactcctgtttgtcgggtatgccatcctgtgcctccacaacgtccgctgcccgaaagaagaacggtacccgctgccctggattctggccatcgggatattggtgcagttcgcctgggagttcgtccttctcatcaccggcatccgtgccagcggctttggcccgctgctggtcaattccctgctcgaaacgaatctgggtctcccctatatctttctgatccatcgcgccatcaatcgaaggtggagcgagaatctgcgccgccttcaggcggcgggctgacagcctgttcgaaaacagaagcggcatgccccgggaaaggcttccggggtatgccgtttttgctgaaaactgccgggaacactgggatccgcggatatcggtgcgtgtttcccctccccttgccgtctaccggcaaagggcatcgggattttgcacaatttgcggattaacaaaagcgaagcgcgctgtcaaatctccgaatttggatgaaaggagggctgccagaaggggaaaagcttgacaaattgggaaaatatgcgtattctatatatggttagctaaagctaacttttgtttcgcccataagttagtttaaactaatatacacggaggatacggggaaggatgaggcaggatgccgctgacactggcacaaatcggtgaaaaaaacaccattgtcaaggtgggtggaaaccccgaggtgaaaaagcatcttgaaaatctcggctttgtagcgggaggggacgtcactgttatcaccgtcctgggggggaacgtgatcgtcaatgtcaaggaagcccgcgtggcgatcagcagggaaatggcgcagaaaattatggtcaaatgatgttggtatagatcaaacgagaggaggaaacaccgcatgaaaacactgagacaggccaaaatcggcgacacggtcagggtggtcaagctccacggagagggcgctgtcaaacggcgcatcatggatatggggatcaccagaggggtagatgtccacatccgtaaggtggcgcctttgggcgatccgctggaagtgaccgtgcgcggctatgagctgtccatccggaaagcggatgcggattggatcgaggtcgaatgaccatccgcgggagggtccctcctctttttttggaggagagttagtcgcgccttactcggcgctttcgaacaggaaagagaggaacagccatatggaattgcgaatcgccttagcgggcaacccgaacagcggtaagaccaccctgttcaatgcgctcactggttcgaatcaatttgtagggaactggccgggcgtcacggtggaaaaaaaggagggcaaactgcgcaaacacgacggcgtcaccatcaccgacctgccgggcatctattccctttcgccctatacactcgaggaggtggtcgcccggaattacctgatcggggagcggccggacgccatcctcaatatcatcgacggcaccaacctggagcggaacctctatctgaccacccagcttaccgagctggggatcccggtcgtcgtcgccatcaacatgatggatgtggtgaaaaaggcgggggatcggatcgatgtgggagaactttcccgggagctgggctgccctatcgtacagatctcggccctaaaaggcaccggcgtcatggaggcggccgaggcggccgtggaggccgcgaaatcggccaaaacggtgccgatgcacaccttctccggggcggtggaacacgccctggcccatatcgaagaggcggcggtccactccatgccggccgagcagcagcgctggtatgccatcaagattttcgagcgggacgacaaggttctcgcaaagctcgagctgaacccgaatgtcctggagcatattgagcaggatatccaggcggccgaaaaggaatgcgacgatgacgcggagagtatcatcaccaatgaacggtatgtttacatagcgtccatcctgaaaggctgttacaaaaaaagaaatgccggccggctgtcggtctcggataaaatcgacaaggtggtgaccaaccgcttcgcggcactgccgatctttgcggccatcatgttcatcgtctactttgtgtcggtcacgacagtgggcacttgggcgaccgattgggccaatgacggcgtgttcggcgacggctggcacctgttcggcatcgggtcctctgcctatgaagcggcgacggaaaactatgaggaaccgggagccgtcgtggaagcgtttgaagcagccgcggcggccgccggcgcggtggatgaggcggcgtccaccgaagaggcaaccgtcctggttccggaactggcggcgtctttgagtgccacagcctatttgtatgacgacgaagggaacgtggaggaagagatccccgtcacctacgcctcctatctcgaggcggctgccgtcgaagagccggatccggcggcatatggcgtatgggtgccgggtatcccggtcctgatctcgtccggactgactgccgtccactgcgcagattggctgcagggcctgattttagacggtatcgtcgggggcgtcggcgccgtattgggcttcgtgccccagatgctggtgctcttcctgttcctcgcttttctggagagctgtggctacatggcgcgtatcgccttcgtcatggaccgcgttttccgcaaattcgggctgtccggcaagtctttcatccccatgctcatcggcacgggctgcggtattcccgggatcatggcgtcccgcaccattgaaaacgagcgggaccgccgcatgaccgtcatgaccaccacattcatcccctgcggagccaaactgccgatcattgccctgatcgccggcgctctgttcagcggggcctggtgggtagcgcccagcgcctatttcgtcgggatagcggccattgtcatatccggcatcatgctcaaaaaaacccggatgttcgcaggggatcccgcgcccttcgtcatggagctgccggcatatcatctccccacggtgggcaatgtgctgcgctcgatgtgggaacgggcctggtcctttatcaaaaaggcagggacggtcatcctgctgtccgcgatcttgctctggttcctccaggctttcggtgtggagaacggcagcttcggcatggtggaggatctcaaccactccattctggccgtgatcgggaatgccatcgcctggatcttcattccgctgggctggggcaactggcagagcgccgtagccaccattaccggcctcatcgccaaggagaatgtcgtcggaacgttcggcgtactcttcggcggtttcgatgaggtggcagaaaatggctggcagatttgggcgaacatgcgcgaggttttcactcccctcgccgcctattccttcctggtgttcaacctgctgtgtgctccctgctttgcagccatgggcgctatcaaacgggagatgaactcggcaaagtggaccctcttcgccattggctatcagtgtgttttcgcctatgcggtctccctggtcctgtatcagctcggcatgttgttcacgggacacggcaaccttctcggctctattttcgcctttgccatcgcggccctgatcttgtatctcctgttccgcccatataaggaatcgagaaccctgtccaagcccgtgaaaatctgaccgcggggaaaccccgaaggaggtatccgtatgggaacctggctcacggaaaacatcgccacaatcatcatcggcgtacttttaatggccgccatcgcggcgatactcgttcacatgatccggaaccggaaaaaagggaaaacttcctgcggatgtggctgttcccattgccccatgagcgacagctgccatccgaagacatgacacagcgggagacatcggtatcggccggtgcctcccgctgctctcagcaaaaacgccgcgtcatgggcataaaacccgtgacgcggcgctgccagtctatttgatatcgatatccagcgggcggtccagttcatccgagacataacggccgtttttctttcgctgacggacacattcggacaggaggtactcgatctgcccgttcaccgaccggaaatcatcctcggcccacgcggcaatcgcgtcgtacaatttcgcagataggcggagcggtacctgctttttctgctcgccggccatgtcaatacaaactcccggaattgacgacgggctgcgcgtcacggttgccgcaaagcaccaccagcaaattcgacaccatggccgccttccgttcctcgtccaacgtgatggtctggttttcgctcagacgatcgagcgccatttccaccattcccaccgcaccgtcgacgatcattttgcgcgcgtcgataatggccgaggcctgctgcctctgcagcataacagcggcaatttcaggggcgtaggccagataggtgatccgcgcctcaagaatttcaaggccggcctcccccactttctgctgaatttcatcccggatgcgggcggcgacaatttcgctcgatccccggaggctgccttcatctgcaataccgtcgccggtggtatccacccccggcgccacgtcatagggatagttccgcacgatgttccgcagggcactgtcacactgcagggagaggtattctttatagttgtcgacattgaagaccgctttggccgtatcgacaacccgccacatgaccgcaatgccgatctccaccggattgccgagacaatcgttgatcttctgccggttgttgttgagcgtcatgattttcagggaaatcttcttattgaccaactccacattcgcaccggcctgggcggcgagcaggatggattttccggtgccgccatcgacatcgccgctttggttgagcttggttttggccgcgggattgacgccggtgcagaaggggttcacataatagaacccatcgtttttaagcgttcccacatatttgccgaacagggtcaagaccagcgcttcctggggcttcagcaccttgaggcccaggaagggaatccaaccgatcaacagccagatggcgcagacgatcagcagcacgagggaaagcgccgacggtccgctttccaccaggatacagccgaacacaaagcctacaatcgcggcagcgtaaaacaggacagacagcagcatgaccaccatgccgtttttcttgttgagcagtactttctcgtgcatacaggacgcccccttaatatgatattaaaattatatcatattaatataaatttgtcaatagcctgccggccactttccctagagcgccgca

SEQ ID NO: 3895 - DNA, 7587 bp, Unknown
  16S sequences of unknown bacteria
gtatataggaaacttacataaatttttctttcattctagtttggattttacctttatttttataatcattagtagaatctttttctgatgatctttttcttagaatcgggcaaaatacttttaacagaaatcgtgtcagatatatcacgtccagaatctgcttttacattattggacaatacaattaaacaccacttttcagggggaaataatccatgcaatgtgccgttatcgatatcggctccaactctatacgtttatccgtatacgatgcggaaaaaacgaattttaaaattttatttaaagaaaaaatcatggctggcctggccagctatgtggaagatggagttctaagcccggaaggaatcgaatgcgcctgccatagcctgatagaattgaaggaacggctgtgccttttaaatattcaaaatatttccgtttttgcaactgcttcccttcgcaacataaacaatacccaggacgtgctccaaaaaattcattccacaacaggcttctgtctagaagtgatttctggtaaacaggaagctttttacggttatactggtgctatgctagatctttctttgcccggcggcatctttttggatattggaggcgctagcactgaaatcgcattttttgcaaatggaacgttaatcgaagcagaaagctatccaataggatctttgcgtttatatgaagactgtgtaaaaaacattttaccgggaaaagggtcccgagaacgaataaaaaagcggatagaggcggaactggcatcatgcaggatctcttcttgcggcgcttctctggcttgtgtaggcggaactgcccgagctgttttaaagcttggacgccgacgataccatttgcctgattcctgcaatgtcctatcgatcgagcagctgaaagctctctataatgatctttgcactggggatcggcgcgcggcagaactgattttaaaaactgcaccggaaaggattcacacgcttcttcccggcatgtcaattctttgctttcttgcccaaaaaacaaaagcttcgcaaatgatcgtcagtaaatatggagtacgggaggggtatttgtgccagcggattcaaacaaaattgtaaatccatatgcatacacacaaaaccgggaacttagctggttgcgtttcaacttacgtgtattggaggaagcggcggacgaaacggttcctttgctggaacggctgaaatttattgcaattttcaccagtaatctggatgaatttttcatggtacgcgtaggaagtttattcgatctttcacagatatcaccggaaaaaatcgacatccgtactggcatgacacctatgcagcagctgcaaaaaatttatcagactatcccagaattgatcacaagaaaaaaccagatttaccaagatgttttggaaaaacttaatctccgtggtattttcgatcttacatttgatcagctttccgcagcagaacagaaatatatccatcagcattttaagcggcatattctctctgtactctcccctcagattgtggacagtcatcatcccttcccacatttagccaacaaagctttatatatcgctgctatgctggaaaacaaaaaagggcggccttctcttggttttttaccagttccgtcttctctgcccgcttttgtatgcatgccggacaaccctgggcgttttatccgcatggaaaatattcttctgcactgggctccaagtctgtttgggagctatcggtctgaagaattttgttgcctttgtgtaacacgaaatgcagacatcagctatgacgaggaaaagtttgaagaccaggacgaagactttcgaaaccatatgagcaaacttcttaaaaagcgggcaaggttgtcgattatgcggctggaaatttcaaagcatattagtgaaaatttccgaaaattgctggaaaaccgcgttcatattaaagacaatcagacatacttcaatgaaagccctttggtgatgaaatacgtttttgcattagaaaaacaacttcctccggcaataacacaaccattgcttttttctccctatcgtccccgttggccggaagatctggatgaaaaaagaagcatgataaaacaaatccaaggaagagatcgtcttctcttctttccctttgaccgaatcgatccttttcttcaactgctttccgaagcagctgaacggccggatgtgatttctattaaaataaccatctaccgtctggccgcttcttcgaaaattgttcgcactctttgccgggctgcagaaaataaaaaagaagtaactgtactgatggaacttcgtgcacgatttgatgaagccaataacattttttggtccaaaacattggaagaagcgggatgtcaggtaatttatggaatagaagactataaatgtcacagtaaaatctgtttgatcacgctgcgcagcaaagggcagctgcactacatcacccaaatcgggactggtaactacaatgaaaaaaccagtaccgcatatacagatcttagttttatgactgcagatgaaaaaattggattagatggcatcgcattttttcgcaatatgctgattggaaatcttaatggaaactatgaacggcttttggtttctccttctggcatcaaaacgcttttgctggatcgaattggaaaagaagcagccaaaggcccggacggatatatccggatcaaagccaactccttaacagaaagggatgttatcgacaagttggccgaagcatctgcatctggtacaaaaatacagttgattttgcgtggaatatgctgtttgcgccctggtattccacacatgacagaaaacattcaggtaaccagcattgttggacgctatctggaacatgcccgcatctattgttttggtcaaggaccagacgcagaattttatctttcttctgctgatttaatgtcccgaaatttgaatcggcgaattgaaattgcatgtcccattcaagataaggaaatcaaaagacaactggactggattttacatacacagttggaggataatgtaaaagccagtgaacttctgccggatggctcttatttaaaaaaacaagacagcaaacatccattaaacagtcaatcttattttatggagcaatcttttcatcacagagcttcgtctgaaaaagtacaaagtaaattgaaaacacctttttctcttttgaaaacatggtttgctggcataaaaggagattaagtctcttatagagtttcttgtattgccagcaacatttccttttgctataatttgcactagataaatatgcgatttattttaccgccgggtaatataaaaccgccagactttctatcggtaggcctttgaagatagaaagtctggcggtttttatttttgatatcacattatctttttgcaaaagtctgtttgtagaaattttaggaggtatttatgcacaacaaaatactttggaaagaatttattcggtatgcttcttttggcttttttcctcctgttttggcgtaaccgacgtatagcttgcttttcctgacacagaatttctcgtctttttatatgagcctgtttctttttcaaaaatggggacaaaatacaaaatcggactgatttttcagtccgaccttaatttaataaaaatgctattctattcgctgatgctccaaccgggccaaaaggtaatccaatggcttgaacaaaaccaagcaagctaaaaaatttccaataccatgagcaatatcaaatggaattccagccacaaaccaagcaaacgctgcttgcggcccgctcaaaaagatataagaaaccgcacccagcgcaccgaagcaaagcccgaacccgccggaaagtatcgcccatccgagcagagactgatttttttgcatcatcatagtcatagcaaacaaaactgcccaaatatacaagtatataaaccaccagatgccaaagccaaaaacaagtccctctaaaacaacaaacacatagataaccggcagtgctcgatattttaaatggcgggtatacagaataatcagtaaagataccaattccacattaggcaaaaaagcaaaagccaactgcacaccaaacaaaattgcactaaacaggcccatcagtaccaaatcgcggattgcaaggggcctttttttccttaccatttgctcagggtcagctcataatgttccccatctgcaatcggtgtcaagtccgcgctggtattgagtgtctcgcagcctttggtgatacaccaccattcctgattcgaggcgtctgctgttaccccatccaccgtttcaatatataaaccatattccccctgtgtgccatctaccagcttttcttctttcaaagcatcccccagattttcagcatcagtatgaattttgtattctttttggttgtcctgtgaaaatactactgtaaggccaattgttttctctcctgcctgccctctcggcatgaaaacgccataaatcgcaacaaatattatagccaaaaccaccaggcagatgcctgcgataatcaaaatcttttgattgtttttcccgctttccaacacaaatctctccctttcttttcctttttcgtaaagaatatatcatattccttttctcttctcaatgagatgggcgttttccttgacaagataccgtttttccgatagtttaatattggcaggaatgaaaaagtttctatggcagggaaggtgatcgaatgaatttttccattgaaaagaacagcactgtgtctatttaccaacagctgatcaaccaggttacgcgaaaagtacaaaacggagaacttccctccggaaaaaagcttcccaccgtgcgggaactggcagatcaacttggaattgcccgcggtacggtcaagcatgcctacgaagagttggaacacaaaggaatcatcacaatgactcgcggcaaaggaacctttattcgggagcaggccagacaggaaagcagtgccaaggtgcgcgctatggcggcaatcgagcgattgctggatgaaatggaatctttgtccttttctccacaggaaatacagatgttttttaatttgaaaatgcgagaaagaatggagtgcgacgataatgtatgcatcatttttatcgactgcaaccctgaaacccttgctaatatcatcaatcagatttctgttctgcccaatattgaagcgcataagcttcttttgaacaatgctttgaaagagccctttgtcatagatgactttgcagatctggtcatcactacttcgacgcatatgaatcaattaagcagtgtcgtttccaacaaggaaaagctggttcaggtggtaacggcccctagcagccctaccgtggcaaaaatggctatgatcggcggaaaatctgttggcattctctgtgccagtgaaacctattcccatatcattcttcgaagcatgcaaaatttggaattgtcctgcaaaaatatagaaacctttttgtttggcagcgctgctcatctggatacttttctacgtcataaagatgttctcatcgtccctaacgattttttattgttttgcagccgtaccgaaggagacttgattcggcaagcggaccaactagggaaaactgtcatccgctacaattatcaaattgacggcggttcttttttgaacgtacaagaaaagatcgacagcatcagagcctcaaaatatttataaaaaacatccggagatatttgtatcatccggatgttttattctttctatattgtattataacaataaacaaagtcttgctttgtttattgttatcctttaatattggcatatttgcagttcttaacaactttttgcaagtttttgtaaaaaccagttgacagttctttactctcagactaatatataggcatagttcaatagtccctaatcatacaaaacaagtaagaggtgcattatggaaaagaaaactttggtcatgggcgttattggtgccgatgtccatgcagtcggaaacaaaatcctctatcacgcgtttaccgccgctggttttaattgtgttaacttgggcgtaatggtatcgcaggaggaatacatcaacgcagccattgaatccaatgccgatgtaattgtggtctcttccctgtatggccatggtgagttggactgccgtggtatgcgtgaaaaatgtgacgaagcgggtctaaaaggtattttgctttacgtcggcggcaatattgtcgttggtaaacagccttttgacgaagtggaaaagcgttttaaagccatgggctttgatcgtgtatttggaccggggacacctccggaaaccaccatcgccgccttgtatgaggacttgggcgtacagccccctgaagagaccgaagaataaggagcgcttgccatgaaaccagtattgctcatggattttggcagtacatataccaaggtaactgctgttgatgtggacagcgaaacactgcttggtacagccagcagttatactacagtccaaacagacattggagaaggtctccagaatgcactgaatattctggaacaaaagaccggtaagctggacttttcagagcgctatgcctgttcctctgcggcaggcggattgcggatgatcaccagcggcttggtaccagagcttaccgccgaagctgcaaagcaggcttctcttggcgctggggccaaggttatccaggtctattcctatgaactgaccaaaaaagacgtagctgagattgtttccagtcatccggatatgttgctgctcgtaggcggaactgatggcggaaacagtgaatgcattctggccaatgctcgaaaactctctcaagtagaacccatttgcccggtcgtcattgccggtaaccgcaattgcgctgacgaatgtgaagaacttttggagaattgggaaacacatgtctgcgaaaatgtcatgcccaagtttaacgagttaaacattgagccagcccagcatgaaatccggcagatatttttaaatcgaattattcatgccaaaggattgagtaaagctgcggaactgatctctggtattttaatgcccactcctgctgctatgatggccgctatgcagctgttggcagaggggactaagaccgaatccggcatcggtgaactggttgcagtggatctgggcggtgccactaccgatgtttactccattgcagacgggatgccaacacaatccaataccattgttaaaggattaatggaaccctacgctaagcgtactgtcgaaggcgacattggaatgcgttacagcatctggggaattgtggacgccgcaggaattgatcgggttagtcagctgtctggaatcgcaccagaacgggcaaaagaaatgattcagtttctttccgaaaatacggaaacgcttcccaaagatcaagaatgggaaaatctagattttgcattagcctccctcgcggtagagacagctgtagcacggcatgcgggcacgatcgagcaggtgtatactcctatggggcttgcctactcccaaattggtaaagatctgacccctgttcgccgtgttgtcgtcaccggaggagcaattatccatacaaagcgca

SEQ ID NO: 3896 - DNA, 13014 bp, Unknown
  16S sequences of unknown bacteria
aataggcaggcgccgactcttcgccgcccctccggtttatccggagggcctttttctttttggtaaatagcttagccttttaaggggtatataattttcaaaagaacacttcgccaaacccggtaaaatggtttttttaacttcgcgaataaaaccgcatcgtttgcagcttcatgatttgcaaagttgggtatcaaaaagaaggagattgtctatacccgatcattttttcaccccctgcacctctccttccctttgttttatactgacgggagtctctgccttttctgcttttattttgcggggggtgttcccttttttgtggaaatgtagtatgataaattatcatgtgagtatcgatctgcccaatcgataagcgaaaagacgccggtttgagtcgggcggaaaccaaaaatgctgggagagagcaagacgatggcatacggcaaacacattgatgaaaaatggcaaaagcgttgggaagaggagaaactctatcgatttgatccggacaaggacaacaagctctattgcctggagatgttttcctatccttccggggcgcagctccatgtcgggcattggtataattatggactggcagatatctgggcccgggcgaaaaaaatgcagggattcaaccttttccatccccagggctttgacgcattcggcctgccggcggaaaactacgcgatcaaaacggggattcaccccaaggattccacctaccgcaacatcgactgtatgaaggaacagctcgtgaaaatgggcgcctcttatgactttgactatatggtcgtgacctgcgacgaggcatattataaatggacccagtggctgtttctcaagctgtatgaacgggggctggcctatcgggccaaagctccggtcaactggtgcccgtcctgcaagacagtgctggccaacgagcaggtggtggagggttgctgtgagcgctgccacaccgaggtcaaaaaggaacatcggacccagtggtttttcaagatcacagagtatgcccagcgtctgctggacgggttggagggccttcagtggccggaaaaaaccaagaaaatccaaaccaattggatcggcaagtccaccggcgcccaggtcttgtttaaggtcaagggacaggatatcgtcctgcccgccttcaccacccgggtggatacgatattcggcgtctcatttgtcgtgctcgcccccgaacgggagggcgtgatggatctcgtgacacccgaacaacgggatgaggtggcacggtatatcgaacaggccaagaaggtcagcgagatcgagcggctttccacggttcgggaacgcaccggcgtctttaccggcgcttatgcggtcaatccggtcaacggggaggaaatcccgatctatgtcgctgactatgtgctggacacctatgggaccggctgcgtcatggcggtaccagcccatgatgaacgggactttgactttgccacccgctatcagcttccaatccgccaggtcatcgcctccccggatgggggagccgaactgcccttctgtgcttacggccggctggtgaacagcggcgagtataccggcttgaccagcgaagaggcgcggaataaaattgccactttcctcgaatccaaggggatgggcgaacacaaggtctgtttccgactgcgggactggctggtttccaggcagcggtactggggcgcaccgatcccgatcatctactgcgaccactgcggggaggtgccggtcccggaacaggatctgccggtcaagctgccatatgacgtggaattccgtccggacggggattcccctctggcgcaatgcccttcctttatggacacggtctgcccgaaatgcgggcgtcccgcccggcgggaatcggatacgctggacacgtttgtggattcctcctggtattttttgcggtatccggataaccgcaatgcggaaaaggcatttgacagtgccctcatcaaccgtttgctgccggtggatatgtatgtcggcggagccgaacacgcggcgatgcacctgctctatgcccggttcattaccaaggtgctgcacgacatgggcctgatcgattttgacgagccgttcctgcgcctggtgcaccaggggaccatcctaggcccggatggcaacaaaatgagcaaatccaaggggaataccatcaaccccgacgactatatcgagcggtacggctcggatgtgttccggatgtatctggcttttggcttttcctttgtggacggcggtccgtggaacgacgacgggattaaggcgatctcgaagtttgtcggccgggccgaatccttcgtcgatgcgttcgtgcgggagccgggcgggacggatgcctatggggacagggagaaggagctcgattttgtccggcacaacaccctgaaatgtgtggcaaacgacgtcgagattttccagttcaacacctgcatcgcccgcctgatggagctgtacaacgcgatggccgcctacaagaatgggccggtgaacaaagccttcctgcagggggtcctggacgatttcgtgcggcttcttgcctgctttgccccccatttcggggaggagctgtgggagaggctcgggcataccgcctcggtgtttgaggagcagtggacggtctatgatccggcccggctggtgcgggacgagatcgagctggtggtgcagctcaacggcaaggtcaagtgcaagctcgttctgccgcgggatctctcccgtgaagaggtacagagccgtgtgctgcaggatcccaaggtggaggagctcctcgagggacgggcggcccgcaaggtgatcgtggtgccgaataagctgtgcaacatcgtggtatgaggataaacctataccgaaggcccggcggcgtatgccgggccttccttgtcgtatacaaaaaagccggagcaagcgacacaaagcttgccccggtgtgttaagcggctaaaaatttttttgtgcgtttttggctgatgacttcgaaccctcacattggacaaaactttaaagcagcggatgccggttaatcccgtaatcatgcgaacttcttagtgttttcaaatcagacaaagatggttgaattgaatggcatttattatctctattttctattttcaacctttgttttaaagctcgtgaaaccgtataaattcgggtcttataacaaaaacaccattgatgtccgagccttaagggctcagatgccaatggtgtttttaattttagttgcttttacgactgcaaatacttctttgtgtcgctatggtaagcagcgtatcagcgagttgcgttagggtcacacccagcaggttcaattcatcctcggtcagtttgcaggcgagcgcattggctatagcagtgatggaagctgtcaattcacatgaattcacgaaactcacctccatgctattatatgaatatgcggctggaatgtgtgttcgttacccttccagtcacgctttgaatgtttgaatatcaatttttggagggacttttctcataaaggacaaactttaagtttcggtcacacaccgctagaaaaacgtcttgtggggactgaatatgccgctgctttagctgcttatccagccaggttaaatccagccccatgcgttttaaattatcctctaaaatgcggccgtccatgattagctctgtgaataacagttcctgttctggggctaaatgcatatcgtttggtgtggcagggcgctgactgcttaccggaaggatcgtaagctttccattgtattcaaaaacagcggtttggatattcgtcaggtcaaagtatccttgctgcctgcacataaccatgaactcgcttagatccagcttggccttttttaaattttcatagtacaatttcccatgatccatgaggatagtaggggtaccgttgagatatttgcgtgttctcggaaatttgttggaaatgacactcagcagcagggttacgcctccgtatatcaccatggcagtaagcggtttccagggctcctctagctctgtggccatttcagccgcaatggagccaatggttattcccgtaatgtaatcaaaaaaatccaactgagcaatttgtttgtgtccaataaacttggccaccaagaataatgcaccaaatgaccctaaggcggtcaggcaaagcatcagaaagcccatacggcaatccccctttccctatattctagcctaaattgcagcaagcatacacgaataggcagcgcgaactctcaaataatgttcaccctaacattagtggctgcataatatatagtaccagctacggaaaggagtgtacgacatggaaaattataattgggggcgtggttgtaacggctgcgaaaccgatcatggcccaaagccgtttgttacgaatataatgcgtgtagcacggcaaaatcaaaattttcgtacagcgttttggacagggtgtcacttacagatgaccctgatgtgtattcccccctgcggcgagattggagtggaaatgcaccctgacacggatcagttcatccgtgtggaagaggggcaggcgcttgtccgcatgggagattgcagagaaaatctggacttccaatgccgcatcggtacgggggatgccatctttgtaccgggcggaacatggcacaatgttttcaacactggaaatggtccgctgaaactctcatctttctacgcgccgcctcaacatccaaaaggtaccattcaccgtacaaaggcagattccgaaaacaaagagcattgactttactgcttaatcagcattggctaaattaaggtcgcgctgcccaaacggaggctgcgtacaactggggaatattccctgcccttctttctatggtggcgtaacatatttgcattatttatgtgtgtctcttaaaggtgcttgcgcggtaaagcagacatacaatgatatatgcgatttgcaacgatttattggggcttattcgagattgcagatgctacagataaaataaaaaccaccgatcaacccgcataattgcaaggtttttcggtggttttcattggaaagcgttgacaaaaaagatacctgccataaacgcgggcagaagatttaataataaaaaacctgcggtgcgcgatttgctcaccgcaggtgtggtccgcccggagggattcgaacccccggcctttggaatcggaatccactgcgatatccagcttcgccacgggcggacataaaggccctgctgtccacagagcaacactattttacaccgtcgtcgtgatttctgcaacccccaaatggctttttttcaaaattttcctctctatacaaaaaaacacgccaaacagccgctgatccctgtgctttggacagaagaaccgggcggtggtaaggcgtgttcccagctgatggatacggatccgggttcctctccgatcgcgtaaggaggtggccttgccctagacccttcaaaacgaacaccgaaggcgcccccctctttcatgtccacgggagcgcgagaggccaagagccgcacacccgaaaagggcgtgcggctctgtctatcatctcaggacggcagcgggtgctccagcctctttttcgtaaaaagccgggttgggcgcggcggacttcagccccatccggctgccgattccactgaccacccagcagagcagcagggagacgagcatcgccaggcacgcgaaatggggaccgaggcctttgagggggccgaaaaaaggcaggctggccgaagggaagaagagctgggccagcagaggcggcagggcggtggcaaacccgccgatgatccccgcccaggcccccgcccggttaatccccttccagtacaggctgagcgcatagggtgcgaggaaggagccggaaataatgccccaggaataggacatcatgtcgaggatgggggtcttgctgttggcaatgacataggacagcactacaaaggcgaggcagagccctttcgtcacccaggcggcttttaccttgtccagccgtggggcgtggggttggatcagatccatggtcagggtggaggacgccgtgatggtaatggaggacagggtggaaaccgacgccgcgatcagcagtaccagcaccacgccgatcaatacggtggggatgcccgactggtccagcatgttgggaatcaggtaatcgggatgcccggccccgccggcgggcggagaaggcagctcggtgaaaaacaggcgggagaaggacccgatgaagtagcctcccccggccaccaccagggcgaaaaccgtcgaaatgaccgtcccacggcggacttcccggtcgtcccggatgccgtagtatttgtggatcatctggggcagtccccaggtcccgaaggaggtcatcagcaccgtcgcccaaagcccgatgtgctgtgcggcggtcaggtgcaggccttcggtcgccttggtgatggcctccagcccggcggacagccctcccacctgatcgcagcggatcaccgccgcgatcagggcgataacccccgccagcatgacaatcccctgtacgaaatcggcccgcagggtggcggcgtatccgcccaggaccacgatcgccgccgcggccagagcaatgaccaccatgcatacccgttcatccaccttcagcagcaccgcgcacacactggtcaggcccttgtaaaccgaggcggaatagggaagcaagaagacaaagatcacggccacgcagaagcgcttgatccccctgccgccaaagcgcttttcaaaaaattggggcatggacttgattttgaggcggcgtgtggtctctctcgtccgcctggccagaaccagccaggccagcagggagccgatcagggcgtttccgataccgggcaatacggcccacaggccatagtcccagccggatttcccggcgtagccgataaacatgacggcggaaaaatacgcggtgccgtaggaaaaggccgacatccaggccccggcattccgcccgcccaccgtaaagtcggtgatggttttggacttgcggccggcgaagactccgaccgccagaatgaaaacggcgtaaaccgcaatggtgatccagatcaccagctctttggacatagtttccacccctcgatactttatcactttaaaccgttgcggtttaaagtggatatgtacatcataccggaaagacagaaaatttgcaagagggcggctaaaaaaatatcagactttttcgatttgcctccgcccctatctttttttaggaatttatggtatattaaaacgggttttgctcctgtaaatgacgtctttgggggcggcagtggaatttatcaaagggggatgaaggcatgatgcgccaaaaagtccggataccaagcatcctttccgcgctgttctttgccttgtgcggtttgatgtcgctttatctgacatacaaaacggccggcaacctgctggattcggacgcctcgagcgaattggtcctggcccgtctcctagcggataccaaccagattctgtcccgtgattggttttactcgaccgagctgcgggtgctcaatacccagctcatttacatgccgctgttcaaaatattcagtgactggaaactggtgcggtttttcggcgcgcttttgctgcaggccatactggtgttgtcctattatttcctgtcaaggcaggccgggttttcgcgcaacgtgttttttctcacggggggactgctgcttctgcccgccagcacgccgtatgcgcggatcgtgctgctgcatagctattatgtgccccacatcgccatcggttttttcctgctggggctgttgctggggttcgggaacagagagaagaaaaagggactccggatcgcctatctggttctgttcctgctgctcagcctgttaagcggactgggaggggtgcggcagctgctggtgacctttctgccgctcctcgcggcggctttcctgctgctgttgtgttcggacggcttccgtggcgtcacgcatgaggagatggaagccggctccgtatccgccctgcgccggctgcgcacggcggcctgctgccgggaggccagaacgctgtacctgtccgccgccggcgcggcgtttgccgcggtcggctatctccttaacagccgggttttggacgggatctactcctttacgaattatggggggatgcggctgaaaaacccggcggtgggtgacgtggatcccctgttctcggcccttctggaactgttcggatacaaagcgaacgccaaggtgttttccaaggaggggatcgcctctctgttgggcgcggcttgcttggtgctcgtcctattgatggggctctatctggttgtccgtatccgccgggtggagacattgccctggaggctgctcgtcctcttcttcgtctgtacactggtgctcaacacggtggtgtttttactgaccaagacgaccctggcgctctattacatccctatctttatttatttcgtaccgctgctggcggtatggctcgggcaatgcaaacgggctttcccgcccctgtggtgcggcgcggccggcctggtcgcggccgtctttttcgggaacagccttctcatcacgcattactttgtcaaaaaaccgcaggattccccgattgtctacagcgggctcgtctataccgaaagggacacggtggagcatctgacaccggtcgtcggcttcctgcaggataacgggtacaccttcggttatgccaatttctgggacgccaacgtcatcaccgagatgacgaacgggcagatcgagatggtcaataccaacatcggccagcaactgaccccctataactggctgatgtcgaaaaaactcctggaaccgggatatcacaccggcaaaacgtttgtgctgctgtccgcggtgggagagaaatcctcttccgacgccggctacgattggctgaagcagggtgaaaaggtctactccgacggccggttttcggtgtatgcgtacgacgggcccctgctttaagtcccccgtgggcggacagcgtccgtgcattcgagcaaaggcggttgacctgcccgcgcggttgctgtataatgaatcgtcatcgagtttttctccgcgacttccgcaagaaaggcggcaagaactatgaaaaccttgagcaaaaacggcctgagcggcgtcatcgagatctgcctgctgctgatgatgctgctggacctcgttttgatgattacccttccttggacggtcacctggacgaccaaaagccatccgggggaggaagggatgtggtatgaaaaatacctcatcgtgctcctgatttcgggatttgtcgcggaattcatcctctggcaggcacgcggcatcatgcacaatgtcaaccgcaaccggccgttctgccgggatacggtccgccggctgcggctgctgggactcctgtgcatcgtgctggcggcattttatttcgtcgcgattttctgggtggcgcgttttttcatggccctggtctgtgtggtgttcgggctgatcggcctgatcctgttcgtgttcgcggaattgttccgccaggcgacgaaatataaagaagaaaacgatatgacgatatgataccgatggtgtggaaaggcgtgtaacgcatggcgatactggtcaatttggacgtcatgatggccaaacgaaaaatggggctgacggagctgtccgataaggtaggcatcacgttggccaacctttccatactcaaaaacaataaggcgcgggcgatccggttttccaccctggacgcaatctgcaaggcactcgactgccagccgggggatatcctggaatttacagacgaatgagccgtccgccggcgccgcggaagcggccggcggacggcttttcagacgggtttcagacagaggaggagacggatgttcatcgggacggtggaaatcagaggctgggccgcgctggccccaatggccggcgtggccgatcgggcttttcgccgcatctgcgcggacttcggtgccgcctatgtcgtgggggaaatggtcagctgcaaagggctttgcttcggcgataacaaaagcgaggagctccttatcctcgacgaggaggaacggcccgccgctgtccagctattcggagacgatcccgggcggatggccagggccgccgtcctggccttggagaaagcccgtcccgatgtcatcgacatcaacatgggctgtcccgctcccaaaattgcggggaacgcctgcggcagcgccttgatgcgggatccggagctctgccggcggatcgtcgcggaggtatgcgctgcggtgccggtgccggtgacggctaagatccgcaaaggctatgcacgggagcaggtcaacgccgtcgaggtcgccctggcctgtgaggccggcggtgcggcggcggtgacggtccacgggcgcacccgggaccagatgtacgcccccccggtggactgggacattatccgccaggtcaaggcggcgctgcatatcccggtcattggaaatggggatgtcacgactccgcaggcggctgcgaacctttacgaacagaccggctgcgatctcgtgatggtggggcggggggcgctcggaaccccctggctctttgcgcagatcgaggcttatctgcgggacgggaccctgctgccgccgccgccggtgtccaaacggatggccgtgctctgccgtcaggcggaactggccgccggatataaaggggaacgcctggcgctgctccaggcccgcaaacacgcggcctggtacatgcgcgggctgcggggcgccgccgagtacaggcgggcggcggggactcttgaaacgatggaggatctgtacacgctgtgccgccgggtggcagaggaaaccgcgtccgagcaggcgctttcccaaccctttgccgaaccggacggcgggattccgggataatccattctaggcggctggagtgcgccgccttttgcagacaagacggagcagacgattttcgtctgctccgtcttgttccggcggcataaaagggatggggccatggcctgcccgatcgctgagggaatgcggacagtggagcgccggcgggcagaaaatttttttacccacccaatgaacaagctgtttctgacactttacggttgaaaggcaggtgagaatgatgaaagcggatgttcttgaaaactatatcgaaagggtatatggctttgccgtcaatcacacattttcaagagaagaagccgacgagctttcgcaggaaattttgtttacggctgtacgggaactgcccaaactgaaggattgcagccgattggagccctggctttggggaattgcaggcaatgtcacaaaagtattccggcgccgcatgggacggcagcgcgcgatgtattcctatgacacgcttgaacatgttccgtatgaagacgaatacggcgatgagaatgaggagctgtacgatgcgctccggaccaaaatcgccatgctttcggaaacatatcgccatatcatcattcttttctattacgacggcctttcgacaaaacggatttccgaaaagctcagcattccggagggcaccgtcacatggaggctttcggaggctcgccggaaactgaaaaaggagtgtgtggaaatggacaaagcggcgttaaagcctgtaaagcttaccatccgcatcaatggagacggcaattacaaggatccgataagccccttcccgcatgtctacatccaggatgcgttatcccagaacatcctgtatcattgttatgagacgcctaaaacggtggaagagctggccaggcactgcggtgtgccggcgtattatattgaagactgcctgcaaaatctcatataccgcgaagccatgtccgagatttcaaaaggaaaataccaaaccgattttatcatctattccgacaagacaaacgcgtatagtgacaaggcaaaggggatcttcacgccggtcatcgaccgctttgtccagtcgatgaaggcgctcgcagacaggacggacgcgctcggaatatacactgccggaaaggcagcggacgagcggatatatctttacgggttgatggctctcgaacatctgagccaacagcacaatcccgtcaggtgcacggctcatccggtgagatacgacggtttccggtggagctaccatgcgtaccgaatatccgatacgcaatacccgatacgcggccttggccgtgagcagtcggccaacaagggaagcagagggacatatcaacacatatcgtatcatttcggcggatttgcataccgtgaaatgatgctgagtgaccagatcaatgtatgtgaggacatcctgcggggaaaaaccgtcaccgatacggaggccgcggcatcggcgatcgaacgtggattcatcgcacgggatcaaaacggcaagctgtctgtcgctgttcccgcatttacaaagaagcagtatgaagcgttcacccgcttggcggaagaggattttgcgtcctccatcggcatgtacgcgggcgcggtatcggagtatgtggccggatatcagaagctgtttcctgcgcgtcttgaggaagaggtcaaacgagcgtgccactacatgtttttgacggtctatgccaccattatctgtgatatggccagggagagaggcttactccgcgccccctctcccgatagtgtctgtgatgtgatgattcagtcaaaggaagacgctacggttttatgaccgaagtacctaagagcccggctgcttctaaaacattgtgtcaaccccaggccggagaaagcattgtctcgtgtatgctggcgtttgggtcatccatctccgcacagagaagggaggcaaagacgcagggggatttgccggtttcccaaaatagaaaaccggcggcagccgtatctccttcatccactccaaatactcaaggctacggccccaggactttggtgctcataaacccatgattttatagccatccaagccctcggggcggcagccccttttttgtatataggcggggttgggcgtccgc

SEQ ID NO: 3897 - DNA, 9377 bp, Unknown
  16S sequences of unknown bacteria
acttctgcgctcaccatttgcaggacgatcagctgccggtcttgcaggtcttgctacaggtgctgctgcaccttcgcgtttcggtgctgctgttgatgctgcaggtgctgccgttgtccctgcggacgctgttgctccagctggtgctgttgccggctttgccgctgccggtcttgccgctgccggtcttgccgcaggttttgctgcgcttttctgagtctgcggacgacgctccggactcttcttgtctctgctgttctccggattgtgtaccactacgaattttttcttctttgccggagctgctccttcttttttagcttcctgctgcccggaacctactgctccgcgcaccagttctgcctgattatcttcaagtgttgccatatgtgttgtcacctcaatattcttctctgccagtacggccatgatttctttgcttgttttgttcagttcctttgcgagttcataaactctgatatgcttgtttggcatgatttccaatgcccccattccctgtatttactctaatacccggatcgccgcagcggccagtccttcgtcttccactgctacagacattcggaattccttcccacatgctgatcccagttctgcgctgctgcacgctacatacagcggtactttgtaatactcgcagagactgcggatcttcttctttgtattttcagaggcttcctctgataccacaaccagcttcgctttgcccttgcggacagaattctccacagaaaattcaccgctgacacttttgcgtgctctggtcgccagcccgatataagagagaactttagctttctgcaattgcttccatctccttttccagggcttcgtatacttctgccgggatctgtgccttcagggatctctccagtcctctagattttactgctttctggaagcattccctgcttctgcacagatatgcgccgcgaccgtttttccggccagtggcatccagcacgatttcattctctgttgtgcgtaagatgcgtaccatatctttcttgttcttcatctcaccacagccggtgcactgacgcatcggtacttttttcactgttcccaaactgtccgctcctattcctctgcgttctcgtcttctacagtaccttccgcatactcattttcatcatatgcttcctcttcatcctcatcttcatcgtagaatccttcgtagaatccctcgatggcatttgcctgactctcgctcttgatatcaatcttgaagccagtcagacgtgctgccagacgtgcattctgtccctctttaccaatagcaagggaaagctgataatccggaacaacaacttttgctgtcttctcttccacatctgccagaaccacaacaacctttgccgggctcagtgcattctcgatcagaagtgccgggttctcattccagttaatgatatcgatcttctcaccgcgaagctcattgacgatagagttgactcttgcaccattcataccaacacatgctcctaccgggtcaacatccggatcattggaccatactgcgatcttggttctggagccagcctctctggcaatgcttttgatctctacgatgccatctcttacttcagtaacctcagattcgaacagtctctttaccagctccggatgcgtacgggataccaggatcttcggtccttttgtggtgtccttaacttccagaatataaaccttgatacgctcggtcggagtatatacctctcctttgaccatctcgttctcgttcaggatcgcatctactttaccaagatttacgctgacatttcttccaatataacgctgtaccacaccggtaaccacgtctttttcttttgcataatactgattgaacagaactttacgctcttcctcacggatcttctgaagaatcacgtttcttgcattctgtgtggtgatacggccgaattctttggatttgatctcctcgcggacgatatctcccagctcgtacttcttatccagaagcttcgcttctgccaagctgatctgagtatccggatcctccacctgctccacaacagtcttctctgcatatacatggaaatcacaggtatctctgttgatctctacacggaaattctctttttcttttccgaaatggctctgacatgcagtgatcagagaattctcgatagcatccagcataacatccttgctgatatctttctctttttccagaatctccagtgccgttttcagttcagtgttcattttttgttctttcctccttaaaaatcaaacgccagccggatcagcgcgatgttcgaccgctcgatcaccagtgtggcttcatcctcaaactccaatgttactgtatctttatcccatgcttttaagataccggtgaattccttctgtctgtcgattgcacggaacagcctcacatctacggactctccaatacttctctcaagatctttgtctttcttcagcggtcttccaagccctggggaacttacctcaagaatatagctttcctcaataaaatcctgttcatccagaagatctgacagtcgtctgctgacggtctcgcagtcatccacgccaattccacccggcttatcaatgtaagctcttaagaaccagttgccggcttcctttacaaattccacatccaccagttcaaactgatgctcttccatgatcggaagcaggagctgctctgtcttctgttcatatgtctctctcttagtcaatcttatcctccttctgaaaatctcctatacaactaagaaggagtggacttttgtccacccctttcttcagtctacgtatcatgttattcccagtataacacaacatccactaaaatcaagccttttcgcaaaaaaagttactattcacagcgaaactggagcctcttaacagaggcgacgagtgcgcatgtgggtggagttctgtgaatattctttaaattcttgctacagtcttgccactccggtctttcttgcggcatctgcaacggcagcagccactgccttgcccactctcggatcaaatgctttcggaatgatgtaatcttcgctgagttcttcctctgtgatcagatctgccaatgcgcgggaagctgcaagcttcatctcatcattgatatctttggcacgtacatcgaaagccccacggaagatacccgggaaagccagcacattgttgatctggttcggaaaatcgctgcggccggtagcaaccactcttgcgccacctgcttttgcatcatccgggaagatctccggtgtgggattcgcacatgcgaacaggattgcatcctgattcatggtcttcaccatctcagttgttaccacacccggtgcgctgactccgataaatacgtctgcaccaaccagcatatctgccaggcttccgctgcgtttctccagattggtcatttttgccatctcttcctttattggattcataccttccgtacgtccctcatagatagcacctttccggtcacacagtgtgatatgtttcacgcctgcagtcaaaagcagtctggtaatagagattgctgccgcacctgccccattgacaaccacttttacttcctctttcttcttgccaaccagtcgaagagcattggtcagtcccgccagtgtgataatggcagttccatgctgatcatcgtggaagatcggaatatcgcatttttctttcagctttctctcgatctcaaagcagcgcggtgcagaaatatcttccaggttcacacctgcaaagctgccggagatcagataaatggtattgacgatctcatccacatcatggctcttgatgcacagcggaaatgcgtccacatcaccaaatgccttaaacagtacacattttccttccataaccggcatacctgcctccggtccgatgtctccaagaccaaggaccgcacttccatcggtcactaccaggcaaagattgtgacggcgggtcagttcatagctcttctccacatccttctggatctccagacaaggctgtgccacacccggcgtataagccaaagacaggtcatcctttgtagcaaccggaactgttgcaacaacctcgatcttacctttccattcctcatgaagtctcagtgactcttttgcataatccatataaatatatcctccaatattttttcagttaatcatcagcgggaatttgccagtgcaaataccgccagcacccccacaccggtatgcgcaccgataaccggtcccacatactcgatctgcacattttccattccgtaatctgtgatcagcttctgtttgatggcctctgcttcctccagacagtccccatgactgataaatacggtcttctctccgtccctgatccgttccatcagatctttgataattgtctggatcgctttttttctgccgcgaacctttccgatcacttccagttttccttcttcattgacccggatgatcggcttgatccccaccatagaaccaagtactgcactgcttctggacactctgcctccacggtaaagatgaaacagatcatccactgtcacataagaagcgatgtagtctttatttttctcacaccagtcagctacttcatccatagaggcaccctgttctttcagctgtactgctttatatacaagaagtccctgacccaaagccgccagcagcgtatcgatcacgacaattttacgctccggatactcatcctgcagctcttccgctgcgatcctggcactctgacagcttccgcttaagcctgaagaaaatgccagatgcagaatatcttttccttctttcagcaatggttcaaatgctgcctttgcctgctccggattcacctgtgacgttgttggcatggctccttcccgaatattgtcatacaactgttttggtgtgatcggattctctgaattgtaaatctttccgtttaagatgcagctcaaagaaatcatggttatctgatgctctttcagataagcttctgaaaggtctgcactgctgtcggtactgatcacataagatctcatggtttctgtcctcctccatatatacaattaatagtttccaagaatcttgaaattaacagcctcttccataataccgcggatcgcatttttcaccgcactgtcatccagattgccttcaaaatccacaaagaaatggtattcccagtttctctccgggatcggtctggactcaatcttacacatattaagatcgttataaataatatgagacaaaatattatagagacttccactggtatggggcagttcaaaacagatgctcaccttcttcgcatccgcctcatacatcttccggttggtaacaatgatgaaacgagtggaattgaaacggttatgattgatcggcatctcaagcacttccagaccgtgatagccagctgctgccgggcttccgatagctacctggcttctgtccttgtcttctgccactttcctggccgccatggccgtattggaaagactgatccgctgccagtcagaatgcttatccagatagacagagcactgcatcagtgcctgcgggtgagaatagaccgttcggatctcatccagagatgttcccggcagtcccaacagggcatggttgatcttcaggatctgttctcccacaatgtaattgtcatattcttccagcagatcatagatatcattgacttctcctgctgatgaattttcaataggaagcacagcataatctgccacaccttccttaatagcttccatgcagtcccgccaggtcggaacatgaaacgcattggcatctttgccaaaatactgcagggttgcttcatgtgcataagcaccttccacaccctgatacaccacacgacagtgctttctgtcaatatggtcaattcttgtaaatggaaggtttccggagactccttcctctgccagcagctgatattgaagcttcctgctcatagccataatctgctgaaacaattcctggattccatgacggttgaagctgtcattggtaagatttcccagagtttccagcttctccagctctctcgcccggtccagcactttctttccattagcaatcttatattctgccacctgacggctgacacccattcgttcctcaaaaagctccacgatctgccggtcgatccggtcaatatcctgccgaagcttgcttaaatcttccatcttactcctctctgcccgtcttcttccacaccagacgggtcatctcgcccagataggataacgaaccgaatgccacaatggcatcctctttttctgctttctcatatgccaggtccacagctgccgcaaggctttctgcagcctgcacatgagagttgtatttcttcaccgtattggccagctcttctgccggcaacgccctcggattgtccggtgtcataactgtgatcacctctgctgccagcgatactgtctgccggaccacctcttcatattccttatctgccagcacacccatgataaagatcagcctcttgcccgtcagatcccgctctacactgtcacggaatacccttgctgcatcccggttgtgggcgccatccacgataaacaacggatctctggcaatggcactgaaccgtcccagccagactgtcttcttcataccggctttcagtgcttcctcaggtatctcatagccttttctcttcagctcatccagcacttccagtgccagtgccccgttcagaaactgatattctcctgcaagggcgatctccacctgcgcatgttctttgtaactgaagatctgaccttccagtccacgcttctcgatctttatcttctctggctctacacagatcagttcacagccttcctgctctgcttttttccaaacagacacagctgcttccggctgctgacttgcactgaccactgtacatccaggctttatgatccctgccttatgctcagcaatctctcccagcgtatttccaagaaatcccatatgatccatactgatggatgccagtacagccaccttcgtattcctgatcacatttgtcgcatccagtctgccacccatgccgacttccagtaccaccagatcacagttctgttccgcaaaataaagaaatgcaatggcagtctccatctcgaacatggtcggatgctgtctgccttctgccagaagctggtctcctgcagccttcaccttctctgtcagccggatcagctcttctctggaaatataggattcattaacctggatccgttcccggtaactgaagatcgttggcgaaatatatcttcctactttatatccggcttccttcagaaccgtcgatacataagccagcacagaacccttcccattggttcctgcaatatgcacaaaagtcaactgatcctgcggatttccaagcaggctcaacagattccggatcggttctacactgaattcaccagaatactgattgcagtctgcaagatatgtttttgcttcttcatatgtcatgtctgtcacactttcatccgtttactatcaaataatccagaacctcattcgcaaaagcccgaatcactatcagtatagtataatctgtcacatatttcaaatactatggacatgatgaaacgaaattttttattatgtggactccttggatggtcccttgaaatcttctggaccggtcttcattctctgtttaaaggagacagacagctcatgggccactcttccctgtggatgtttcccatctacggaagtgccgctttcctggctcctctcatgcgcatactccagaagaactgcatctggaaaagaggccttatctatatgttatgcatctatctgggtgaatatatcagtggaagactgttaaaaaacaaagatatgtgtccctgggattacagcgactgcccgctccagtatcaaggtgtgatccgctttgattttgcaccgctgtggtttctgacagggcttctgtttgagcgggtgatcctgtgcagatcaggcgatcagaattctgaattttcgcaaaattaggtcttgctttttaagatgtgatagtgtattctcttgggttagggagatttgaagaatacactcccacatctcaaaaacacacttaggaggtatctatgagacatctgatgagtcctctggatttcagtgtcgaagaactggatcagttattgaatctggctcatgatattgaattacacccagagaaatacgcccatgcctgtgacggcaaaaagctcgccacactgttttatgaaccgagtacccgtacacgtcttagttttgaagctgccatgttaaatcttggaggcagtgttttaggtttttcttctgcggcaagcagttccgcttccaaaggtgaaagtgtttccgataccattcgtatgatttcctgttacgccgatatatgtgctatgcgtcacccaaaggaaggtgctccgatggtagcaagcatggcttcttctattccggtcatcaatgccggcgacggcggtcatcagcatcccacgcagacattaaccgatcttcttacgatccgttccttaaaaggacggcttgatcattttaccattggtctgtgcggagacttgaaattcggtcgtactgttcactctctggtacgtgcactgtcccgctatgaaggtgtaaactttatcttcatctctccggaagaattaaaagtaccagattatattaaagaagatgtattggaagcaaataacattccataccaggaagcagaacgtatcgaagacgtaatgccggagctggatgttctttatatgacccgtgtgcagaaagaacgtttcttcaacgaagaagactatgtacgtctgaaagatttctacatattgaataaccagaagatgaagctggccaaagacgatatgatcgttatgcatccgctcccaagagtgaatgagatctctgtagaagtggacaaggatccgcgtgctgcttatttccgtcaggtacagtacagtgtctacgcacgtatggccctgattctcacattgctggaggtaaaagtatgttaaatattggcggacttcacgaaggctttgtacttgaccatatcgaagccggtaaaagtatggagatttataaatatctgaacctggacaaatttgactgctgtgtagcgatcattaaaaatgcacgcagcaacaagatgggcagaaaggacatcatcaagattgaatgccccatcgaccagatcgacctggatgctcttggttttattgatcacaatattacgatcaatatcatcaaagatgataaaattgtggagaaaaagaccttatctcttccgaaagagatccacaacgtagtcagctgcaaaaacccgagatgtatctcctctattgagcaggagct

SEQ ID NO: 3898 - DNA, 3220 bp, Unknown
  16S sequences of unknown bacteria
ggtcattgacgaaaagaagctggaggcagcggaggtagccgccgggggccgccccattctggagttgctgccctatcggctgaaaaaagccgcggtcatcaccaccggcagtgaggtttttcacggccgcatccaggatcgattcacccccattgtcgcacaaaagctggcggcctttggcatcacgatgacggagcatgtcaccgtcgacgacgggatggcgcacttgctggacgctctggccgccatgcggcagacggatgttgatctgatcctctgcaccggcggcatgagcgtcgacccggacgacaacacccccggcgcgatccgggccagcggcgcgcagatcgtcacctatggcgcgccggtgctgccgggcgcgatgttcctattgggctattaccccggcgggatgcccgtgatcggcctgcctggctgcgtgatgtatgccgcggcaacgatcttcgacctggtcttgccccgcatcgccgccggggtccggctggagaagcaggatttcacggtgctcggcgagggcggcctgtgcctgggctgcaagccctgccattacccggcctgcccctttggaaaggtaggtggccgcgtatgagcttcaccgccatggtcatcaccatcagcgaccgctgcgcccaaggccagcgggaggacgccagcggccctctgctcgtgcagctgctgcagcgcgccgggtatactgtcaccggtactgcgatcgtcccggatgaatatgacgttatctgccacgccctgcgccaagccgcgctggcgaacacggcgctgatcctcaccaccggcggcaccggcttttccccccgggatatcacgccagaggccacggcggcggtgtgccaacggatggcccctggcatcggcgaggcaatgcgggccgcctctctgcgcatcacaccccgggggatgctctcccgggccactgctgggcttctggaccgcagcctgatcgtcaacctgccgggcagccccaaggccgcccaggaaaacctggaggcagtcttgcccagtctggcccacggcttagaaatgctccggggcggccaagccgactgcgcaacgctgaactgagccttcgcgccaaaaacggacccggcacaaaaagcgccgggtccgtttttaatatatcctattttatttttccaaaaattttacctgctgccgcagcagctctgcgtgcatcggacgatcgctgctgatcagctccagcaccaggtacgccggctgaatcctgtcgatcagctcttggacgcggggcgttgcaaacggctggtgccgatccacctggaaaatatggccgatgacctcccagatcctggcctgataatcgcccgggaccggctgccaatgctgcatcaggtccatcgccacgtcaccggtcagggattggtgcagatgaatgcccttgataaaggagaggtccgcataccggtccagaatccggtggatgtaatccactgcctcgtccggcgtgcgcagcgcgggattcgtgtgcatcagatggccggtgtcgagcatgacgccgcatttggggtagcgcacctgtgccagaaggcgggctgtcatctccggatccagcatcgtcaggccggggtaccaaaggttttcaaaaagcagccagggcgcccctttgattccatcggtcacggcattgcaaagcgctgccgttgcgtcgatcacttcgtcgtcgcggtaatgataattccgccgcatggattcgatcatcgagcagtcggaaacatggtaaaccaagtattccggcgccatggtgttggcaaacgcaatatcctgccggcaggcgtcctccaggacggacggtgtcttgccgccgtaatgccgccagcaggtctccagatcgccatattccagctccaggcgtggcacatcctgccgccagaaatccatccaccctggccaatagcgcagatgcacgccgatgacatccgccggggcgatcaccggcggagcaaagatccccgcctgcataacctcaagcccgtccaggccgtagccacggaaaaacgaccggagatccgcccggtccgtatagcggcccgtatcctccgcacaggtggtgatattcattatttttttcattggccgaccctcccgccgcttccgtaatgcgttattttaaccgctggggcagcccggcaaagacacgcgtcacccgcgccgcctggctggacagccgcgccaggtagtgccccgtcgcctcgcgccaggcccgcagcgccggatctgccggcaccacgccgcaaaatagatcgctgcacaccagcaccgccgccgggtcaaacccaagccggggcgtctgccccgctgtcagacaatagcggacataatgctccaggccacagacatagtgcgcggagaaatccggcggcgcatcgtcccggcagaaatataactgctcccgtccgacgccgtaggtctgctgtacatagtccagcgcgccctgcccggcacctgcaatgacaagctcccgcactgcggcgcccaccggcggctccagcagcagcggcagcgtccccttatgcagcgtcactgtcgcaccgcagatctctgccacggtatcgcagacggcggctagggcccggtctgtctgggcaaggcatttgcaataatgctgcgtcagcgtgttatagtggccagcgtcgctgtaaatataatctgttataaaaatcacatgggccgcctggcgggaaaacatcagcagctgctgggcaacctgcgtcggccctgcgggaaataccccgtccgcctggagcagctcattttgcaccaatgccgtgacactgtcaactaggactgtcgctccagcccggggcaactggcaacggtcgatccgccgcccccactcaatggtctgcagacccagcccctggcggcggcggacatggtatgcaatccgcgcctcatcctccgcatcccgcggcagcattgtcgcgacatagtatgcggggcccccgcgggccagctgcgctgccagacgcagcgccgtggaggatttcccgtttttgcagccgccagagatcaatagtttcatcgcgcgccctcttctgcaggcccgatcaggcttcaatcaggccgtatttgactttaatgcgatccagcttctccagcagcggctgggagagcacccagaggaaaaagaccgtcgccgccgcgtgcatcatatccaccggga

SEQ ID NO: 3899 - DNA, 2406 bp, Unknown
  16S sequences of unknown bacteria
cagggcagatggtcttcctgatttaccggcacagcaagggggatccggtggtttttcatcagctcctgccgattattctgggcgttgtggcgctgattgccggtcacgcactggccacgctgccggtctttttgggattcccgttggatatcctgtccggtgtgatcaatgcctgcctgctgttttatgcactgtatcaaaagcggttgttccaaatgaccatgctgatctcccggcccaactgcttcattatggcattgattgccggtgtggtgatatcgtaccgctttgtcttgcctctgcaggcatttttgacccagaaggcaggcttgcagcatacacacgccatgatcctcatggccatggcactgatgatggtgatcggcctgctctatctgctgatcgcgtcctttttcaacacactctttgtgcgcagcgggcagcagcaaagtgaactgatggcggcattcagccaggagattacccgccttctgctggtgggtgacattttgcagaagctttccgatgtcattcaggaggcggtgggttcccagcgaatttttgtgctgatccgcagcggcgagatgtataaaatcgtctatacggccagccccttggaggagaagaattttaccttctcccaggaccatccgctggttacatattttaaggagcataccggctgtattttgtatcgggagtttgccagaacgacggtctaccgggggatgtgggagagtgaaaagcggctcttcgcatcattggaactggagtgcttctgcccgctggtgtgtgaaaatgaactgctgggtctgatgctgctgtccaaaaagaaagatcatgtggcataccatgtcggtgatctgaactttctgcagtccatttccaccatttgcgccattgccctgaaaaattcgtgcctgtacgaaaaggcgttggatgaggcccggcgggatgagttgacgggcctgatcagccggaaatatttctacgagctgctggaccgggagtttgacaaggccggaaattccgccctgtccctgtgcgtactcaatattgatgactttaagctttataaccagctgtacggaacgaatgagggagatctggctctcaagcgggttggcgaaatcctgactgccagcgtgggagaaaatggatatgcctcccgcattaacggtaaggaatttgcgctgattctgccgggatatgatacctattccgcaaaaatgctctcggaaaatatcgccaggcagatcggggaaatcaacagccgcgaaaatcggatcggcagccgcctgaccgtcagtatcgggatttgtgctgcgccgtatatggcatccaatgcccgggaattgctgaaaaacgcggatgcggctgtgtacagcgtcaagcgctcggggaaaaacggaattctgatgtactcggaagaaagttatggacaggccatggagcggacgcggcatcagagtggatacaacgagcatgccagcacgatttatgccctgaccgccgccattgataccaaagaccattataccttccagcactcgcagaatgtggcgtactatgccggagagctggccaaggcagccgggttggatgcctctttggtggagattgccaaagaggcggccttgctccatgatatcggcaaaatcggcgtgcgggaggatatccttaacaagaccggcagcctgacgccggaggagtatgaaatcatgaagtcccacgtggataacgccgccaatattatccgctatctgccatcgctggattacgtgattccgggagtgctctctcaccacgagcggtatgacgggctgggctatcccagaaagctggccggggaggagatcccggtaatcgggcggattttgtgcgtggcggatgcatttgatgcgatgacatcgttccgcgcatataaaaagccggttcccgtggaacgggcggtagagatcttaaaagaggagtctggtcaacagtttgatcccaatttggcgggaatttttgttcagttggtggaagacggaaagattgagctgcaggccaagacggctgcggagattttttccaatacccagacgaattctgaagaagttcacactgcctgagttcatatcatgtggatctaaaatccgccggcggctgccggcggatttttctgcaataagcaaaaaaaggtggcattcgccggaaaatgagggtatcatagtctcattgtgatgaatctgcggagagggaggacgacgatggatggagaatttttaacgaagacggttctgttccagggagcgactccccaggaagtggaacagatgctctcgtgtctcggagcccagcggcgcgtgtttcccaaaggggcgtatgtataccacgccggggagcctgtctcttatacacatc

SEQ ID NO: 3900 - DNA, 3227 bp, Unknown
  16S sequences of unknown bacteria
tgtttcactgttcagttatcaatgttcttttgttgatctttgttatctcctcaccggagcaactttgatattatatcatgttgttttcggtttgtcaacaacttttttatttttttgaacttttatttttttccgctgctgttttcctcagcagcgaaataaataataccacctgctacgtcgtttgtcaacaacttttttgaatttttttaatttttataattgcatctatattttacacaattcaatcaaatcaatgtttatactctgctctgcttcttttccgtttcaactgcctttgcctctgcacatcattccattccttttatataagcacggagtttttcaaatcccccctgtgcatacccggaaagatcttttccggttcggttgatcaggcagtccgtcaaaaggaatacctgcatccctgtcttttctgcaatcagatcctcatccgcatcatttccgaccatcagacactgttccgggcgtacaccaagcttttcggacacctccagataatactttggattcggcttactgtagcaggaattctcataggttgtcacacaggcaaagtcctccggtttcaaacctgcccattcaatacgctgatatgtcgcaattgcagggaaaatcggatttgtcgcaagcgcgagcctgtatccctgtgccttgagccactgtatcatctctgccgctgcctggttgtagccgcatgcctgctttgcctgcgcaaactcattctcataaaaggattcaaagcttgcctgatcctgcagtgctttctctccgtacaactgcgtaaaccgcgtccagaacgctttctcatttttgcatgtcccgtcattcttcaccatcgccttcgtgccatcccacacggcagcgatcagctgctttggttcatatccaagcggtgccattttgcccgccagcaatttaaagtaatattcggtaaatgtatcctgatccatcggcagcaacgtgccgtccagatcaaacaaaatggtatcaatcatcgcacatcttcctttctgtgaaaaaagacccttctatcatcttattatcagtcatttatctccatatcttccaccagctccggcagaatattttcctgatacccggccactcgcagcttctccatatatccggcgacccgtcgcagctcagggtgacagatttgccgtagttttgctattccggcttctccgattttttcatctgagccagccttcctgtaatcctccggcgacatcctccacaggcaaatattgtttccatacctctgccagagccggtctgcaattccaatcccatccgggtccaggtctccactgtaataaatcacagctccatgctcgatcagtaatccgatcagcttttgcgccgctgctcgcagctggccagaggtacaaagcaaggtataggaatccctcttcacatgatgcagaagatatgtaaaaaccatctcattttccacgacatagacctgtttgccgatcggttgtgccgccctgactctataaaggttttccattgtaatgacatacggctcttttctgtcacagaatatgtcatatgccggatgaaaacctgtctccgttttgaggcgcaatccatatgcatgaagcatagaagagacattatccggtatgatccctgcctgctgcaaaagcagtctccactgatatgcattttgcggggtctcttcctgttccagacagcaaattgcagcaacgagaagcatccccgctgtacttccgcggtcaaagcagtgtggatttccggaaatttctgctgcaaacaccgccagcggggtctcttcgttcatcctctgccgcgcatggatctgtcccagtgctgttccgacatactctgccagaacacgtgcctgctccggatcttttttgtattcccggcataaaatggaatgtccatagtttttttcttcgaccagcttctgcagccagaccgacgcagcggcacctgctgttcccttttcgaaaaatgattcgtacagcgactgaaaaaagctgctttgtctgatctgctcttctttttcctgctctcctctggatacaagcgtctttccaaaatatatttccagcagtttctttatatcgaccggtgcaaagcgtgttttctgcagcccctgctcaaattcagaaaaagaaaagacaatccggtcatccagatatctttttccggtaattccaccgatcgccctgcattcttcttccgaagcatcatccagcacaatttttcccgctgtcctcccataagaacgccacttcttccaaagcgcctcaaagcacctccggtattccggccggcttctgaaatagtccgcgcacgatttctcactgttcatccaaaatcctctcccggccattccaggtataacggatgaccgaaacaactttcgaattttgcgggcgaagcagctctgcaatccgcagtccgcgaaccgtgtcaaagcatccccacagtgcctgtgaattcataatataatcaaaatccagcttatgtaccagtgcaaacatactgctgatgtttttatcatccactcctgcaaatgcctcatccagcgcaatcatacgcggatggtctttctgttctgcttttttatactgcgcattgactgccgcaaagagcgggacatacattgccatcgctttttctccgccactgaaacggttaaacgccgcattggtcagcagcttcctggtctccccgccacgcctgtaaaacatatggaattcaaaccatttccggtaatccaacgcatcccgcacaagatccatatagttgactgttgtgttcgcttcttccagcctcattttctctgcgcgtattttatttctgaaatgttcggctaccttctcgatatcttccattgtcagaagcacacggtcacgaagcagtatctcttccagttccgccgtatcgagttccgcctcgttttccgccttacacggcttccaatccagtgaaaagctcagtcccatggaagtatccatcgccttcatcagtgctgacatgtcctctacccacttccgactctccgcgatccggtccgtcagctgctggctgatcgtctgtgaaagaatatcctcaaacagctccctgtccttcttctgaatcagcagctccgtctcttctatcgttgcctgtgacatgctcccaccacttaaatcccagattttgaagtgggggcttcttgctca

SEQ ID NO: 3901 - DNA, 3169 bp, Unknown
  16S sequences of unknown bacteria
gcagaatctgcggcaggtcaaggagagcgaccgtgcgctggccacacagatcgtctatggtactttgcagaacggacgcctgctgcgctggcagtgggagacgaagggcagacgcatgccttccgcgccggtggcgctgttgctggatctcagcgtctatcagctgctgttccttgagcgggtcccggattatgccgtcatccatgaggcggtgcgcctttgcgaagagagacagaagggcgcgaagggaatggtcaatgccgtgctgcgccgggtgcagcgcgaaggaagacggccccttccgacagatcgctggcaggcgctcggcgtggagtgcagtcagcctgactggctcatcgccatgtggagggcgcagtattcggatgagatctgcgagcggatctgccgcagcatgcagcagcagcgcggacagagcgtccgtgtcaacgtgatgaaggcagatcggaatgaactgctgaaaagcgcccactataaagaaggaaagctcagtccggatgcgctggtgtgcgtgcagggcaatgcggcagagagcagggaatatcaggaagggctgatctcgatacaggatgaggcaagccagatggtcgcggtgtggatggatccgcagcctggtgagcgcatcctggatgtctgcagcgcgcccggcagcaaggcctgtcatatggcggagcatatgcacgatgagggacagatcgtctgcggggatatccacccgcatcgcgtcgcgctcatcgagcagggggcaaagcgtctgggcctgcatatcctcgagacgaaggtcatggatgccgcagcgccggcagaagcgggcgagacgccttttgacggcgtgttgtgcgatgtgccttgttccggctatggcgtcatgggcaggaagagcgacatcaaggcacggctggatcccttggcgatggatacgctgatccctctgcagcagcagatccggcaggccgcatccgcgagggtgagacctgggggaaggctcgtctattccacctgcacgcttaaccgcaaggaaaatgaaaaacaagtttcccgtttcctgagcgagcatccggagttttcgctcgtgcgggagaagaccttttttccctttgaatttgacagcgatggattttatgtcgcgctgatgcacagagacagtgttgtcaatgaatgaatttgtgatagaataacggcaggtgatgagatgaagagcttgtacgattacaattatgaacagctgcgcgaatatgcgctgtcaaaaggatggaagaagttcaggggacagcagatcttcgagtggctttaccgcgggcgcgtgaaagatgtcgacgcgatgagcaacctctccaaggaaacgcgggacgttctgcgggaggagttcatcctctccccgctgaccttgcgcgacaagcaggtgtctaaggatgggacgacgaaatatctgtttgagctggaggacggctcgctgatcgagagcgtgatgatgatcttcgattacggccggagcatctgcgtcacttcacaggtcggctgcaacatgggctgcgcgttctgtgccagcggactgacgaaaaaacagcgtgacctgagcagcggcgagatggtcgcgcaggtgatgtatgtgcagcaggagctggatgagcgcgatgagcggctgagccatatcgtcgtcatggggaccggagagccctttgacaactatgagaacgtcatgagttttctggctacggtgaatcatgaccgggggctggccatcggcgccagacatatcaccatatccacctgcggcatcgctccgcgcatccgggaattcgccctggagcacacgcagtacaatctcgccatttcgctgcatgcacccaatgatgagctgcgcagccagctgatgccgatcaaccgcgcgtatccgcttgaagagctcatggatgccatcgcgttttattgttcaagcaacaaccgcaggctgacgttcgagtacatcctgcttcgcggcgtcaatgaccgccctgagcatgtcaggcagctggcgaagctgcttcgcgggctcaatgcctatgtcaacctcatcccgtacaacgccgtcgatgaaaagggattccagggcgtcgatcatgacacggcgatggtgttttatgatgcgctgatgaaagcgggcatccgctgcaccatccgcaaggagcatggcggtgatatcgatgcggcatgcggacagctgcgcgtcaagcatctcaggcaggcaaaggggtgaggtcatggacgtttatggactaagcgacaaagggctcagacgggagctgaatgaggattcttatatctatgaggtcaacaaacgcggcgatctgctggtgtgcgtgtgcgatggcatcggcggcagcgccgccggcgaggtggccagttcgctggcggtctcgctgctgcaggagcgctttgcgcaggcttcggcattcaagggggagcagagcgtgcgccgctggctgaagcaggtgatcgcggaggcgaacgatctgatctttgccgcggccagccgcagtgcggcgcgcaaaggcatggggacgacatgcgtcggcatcctgcgcagcgggaacaggacattttccttcaatgtcggggattcccgggtctatgcgctgtatgacgatgggttttcctgcgtgacgcaggatcattcatatatcgcggatctgctgcggaaagggtccatcacggcggaagaagccaaggtgcacccggcccgcaatatgctcaccaatgcgctgggcgtatgggacaggatccgcatcgatatcgacaggctgaaagaagattaccaggcattgctggtatgcagcgacggcctgcatggctatgtcagcgaagacaccatccgcatggtgctttccaaggacggccatacggcagaggagaaagcgcggctgctcgtgcagctggccaatgatatgggcggctatgacaatgtcacggtcgtggtagtgcagaaggaggcggatgaggtcgatggataagctgatcgctaatcgttatcagctccttgaatgtgtcggacaaggcggcatggcagatgtgtataaggcgatggacaccatcctgaaccgggtcgtggccatcaagatcctgcgcggtgatcttgccgatgatccgatgacgctgctgcgctttcagcggg

SEQ ID NO: 3902 - DNA, 32759 bp, Unknown
  16S sequences of unknown bacteria
aatatttcctgcatagggggctttttgttctgtctgtacaatctggggcgccacatccgtcgggggcgggcgtttctatccatgtgctatttctccgccaatccctgctcccgcagcgctgcgtttatctgctccatggccgcgtcgtccacaccctccagggcacggatttcccgggtgctgaagcggctcagccaactgagcgccggcagcttaagcgtctcgatcgcccgccgggcgggagatgccaacctgtccagcagcacgccgatgggtgccatgtccgccggtgccttgggcgggaaggtgttgtcgaaggccttcgccgcggcctcatccatctcgaaatccggcgattcccggtaaacgccggcgatcccatccagcgcccctggatacagcggcagcgccatgaaggcgtcgtacgtttcaccctggctggtggtgatgccaaacgtcccggcggggcggaaccctatccgggcataatactccggatggccaaaaatcacaatccctcggtagcccagttcccgggcccgatcgatggtggcccgcatcagcgccgtgccgatcccccgcttccaataggcgggcaggacgctcagcggcccgaaggtcagcacctcgttctctcggcccgccgcgtcggtcacccgggccttggtgtacaggatatgccccacgatccggccgtcgctctcggccaccatgtccagcgcgggcacaaagtcccggctgtcccgcagcttgtgcaccaggtaatgctcgtcgcaggtgggatgaaacacgccccagaatgcctcccgggtcagttcctccacctcgcgggtatccgccggcgtctccagccggatggtcagcgtcatcccttcacccttccttccttccccatctgccggatggttttggatatgcccttgtgccattgctgtttctgccgcagataccccgccttgtcgtcggcgtaccgggcctcctgcttcagcttttgatagctctcccatcgttcgggggccagcgcgccggtttccagcgcctcccgcaccgcgcagcccggctcctgatgatggcggcagtcggaaaaccggcaccgccccagaagggcctgtacatcggtgaacgcctcggataatccctccgacacgtcccacatgcccagttcccgcattcccggcgtgtcgatgaccatcgccccgctgtccagccggaacagctgccggtgggtggtggtgtggcggcctcggctgtcgtcctcccggatgccgcccgtctccatcagctcctcgcccgccagcgcgttcaacaggctggacttgcccacgccggaggagccgagaaacacgacggtttttcccggccgcagatagccgtccagcgcggccagcccctccccggttttggcgctgaccgcgaacaccccgaccccggcggccaggcgttccgcccgccgccgcgcggcggcggcctcctgcgtgagatccgccttggtcagcaccaccgccggcaccgctcccgactgccacgccagggtcatgtaccgttccagccgccgctcgttgaaatcgtgattcagggactggaggatgaacaccgtatcgaagttggcggccactgcctgttcaccccgccccggcgtgggatcccgccgggaaaagaaggtgcgccggggcagcgtgcggaggatcgggctgtccccctggggattgtactggatttccacgaaatcccccgtggtggggaacgcctccccgcctccgttgaaatacacgccggccttcagccgcccgtacccctcgccctggtcacacaccagttcataccgttccttgtgcaccgcggtcacccgcgccggcgtcccgccggacagtcccgccgccatcgcgggggaccagccataatcgcttagttgcaattctctcttcctttcttccgtctgccatgtcgctacgtatcctgtcgtcgcgcatccttatcactctctttcttttaaaacgaaaaaagccgcagaaagcagcctttcccgttggctgcactctgcggcgcccgcataggggcataaaaatagcacaccctgtcgagtgtgctatcgcgcaagcgtatagttcacgaaaggttctctatcagcgtgcggaaaagcttcctcacgcccctatgcggttttatgcagaggtcacctcaaccaataccgacatacctacaactcctttcgtgttccccatggaacgatttgtctttatcatacgcgattttcagcgggatgtcaatgcttttgttcgatgcgcttaaaaccttcacccagcacttcctctgtggacaccacgatgagaaaggcatcgggatcgcagtcctgcaccagggtgcgcagctggtacatctccgagcggcgcacggcgcagagcagcacccgcttgtcctccccggtataggccccggtggcgttaagcaaggtcaccccccgccccatctcttccaagattttccgacagagcagctcctccttgcgggacatgaccagcagcatccggcccgtgtctccgccgtagacgatggcgtccataatgctggtggaaacgaaaatcagcaccatggcgtacagcgcgctttccagctgcttgtacaccagcgccgacgccgccaccaccaccgcgtccaccagcaggatcagccggccaatggggatatggcgcaggcggcgctccagcaggcgggccaccacctcgctgccccccgtggtcgcgccccgcagatagatgaggcctaagcccgccccggccagcaccccgccgaacagggccaccaggattttatctccccggaaggggggcagaaaccgggcggtgccgtcgatgatggccgaggacagcacggtgacgatcagggtgcgcaccgtgaacgccgccccgcacttgtaccaggcggcaatcagcagcggcaggttgatgaccagaatcatggtgccgatgggcaggtgaaaggcataattcagcagggtcgccacgccggtgaccccaccgggggcgatttggttgggcgcggtgaagatgttcaccgacagggcgtacagaacgctgcccagcaggtaaaatccgccgtccagtaccgccctccccgccttgctatgcgaaggatttccccgtttgcttttgctcatcccacagcccgcctttctgcaggcttagcatgtcccttccggccccgttctatccctaaaccggtggattctcctgttccccggcgcaaaacgccgcctcgaacagctcccggatccggtcggtctccccacggaggtacagatagccgaacagcgcctccaggccggtggcccggtgataatcgccgccgctgcgagcggtgtgagcgttgcgcccccggcggaaaaccgctgcctcctcctcggtcagccgggggagaatggcgtccatggccgcggcctgggcctcggcgcgcaccatggccaccgcctgcttatgcagctcattgaccgggcggttggcctggcagaccagccgctcccgcaccatcagctcatacacgccgtcccccacgaacgccagggccagcgggctcaggttccggggctccacatcctccggcagcagccgtcccataacccgtcctccttttaaaacacaaaatcaaattcaaaatcgtacaggctgacggtatccccctcggccactcccgccttcaccagcgcgtcgatgacgccggcggactggagcacccgctggaaatactgcaggctctcataatcgtcgaaattgatgccctgcatcaggcggagcagccactccccttccacaaagaacacgccgtcatggcaggtgaccgtcacctcccggccggacagggcctccgcgtcgggcaggggctcgggctccggctcataggcccggatgggcggcagctcggccagcatccgggcgcagcagtccaccacctctttggtgccgtgggcgatggccgccatcatggggaaataggcgcagcctctctcttccatggccttggcaaaggcctccagctgctcgtcggtggccaaatcgcacttgttgcccgccacgatcatgggccgggcggccagctcggggttgaaggcctgcagctctcggttgatgatgtcgaaatcctccagaggatcccggccctcgcttcccgccacgtctaccacgtggatcagcatccggcaccgttccacgtgccgcaggaactcgtggcccaggcccacgccctcgctggccccctcgatcacgccggggatgtcggccatgacgaaggacacgccttccgccacccgaaccacacccagcaccggggtgatggtggtgaaggggtagttggcgatttccggcttagcctcgctgacgacggaaatcagggtggattttcccacgttggggaagcccaccagccccacgtcggccagcagctttagctccaggcggacggtcctctcctcccccggcacgccgggcttggcgaagcggggcacctggcgggtggcggtggcaaaatggctgttgccccagccgccccggccgcccttggccgccacaaagggctcgtcccccgacatgtcggccatcaatcgaccggtttcgtcgtcataaatcagggtgccccggggcaccgggatgacgcagtcggcccccgattttccaaagcagcgcttggccccgcccggctggcccgcctcggcggcaaacttccgtttataccggaagtccaccagcgtgccggttccgtcctgggggacgaagaccacgctgccgccgcggccgccgtcgccgccgtcggggccgccggccgccacgtatttctcccggtggaaggaaaccgctccgttccccccgtttcccgccttgatgcgtatggtcgctttatccacgaacatggattttcccgcctttcagcgccgattttttcacatttctccgcattttagtgaacaaaaccgctcggattcccgcacgggaccgcacaatttcgctcttcttagcgtttcttaaaaccataaaaaaatccccgccggatgcggcagggattttccagttcttattcttcggccgcgtagacgctcacgcgcttgcgatccttgccgacccgctcgaaccgcaccacgccgtccgacagggcgaacagggtatcgtccgaaccgatgcccacgttgttgccgggatggatgtgggtgccgcgctgccgcaccaggatgttgccggccagaacaaactgcccgtccgcccgcttgacgccgagacgcttggactcggaatcgcggccatttttggtggagccgacgccctttttgtgagcgaacagctgaatgtttatcttcaacatgataatgcccttcctttcctgatgaagcgcctagcgcgcttctatcgtttcaaccactaactgccggggatattgctgctgcaattgcccgaggtgcaacctcagccccaggagaatatcctgacagccgaccggttcctccaccgacaccctgagaaacccgtcccgcgcctcggtatcggccgggcagcggcagatttcggtgatggtgttggccgccagataggcggcggaggaaatcgccgcgcagaccacgtcggtccccgacacgcccgcgccggcgtggccccgcagggtaaagccgcacagaaggccgtcctttcggacgaaggtggcccgcgtcattattccgcggcagcttccggttccgctttgggggccttgggagctttggcgttgatgacctcaacctgcaccttggtgtagggctggcgatggcccagcgcgcgcttgcagcccttcttgggcttataggtgaagacggcgattttcttgcccttgccgttcttgacgacccgcgcttccacggaggcgcccttgacgtacggcgcgccgactttcagttctttgtcgttatgcagggcgacgaccttatcaaaggtcacggaggattcctcggcagcatccagcttttccacgaacagaacgtcgccgttctgcactttgtactgcttgccgccggtttcgatgatggcgtacatgatgggagacctgctttccttcagtctcgctgtcctcaggcggatcccatttgggatcgcttataaaagcccggcacatgcggcaatgctcattgtatcatatttggaagaggttgtcaacgtctctttttgtttcttttctcgtataaattgcagttgattttatggcaaatctggcgtatagttagactaagcgttggataaagagagaaatctgcggctttttatcccgacgcatcagaaccggacagaggccggatttgaaaggatgggtaacacagatgaacaggaaaaaggcagcggctggttttctcgcggcgctgctggcggtttcgctgaccgcttgcaacaagccggccacgccgccggcgtcctccgcggcggccacaacggaagcgacagcgccgtccaccaccatggcgaccacggaaagcaccacgaccaccaccgagacagcggccgccacgaccaccaaaaagaaaaccaccaccaagaagcccaagccgaaaaccaccgcccccagaaaaaccgccgcccccaccaaggtgacgctgcccaccaacgcgcccaccggcagccccacgccaccgcccaccaccacgcccacagaaaaccggttcgtgctgtccgcccagggaaaggcagccctcgctcggtatcagaagggccaggagaagtttttcgcgctggacagctaccactacaccggccacatacaaatggaaatgaacgtggacggacacgccttcatgatggtgacttcctctaatgaaatgtataaaaacgggtctactcatcagttatatgccacggatttcagcagcggggcaggcgaccagtctcagcacagcatttacatcgacgggacgtccgtctttgaaaacaccgacgggactatcaagaccttcgcttttgatccggacgcctttgattccgcttttgactacgccagcttctcgcccttggaggaaagtaatatcctcggctattctacagaaggcggcgcggacgttttcacatttcagctttccgaaaaggatacccagtattttgaagagcaattcggcttaattcgcaatctgatcgtcaccatgaaggtaagctatacgccggaaggttacgtgtccacagaaatcgacacgttctcggcggacatcggcatagttgacgaaacgaccaacaccaccggctggtacaccctacgaatcgtcaacaaaaccatctatgacaagccggggcagccggtgacggtgcctaggccggactgggtgcctgccgacgcggacaacacctgaaaaaagcccgggcgtttcctctagggggaaacgcccgggcttcttgtttcgcctctcgcttattccccgacggggcggcgggcggcggctttttcctcgaagcgggcagtcttgacggtgcagcgctggtgcgtgccctccccgacggggccggcctcatcccgggcggtgacgtgaaaggtgaaccggcggccatcggtttccagcaggacggcttccaccgtcacggtcatccccaacggggtggcggcggtgtggacgatatccagggcggtgcccacggtgccgatcccctcctcgagacagggctgcacgagatgcatacagaccgcctccatcagcgcggccaggcagggggtggcgaacacgcgggcggtgccgctgcccacccggcaagccagctgttcctcggtgaccgtgcggctttccgcgcgggtcatgcccaccagggctttttcttccatatagaaggactcctctcggttttgttggcgttttttgaaaatcgtggtatactaatgaccatctcggatgtgcggagggatgccagttgaccgaaacaaacggccggacgggccggatatatttcatggacgaggtgcggggcttcgatctgctgctgatggtggcttttcacgggttttacaccgctggataccttttcggcttccgacccgcggcctggctgtttaacttttttaacccggtggagccgtttttcgctgggctgttcatcctgatctgcggcatctcctgccgcttgtcccacagcaattggaagcggggcgggctgctgctggcggtggccgccgtgatgtccgcgttcctctttgtgttcatgcgggaagaaatgatttggttcggcatcctgcacttcctggcggtgtccatcctgctgttcgctctgtgccggccgctgctggataaaattccgccggcttggggggtggcggcctgcgccgtgctgaccctgatcacctggtgggttcccggctatcggggaagccagtttggcattccggggctgctgtccttccccataccggagagcgtgcgggcctgcgggtggctgtatcccctgggtttgggcctgggcgagggggccgattatttcccgctgctgccctggctgttcgtgttcctggcgggcagcttcctggggcggtgggccaaggagggacggttcccccagttcatgtatgtcagccgggcgcggtggctcgcctggctggggcggcacacgctggtaatctatgtagcgcaccagccggtgctgtttggcctgtgctggctgatagcggcgatggtgtaaaatagcttccttataccctttttgttgaaaacagcgccgaacgtcttcggcgctgtttttttatccttttctacccagcttacgcatgaggacggtcatttggatcaggtcttcttcatcaagcccctttagggcttccatggcttcgtgaagcaaggtgggattatgaaaatccggatcaaaaaattccgcgggttccacatgaaagcgttcgcataattgaaacagaggaaccaaagtcggtttcataatcccgttggttacctgctggatataggatgtgccttttccaatatccaagctcaaagccctttccgataatccctcctgcaagcgcaattcacttattctctctctgataaattgcaggtgcttttcaagattttccgtataaggcagagctaaatcctctttttcaatttgttccttttcttccggtgtcatccgtcactctccccgcctcggattttgtcgaccatatgctacaaaaatatgataaactactgttttcttgaaaatgtatgttgactgaattacatttttgggttattatggtaaatgaattttgataacatatattttgtggtaaaaatacgcttttcgcatgttttaagcgtaattcatcgaaaaggctgtttgtgatttaaaaagcagccccttttcggagctgctacttcttctcgaccactaggcggacaaattgatacaacgcctttctttcagcgacactaagttcacgatagacggacataaactctatttcatcttcagatacggcaaatttctccgcattggttaaggtatacggaacatccgtgtacccggctaggtaatccagagagacatcaaacaattgcgctatcttttttaaggtttccaggtcaggcagccggccggtattttcatagccgcccaccgtggaagggcttacaccaatttcctttgccaatctctcctgcgtgaatttattgagctctcgtaattccttaattctatgagaacgcatgtttatcccctactttgaatcctttatctcctctgtttcctcaatcaggcggatgaaccgtgcgataagctctcgttttgtcggtgaaaaattcgaaatgttcaactgaaatcgcgtatccaaattcaccaagctatccaaagacgtatttaaaatcgtgcatattttcaaggcggtgtccaatggcggcaactgaatattgttttcataaccggaaaccgattgaggcgtaacatgcaatttgctggctagttccgcctgcgtataacctttttgttcccgtaaattctttaaacgtattccgaaatcataaacatccatttcagccgccccctcatgcgcttttcgataccaatctatcgcggcggctctttgtccgtatgaaatacccgaatatattgtaaaatgagttctctttcaccagggcgaagatcctgaatagcaatggtttcactattttccagacctaagagatagtccaaggagcagtttaaggcccgcgcgagtttcctcgcagtcaggatggatggctttttcacattactttcataactggagatcgtttgtttggaaatacccagctttttcgcgagttgttcttgcgtgagccccgacaaatttcttgtcttttgcaggcgtgcgccaaaatcaaaagcatcctcgtcaacttcaatagccatcctatcaccacccctcaacggaacatggttatattttatatgacggaacggttattttaggtatacatatattcttgttttgtcatacaacagttgaccaattggcgatagtatgatattttaataacggttctatatcgatggagaaagtatatctactgtcgaaaggatgaacaggaggaaaagaaaatgcgttcaactggtattgtccggaaaattgatgaattgggacggatcgttttgcctgtcgaagtccgtagggagatggagcttcaagataaagacgccatagaggtatttgtagagggaaattatatccttctcaaaaaatacagcccgtcctgcacttgctgcggggaatcctttgatattgtttcctatcagggagtgaatatttgtcccgactgtatcttccagatggccctgcgctgcggattgcagccaggcgggcagcctattaaaacccgggaaccgcggtaggtattttctgagaaggattatctgtaatcgcttttctccgcaatgatttatgtccccccataagtttttttatagagaaagaggccaaccgctgtatttcgcggttggcctctttctcaggtctatttttttgtatacgcatttatagaaaaatccgggttttaaatacgggcgcggcggccgaagagatgggcggcggcgccggaacgctccagcgcggcgtggagcagcaggccgcagacggtgcaggccagcagctgcccgatcccgacggacagcatattgatcgccagcacctggagggtgaagaccggggacaccagagtcagctccaggcccaccaccacggcgttgatcaccaccggaggcagggacgcgagcaccgggacgccttttacccgaaggttccgcagccgccaggtcagcagcgcggcggccagggtggccagggggccgaacagcaagtcccacgcgccggcgggattggcccccatgcccaggcccaccaggttggaaaccaggcagcccacggccaggccggggatggccgacggggtgaagacggccagaatggtcagcatttcggaaatgcggcattggacaatgccgaaggacggggcgggcagcagcagggtcagcgccgcgtacatggcggcgatcagccccgcctgcgccagggtgcgcacaggggattgggttttcatgatacgacctactttccatagttttgattggagccggggctccggtcaggatggtttcgaactgacctgcggggacaaaaagccgcgccatagggcactatacgggggtggaacccccgcctaaaagctccttcggcgctttttatcccctaattaaggaataaagccaatgattattttatattagcgcgcttgaaaagtcaagaaagcagctatagggaagatttacggggctttttgataaagaaaggcgttgcctttcttgcctgtgcgttgtataacgcctagattatacaatatgttaaccagcgtaccggttcccttctgactcaggcgggaggcgcgtttgacatcggcggtggtgaacggctccgggagatcggggggcagcaggctggcgtaatccgccttctcgcgcaggacggccacgggacccagggcggtgggcatccgctcggcccggtgggatcccttcttgccgtcggcgctccagccgtcggtcagccggtattcctccatatcgaggagaggcagcaccaccgtcaggcgggggtgacccaggagggcgcgaatataaacaagttctcgagcggcgtcccagaagtggccggtcttgggggatcggcggggcttggaggtttcaccgctggcgggatcgacccagacgagggttttgtgccaggtcaagggatgcaccaccgtcaccggataggtttccagcaggcgttccagcttggggcgcagggcggaaaagccacgggtttggatttccgtcacctgctgaccgtcgaagatgtcggccacacagcgctccaggcggatctcgtgatggctgtcgtcgggatccagccagtatttcattacagcgtggaggctgcgttccccaagggtgccgatgccctggcgctgccgcagaccggccaggccgttcagccgggcctcgtcgaacgcgtcgggatcgagatagggggcggtcatggctccggcacgaaggacagatgggcgtcgaagcagacgccccggtcatgggcgccggtgacgaaggcctccccttcccgctcagccgccgtcatatgcagggtctccccttccaccgcctccttgacaaaggcgatggagaagccggtgatgcgtttgcctttcatgccgccggggagataatcgcagaggtaattggcgtagatggtattgttcaaatggccgttccagtccacctccgaccagcgcaccacgtggtcgccggcgggcttcatatcgtccggctgcttccacttgacggggtcggggcagtcgttgcgacgttccggctgggtgatcaggccgtagggctcgaaggcgtcggggcgcagcaggcggtgatcccgcacatccaccagggcgaaggcggtgacgctttcgataagcttctcccccgccttgtccaggaattcatagcagcggtaaaactgggcgccgcgggtgccccggtgccaggtgcgcagggccacctcctcgttgagggcgggcgcgcgatggacaacgctgttggtgcgggtgagcagaaaggccatgcccgcgtcgcagagcacttgatacccgaggccgcccgtgcgcatatgcagctctccgatctcctgctggagccgcagctgcccggcgggggtcaggcgttgatcctgccccgcgtcaaaggtgctgattttcaccggccaggtgtaatccctggcgaccgtcgcctcttccatgaggattctcctttatacttttagtatatatcctgttacgtatacacaaagacaaaaatgcgggccacgtttcatggcccgcaagggtttagcggatgacgtcgacacccatataggggcgcagcacctcagggacggtgaccgacccgtcggcgttctggtagttctccaaaatggcggccacggtgcggccaacggccacgccggatccattgagggtatgcaccagctgggctttatcggccttgtcccgcttgaagcggatggcggcgcggcgggcctggtagtcctcgaagttggagcagctggaaatttcgacataccggccgtaggagggcatccacacctcgatgtcaaaggttttggcactggagaagcccaggtcgccggtggacagggccatcacccggtagggcaggcccagcagctgcagcacccgttcggcgtcgtgggtcagcttatcgagttcctcatagctggtggcgggatcggcaaacttgacgagctccaccttattgaactggtgctgacgaataaggccgcgggtatcccggccagcgctgcccgcctcggcgcggaagcaggcggaatacgcgcagtatttaatgggcaggctggcgccgtcgagaatttcatcccgatgcatattggtgaccggcacctcggcggtgggaatgaggaaatagtcgggatcggtcagcttgaaggcgtcttcctcgaacttgggaagctggccggtgccggtcatggaagcccggttgaccataaagggcggcagaatttcggtatagccgttttcggtatgggtgttgaggaagaagttgatgatggagcgttccagccgggcgcccaggcctttgtagacatggaagcgcttgccggtgattttggccgccacctccgggtcgaagagctccaggcgtttgccgatgtcccagtgagcttccggctcaaaatcaaaggcgcggggctcaccccagcggcgctgttccacgttttcggtatcgtccttgcccaccggcacgctggcatgggggatgttggggatggacagcaggatgtcccgctgctcagtttccaaatccgcggcgcgggcggacagctccttgccctcctcggccaggcgtttcatctcgtccatgatggcggaggcgtcgccgccttcttttttcaggcgggcgatgtccttgctcgcggcgttctgccgggccttgaccccgtcggccttagcggacagttcccgccgctcggcgtcgatggcgatgacccgatccacctgcgcgtccatatccttattgcgggttttcatggcctgtttgaccaggtcggggttggcgcgtaccattttgatgtccagcatgtgaatttcttgtcctttccaagccccgtgccgtccgccggcgcggaacctttttacttttcttgcctgttaggattcgggggcgaggcgagcggccagatcctgcaaatcgcctgaatcgaagaattcgatggtcagggtgccgccggatttatcaccggctttcaggggcgtgaccttcacgcggcggcccatgtgttcggtgagggagagctcgacctcctcaaagaagggcgggcgggaaaacagggccggggcttccttttccttgcggggggcgcgggaggccttggccattcgttcgagatcccgcaccgacaggcttttatccacggcggcggcggcggcgtccagctgctcctcctcggtggcgaaggccagcagggcgcgggcgtgaccggcggagagctcgccccccgccaccatctgtgcgatggtgtccggcagatggaggagccgcagggcgttggccacggcggggcgggatttgttcaccgatttggcggtttcctcttgcgtgaggccgtaggtttccatcagggtgcggtagcccatggcttcttccatggggttgagatcctcccgctggagattctcaataagggccagctcagccgcttctttatcgctcatttcccggatgaccaccggcacctcagtcaggccggccatgcgggaagcccgccagcggcgttcgcccgccaccagctgatagctgccgccggccaccgggcggaccagcaggggctgaagcacgccgtgctgggaaatggaggcggagagctcggcgagcgcttcgtcgtcaaactgcttgcggggctgggcccggttgggctcgatttcggaaatgggaagggaaacggttttcccctcctcctcaatggagttttcggcgaacaggacctccaggcccttgccgaggcccccttttttcgctgccattcagacagccccctttcttggaagacaggcggacaggctgcgcgccgcccgggttatcgtttgccgcacagctccttggccagggcatcatacgccgccgcgccgcgggagccgccgtcgtaataattgatgggtttgccgaagctgggcgcttcggacaggcggacgctgcgggggatggcggtggcgaacaccttacgggggaagaattttttaacctccgtcaccacctgctgcgtcaggttcagccgaccgtcatacatggtcagtaaaaccccttccagctccagtgtgctgttatacagccgtttgacctgccggacggtggccatcagctgggacaggccttccagagcgtaatactcgcactggatgggtacgagcagggtatcggccgcgcacagggcgttgagggtcagcaaaccgagggagggcggacagtcgatataaatatagtcgtacgcatcccgcagggcagcgagggccgctttcagccggctttcccgccggttgagctccaccatttcgatttcagcaccggcgagctgcatgctggagggcaggacatccacgttcttaaacgcggtgtggacaacgacctccgccggctgagcggtgccgatgagcagttcataggtggaggctttgacctgccgcttgtcgatccccaagccgctggtggcgttgccttggggatcaatatccaccaggaggcatttcttcctgcgggcgcccatggcggaggtaagattcaccgtggtggtggttttccccacaccgcctttttgattgaccaccgccgtcactttcgccatgtcgacacgaccgcctttctctcgctggaatacatgcgtctgcatgatagtatagcacagattccttggaaggaaaaggggctggaatatttttatgccggaatgtttcatgtgaaacattccggcatggctgtcaacttaaaaaccgccgcaagcaatccagttgcttgcggcggcgtggtactcccggcgggaatcgaacccacaacggccccttaggagggggctgttatatccatttaactacggaagcatatccaagcggcgtgtattagtgtacaccatttcggcctgggttgtcaatcccttccggggaattgccaagcgggcgggatgggtgtatactaagtaggcaaaggaggagtctggtatgctgttggatattctgcgcgatgaaattgtgcgcatcgccgcgcccagccgcatcgttctgttcagccagaaaacccatccggacgggtctccgtcttccgtcaagctgtgcgtggtgatccccgggggaaatccggaggaggtggagcaccggctgtatatggaaatcgacgcggggctgtccttcgacgcgctggtgtataccgaggaacagtgggatcggctctgccggacgccgttcagcctggcggccagggctgtggaacacgggaggctgctgtatgaggcgaagtaagcacagcgacgacagccggttatttttcgactggctggagatagccgcccgggatctgctggcggcccgcctgctgatggagaggcagcaatgcctggaaattgcggggtttcattgccagcaggccgtggaaaagggcttgaaggcgtatatcatccatgcgtcggggcagctggtggacgggcacaacgtcacgtggctctgccgccaggccgtccggtacaatccggatttcggcgactggatggaagactgcgccaagatgaaccggctttatatagaaacgcggtacccttccgacgaggatctgcacctggcgggagagactgtagagcggtatcacgccgccgcccagtcgctgtatgatttcatctgcgaactggtgtacgaaaacggcgatatcgaggacgattgacagaaaggatctttgacccatgaacaagcgaatttttgcgatactgaccgctctttgtctgacggggacgctgaccggctgcggaacgggaaatcccggttctgttccggcctcgtcccagtcggcgccggaaatcactgtgggcaccaccacgccgcccaccacctctcctccgacgcagactaagggagatttcaacatattcactggggaggattccctggcggcgggggcggatacccggccggtggcggttatgatcggaaacaacgacaagtcgcggccgcagtacgggctggatcaggcggacatgtatgtggaggcggagacggaggggggcatcacccggatcatggcggtcttcgccaatgccgcgcgggttccggcgcagcttggaccggtgcgaagcgcccggtcgcccttcgcgctgctggcccagtctctggacgcggtctactgtcacgccggtggcagcacggcggggctggccaccgtgaaaaacctggggatccatcacattgacgggctggtatacgacggctccaccttttggcgagacgcgaatctgaaaaggacaaaggggctggagtattccatgatgaccagcggggacaagctgggggctcggatgaaatccgccaatatccgccggaagggcaagcttacatccctgttcaccttcggggaaggggccggcagcggggcgggcaagacggtgcaggtgtttttctccggcgcgcagaccatcagcttccagtatgacgcaggcaccggcctgtataccaagtacaacggggccgtcggcaagggttcaccccataaaacagccggcggaaaagcgctgaccgcctccaatgtgctggtgctgtacgacaccaaatatgccgagaatgcctataccatcggcttcaacctgaaaagcggcggcgggctgctggtcagcggcggcaccagccggccggtttcctggtcgcgttccagcagcaagctgagtattaccgaaaaggacggttctcccgccaagatggccacgggcaagacctacatctgcctggtaagcaagggcaacgagggaaataccaaggtcggataagcatccgttaaaaagactccgcggcgacgccgcggagtctttttgtattcaggcggtatggacgatgacggggcgggcggagggcttggggatccgcaccacgtattcaatgtagtcttccgtttcgtttttctccgaccgggcctcgatacccgaacggcgcatggtttccaccgcgtggttgaccgtgttgaagaacagtcgcacgtcccgcaccaccggcaacgggcgtttgcgcttgattttacctttcaaaaagtcgtccaccagcttatcggattgggcggcggtcaggcggccctcgataatccggcccagagccacccggcggagctcctcgtcctcgatacgcaggagagcccgggcgtgccgctcggtcaagccggcgccgataatggcgctgcgttcctcgggcggcagacgaagcagccgcagcttgttggcaatggtgggctgggagcagcccagacgattggcggcttcctcttgggtcagcccgtatgtatcgatcaaccggtgcatgccttcggcggtttcaaagcagttcatatcctggcgctgcaggttctcaaccagcgtgagcagcgccctctgcacgccctcggcctccagctcgatacagggaatttcccgaattcccgcgattttagcggctcgcagacgcctctcccctgccaccaataccggaacgccatcccggaaggtcacagtaacgggatgcagcagcccattctccccgatgctctgcgccagctccagcagcttttcatagctgaaatcccggcgcggctgttcggggttgggttgaatttccgcggtgggaatcatccacacatttccgctgctttggtatttcggcttcttattttccttgccccacatctttcgcacgtccttcccattccgatggctgtcgcccggcatgtttcacgtgaaacgcacgggcttgtccgctttcctgctgtcagcataccatgaaatttgccggatgcctgtcggaatgggcatgtcgcggaaatgaagttaaaggggctgtttggcgattttcgcagaaggacgtggatattttggcggcgtgggcgctattttgtcgatcactaggatccggcgttctccccccggctccccgtcaggcaaagcgggcagggtcagcgccttcacccggcgcaccttgccgcccagcatgcgcacggcgttggccgccgccgtctgttcggtttccccttccggccccttcatcgcgagaaaaattccgccaggccgcacaaagggcaggcagtattcgcacagggtaggcaaagccgccaccgcacgggcggaagctacatcgtaccgctcccgcaactccggccggcggcctccctcctcggccctggcgtgcaccagctttaccggcaagtccagctcccggcagagagcctccaaaaacaccagccgcttattcaggctgtccaacagagtgagctgaatgtcccggcgataaagggccaaaggaacaccagggaaacctgcccccgtccccacgtcgatgaggcgcagaggccccgccggaagcagaggagccgccgccaagctgtccacgaaatgcttgactaccatggctcctggctcggtaatcgcggttaagttcatcttttcgttccactccaccaacaggcgggcgtaggtgtccagccgttctgccaaatcagtgtccaccggtactcctaccgcctcgccgccagctttcagacagtcgcgatcgatcatgatgctctcccccttcctattgattttgactgagccagataatcagcaccgacacatcggcagggctgaccccgctgatgcgggaagcctggcccacgctgcggggccgcacccggccgagcttctcctgcgcttccttgcgcaagccggtgatggccgtataatccataggatccgggagcaatcgattttccagccgcctcatttcatcaatagcagcctgctgccggcggatatacccctcgtatttcagtcccacttccacctgttccatcaccagcggttccaactccggtctggcggtatccagaggggcaagggcctcgtatcccagttggggacgtttcatcagctcggacagccgggcgccggagctcagcggggttgtttcacgtgaaacaagcagcgcgttgacctcctcgcttggcggaagcaccgtttcttccagccgccgccgttccgcctgcttagcctcctgccgggcgcaaaaccgcgcccatcgcccatcgtccaccaagccggccttccggccgagcggcgtcagtctttcgtcggcgttgtcctggcgcagcaccaggcggtattccgaccgggaggtcatcatccgataagggtcggtgcagcccttggtgaccaaatcgtcgataagggtgccgatatagctggaggcccgatccaagagaagcggctccttccccaatatcttgttagccgcgttcacaccggccaccagtccttgggccgccgcctcctcatacccggagctgccgttaaactggcccgcgccgtaaaggccggggatatccaaaaattccagcgtggcgtccagctggagaggatcgcagcaatcgtattcgatggcatacgccgggcgcatcacctggacatgctccagcccaggaatggtgcgcagaagacgcagctgcacatccaccggcaaggaagaggacaggccctggagatacatctcctccgtttgcaggccgcagggctcgataaacacctgatggcgctccttatcggcaaaacggacgattttatcctcgatgctgggacaataacgggggcccaccccttcgatttttcccccatacaagggcgagcggtgcaggttctccagaatcacccgtttggtttccgggctggtccaggtgatatggcagggcaggcggttttccagcggctcgaaggtttcaaaggagaaaggcaccaccgggtcttccccgtcctgctgttccagacccgagaagtcaatgctcgagcgcagcacgcgggcgggggtgccggttttaaaccggcgaagacgcatccccagctccagcagggaggccgtcagctcggtggcggcgaacatgccgtccggcccgccctcataagagacatcccccacaaagatttttcccttgaggaaggtgccggtggccaggatcaccgccttcgcggtatactgcacctccagtcgggtggtcagcagccactcgccggaggccaaccgctccaggcggacgatttccccctgccggatatccaggccgggggtggtttccagccggtgcttcatataggcggaatagttccggcgatcgatctgcgcgcgcagggaatggacggccggccccttcccccggttgagcatccgggattgcagcaaggtggcgtcggcggccttgcccatttccccgcccagggcgtccagttctctgaccagatggcccttggcggtgccgccgatggagggattgcagggcatattccccacccagtcgagattgatggtgaaaatcgccgtacggcagcccaggcgggcggcggccagggccgcctcgatgcccgcgtggccggcgccgatcaccgccacgtcaacatgttcgtcaataaacttcataggtcagcatccgttctgttggtgtccatttattcggaattttgcttcgacaggaaccaccagtattatacctctcctgctagtgcagaacaaggtttctttgttaaaaaacaaactttccactctttccacagggttttccacatttccacggggctttttcaccggcctgtgaaagcttttccaatttttctgtccgtccaccttgtccccctcgcatacccgttcagcaccttgcatataagtaaacaggcgtttaccggagcgaagctgggcccgtcattgcccggacagggggaaccacatgcggaaaaagaccatcaacctgacattctgcgccgttttcacggcgatccttctctttctgctgctgctgtcccgctgtcacggcggcagcacagcagcggagaccgccggcacggaggaaccctcagtaccggtgctgatgtaccatcatctgctgaagcgggctgaaaatacccgctatcagggcaacgacatcgtcacctatgtggaggattttgagcagcagctggcgtggctgaaaagcaacggctttgtcagtatctccaccgctcagctggaagcgtatctatacgacaatggcccgctgcccgccaagccggtgatgatcacctttgatgacgggtatctgagcaattatatttatgggtatcccctgttatctcagtatggcttcacggcggtgatcttttccgtcactgggaaaataggggaaacgcccgaaacctttacgccggcgcagatcaatatgctggaccgggagaccatggaaaagtgcgcgccggtgttcgagtttgccagccacacccacaacctgcaccgcgccaccggaaccggacattcggccctgaccgacgcggatcccgccgtgctggaaaaggatctgtccgccagtctcgacgccctgcgccccttcgcgggcagcactctgacggtcttttcctatccctacggattttacaacgacagggtggtggacgcactcaaagcgcgggggatccgcatcgccttccgcgccaccggcgggcatctcaaccggaacagcgacccgtattccctcccccgctgggcggtatcctataaggtcagcctggaaaaattccagtcctttttctccgactatgtcaccagcgtataaaaagcggccgcacagatgcatgtgcggccgcttttttggctttacttagaaaattccatccgctgttcttacgaaggtgtgttttcatccccggcggtttcctcggcaggcgcggtctcagcggccgttgcttccggctcgccgccttcctcgccggcctcggcttcctcctccggctcctcgtgaggcgcccgggccagggagacgatacgcgagccctcttccacccgcatgacccgcacgcccttagaaggacggcggcacaatcggatttcgctgacctgcatccggatgatgatcccatcggaggcgatgagaatgacatcgtcgtccaaatcgaccaccttgataccagccacgttaccaaaggtctcggtatgatagttggtcagacccttgccgccgcgagactgaatccggtaatccgacagctcgctgagccggccgtagccggtctccgtcaccgtcagcagaaggccgccctcccggcagacggacatgcctacgacttcgtccccgtcgcccagggtcagggctttcacgccacgggccgtccggcccacgacacgggcgtcgttttcatcgaagctgatggccatgcccaggcgggtggccacaatcaggcgctgatagccgtcggtcagccgcacccaggccagttcatccccttcgtccaggtcgatggcaatcaggccgttctttctggcatgggaataggcgtccagacgggtgcgcttgatgatgcccttgcgggtgaccatgcagagatagtgatccccctcgaattccgacacgcggatcatggcggtcaccttttcctccggcgccaggggcaggagattgacgatattcatgcccttagaagtgcggcttccttccggcacctcgtagcacttcaaccgatacacccgcccggcggaggtaaagaacatcacataatcgtggctggagcagaggaacatggtctcggtcacgtcctcgtcccgggtggccatgcccataatgccgcgcccgccgcgcctctgggtcttatagctgtcggccgcctggcgcttgatatagcccaagttggtcatggtgagcacgcattcctccaccgggatcaaatcctcaatgtccacctcgccggaaacggcggaaatggcggtgcggcgctcgtcgccgtatttgtcccgcatcttgaggcactcatccttgacgatggccttgattttcccctcgtcggccaggatgccctccagttcagcgatccgggcgtgaagggcgttcaattcgtcctcgatcttctgccgttccagaccggacagttggccgatacgcatctggacgatggcggtggcctgcacgtcgtcgaaggcgaagcgttccatcagccgctgcttggaggtggggatatcgggagaagaccggatgatattgataacctcatcgatgaaatccacggcggttttcagcgcttcccagatatgggcccgttccttggccttgcgcagttcaaacagggtgcggcgggtgatgacctccacctggaatttgatgtactcctccagcatctgcttgagggtcaggatgcggggaataccattcaccagggaaagcatgatcacgccgaaggtggtctgcatctgggtgtaggcgaacagctgattgagcaccacctgaggattggcgtcctttttcaggtcgatgaccacccgcatgccttcccggctggagtgatcgaccacgtcatggataccttcgacccgcttttcgtccgccagctcgatgatggatttaaccaggttgagcttattaacctggtagggaatctccgaaatgacaatgcggaaccggttattatgctcctcgatctcggttttggcgcgcacgatgacccggccccggccggtggcgtaggcggcgcggatccccgcgtggcccatgataatgccgccggtgggaaaatccggccccttgatgtgatccatgatgtcgataagctccgcctcggggttatcgatcagcagacagatggcatccaccacttcacagagattatggggcgggatgttggtggccatgcccaccgcgatgccggtggatccattgaccagcaggttaggaaaccgggaaggcagcaccacgggttcctgcaggcggtcgtcgtagttggtggtgaaatccaccgtttccttttcgatgtccgccagcatgtccaaagacattttgctcatccgggcctcggtataccgataggcggcggcgggatggccgtcgacggaaccgaagttaccgtgcccgtccaccagcggataccgcaaagagaaatcctgcgccatacgcaccatggcgtcatacacagaggcgtcgccatggggatgataccgcccgagcaccgcgccgaccgtatcggcgcacttgcggtacgccttatcgggagtcaggttattctcgtgcatggtgtagaggatgcggcgatgaaccggcttgagtccgtcacggacatccggcagggcgcgggccacaatgaccgacatggaatattccaggaaactctttttcatttccttttccaggtcgaccggttttgttttcatcaattgtgtcgtctgttcttccatttcagctccatgtcctttccgggcttatgttcctcccatcgcttcgccagcggacagaatgggaacaaaaccgatgcgtgttaccagagtccatccgtcgctaggcaagcgctgaatacatcacgcttggcggctcagcggcggattagtggggaaaattttcttcaccaatccatccactggatttcatcatcgcttccctatagagacaggatggatttgagagtggccggcgaatccacacaatgccaggggatttccaggtggccgaagggcgtttgcagccgcacgcccttccggacttcccgtacccttatatgccggcgatcgatgaaggagacggtttctccccggcgcagggccaaccccgatggggtgaaggctagctgtaccgtccgggcgcccgcggcccccatcgtatgtagcaagccgcagatgagcaggctgaggcccgccgctcccgccagcacaatccccgtatatatcgcccaatccagcaggatggacggggtgaggaaaaacaccatagccagctgaccggccagcagcagcagcaccggcaaaacatacggaaaccggccggccatggtttggcggtacaggccgccgaagctttgcagttcttcctcgtccaccgagacggtcatccagacctcttccccgccggaaaacaccggcacgggaaggggctgccgcagccagggcgtaaacatgccgtcccgccgaaaatacgcgggacgcaccatataggtcaaacaggcgagcaccagctgggcgccggcgggatccatatcctccgcccgccaggcgattacctgcccctgcccgcccagcacaatcaaatccgccgactccagcaaaaagtcggccagccggtaatcgatgacggtttttcccctggcggaaacctggaccgccctgtccccatacagctcgatgacgctttcctccggctcgctgtccatataagcggcgaattgcttggccctccatacggttcttcgatggaggaggagggggatcatgcccaccgccgcgcacaagcagagaaattccagcccgataaacaggagggtctgccaatcccgggtgtacagctgaaagggaaccgccgcgttatagccaaacagcagcagtgcgacagccgccgcaatggccaaccccaccggcaaagcccttttttccgtccgccggtggacccgatcatattgagaggcgttcagccggtggcagaccgtggcggtcatggggcaggaattgtccgccggcggaacaaaggggcgatacgccggctgaggcgggccgtagaccggaggcggcgccgggcgctgataaggggcataagccggcggccggcccgcaccgggcgagacataaggcccgttcattggcgactgccagcggggatcgttctccataggggttcccacctttcccggttaacccgttttcttgggcatgtgggtatccacaatgcgccgcagctcgtccatatcggggatgcagcgtttcggcacccggataaacagacggttgttgtaaaattccacgcagtcttccttatccaccgcgtgctggagagacacccaggcgatgcgggtctcctcccccggccggacgctggaacccaccagtcccctttcagtcaaagacagccggatggtcatggcatcctgctgcatagtctccagcgaccgcttggcgcgggaacgtggcagcaccacgttgagaagaaagagcacccccagaatcagcaggaaagcgcccacgcccaccccgatgccggacagcaggccgaacatcacaccagagaacagggacagcgcgctgaacaccggcagcatccgcagaaaggatcgggtggtggtgtcccccaccagcttgagaaattcctccggcgtataagtgacggaaaacgccattaactcctcgtccaggtggctctccccctcggcggggggcggggccatccgctgggaggcctgcggcaccatcttgcttaacaggcgctggcgcatgggcggaatgcgggggagcaccgtccggcgcaccagctcagcatcctccctggtcatgcaccgggcgggcagcacgatggcccggctggaggaggcgagcagcaccatcatgtccccggtctctatataggcggcgttttctccgtaatagacccgattcaccgtcccgccgctgaccttttccagccgatcctcatagacgtagaccatgccgtaatactcgtgaccgcccaacacgctttgatcataggcccgacccgcattgcgccgcagataggcgggcatgccgaacagcaggaacccaccggtcagcgcgatgaaggccaccaccaggatcatcactacgtctaagctttgaaacatgaaaaattccaccgccagcatcaccaggctgaaagccatcatcagaccaaaaatgaccagctgccccttgcggaaacggagcatgccgccgtttttcgccagcagcatattgaatgcgatatattcctcccggctgagatccaccgggaagccgatcgcctcggtatccggggcggcctgcggttgaaattcgtccatggtacatcctttctgccggcgcggcgttacgcgtgcccgctgaccggcgcggcggccagccattcctgtatggcgctccactgcccctcgtcgagcaggcgagtgggtaccagcacatggcattcccgcccgaaggagacgctcagccccccggcggtcttggcccagctggtcaccagggataagggaagcttcccttccatgcggctgttccggattttgataaagccggggccgaactcgtacacgttggcggtgcgcagctcttccttctcctcatattcccgggcggccgcccccttgtcgagaatgggggcaataaccccctcataaatcatcaaaaacacgccgaacaccagcagacatcccgctgtaaaaggggacagcgaaatataatggccaaagaagataccggccagggacaagatccccagaataccgcccgccagggtgaaaaaggacgggcctcccgaccgcagccggtgaatctgaacggtgagctgcatatactcctcgcgggtcatcagcacgctcagggcgataggtttcggttccatagcagccttcctccttgcaaagaaacccggttccaggggcttctatcagaaataccagcggcgcatcaccttgcgcttgcgaataaagacgaggcggagaaactccagcgcgtcgtccttttgctcagcgggcaggcagcgcttcggaaggatcagcagccgatccctgtccttaagaaaaaccagcagctccggcgtttccacacacagggccagcaaagcatattggtccgttaggcggacaagggccgtgtcggtgcgcacatcgtcggcgtacaaccgcaccacgctgtccttcatcaactctttgtaggtctgataatcccggcgggcccgcttgcggatgttggccggctccatggtgaaaaaagcaatggccagcagcagacccagcacgcacagcataatcggcagcaacggcgaggcaaaccaggagaaggccagcagccccacggcgcacagtgctgccgcggccgcgacaatcaccggcgtcggccgcagggatccgatccgccgcgccgcgatgagagacgcctcgatgtattccttttccgtcacgtcgacgggaaattccaaacggggcgggatttcctgcggcatagaggtcactccttttctcgtgggctttccattttctccgccaccggggaaaggcggtcggtaaacagctgccaatcctccggcgacatgacgcgcttgggtacggccatcacggcgccgccctcgaaccgaagcaccgccatgtcggtgtacagccggggccggcaggcggaaaagggcaggagttcgtccggcgtgccgaaggccaacccctcgtcgtacagaaacacgtgcagctgccggttcagctctgcctcccgggccgcgtcgtggcgaaaccgcttttccgggaccagcagcaggataccggcaagaatgactgcgatcaccgcgacgccgaaggcccgccagtcggtcatgccatcggcgaaaaagccgatgaggcagtaaatggtcagcagcaggagaataccggtctgcacccccacccgcaccgggccggccttgcgctgcccgctgcgtttgagacagaggtaaatttcttcttccgtgcaggtataggaaaactcccgtatccaggtttcatccattggtccgccgccctttcgtcagatatccaggttggagacatactgggcgtttttctcgatgaattcccggcggggctccaccttgtcgcccatgagaacggtgaagacctcgtctgccgccgccgcgtcctccagctccacccggagcatggtacggaaggcaggatccatggtggtctcccacagctgctcgggatccatttcaccgaggcccttgtaccgctggacgtcggcgttgccgcccagctccgcaataaactgatcccgttccggctcggagaaggcgtagcgcacctgcttgcccttggaaaccttgaacagcgggggctgcgcgatatacacatggccctcgtccaccagtggccgcatgtagcggaagaaaaaggtcagcagcaaggtgcggatatgcgagccgtcgacgtcggcatcggccatgatgataaccttgccgtaccgcagcttggacaaatcgaagtcgtccccgatgccgcagcccagggcgatgacgatgggcaccagcttctcgttgccgtacaccttgtcgagccgggccttttccacgttgagcattttgccccacagcggcagaatggcctggaagttccgatcccgcccctgaatggcggaaccgccggcggaatcaccctcgacgatgtacagttcggtgcgttccatgtcgctccaaatgcaatcggccagcttttcgggcatgcgggtggaggacaggccgctctttttccgggccagctcccgggccttctgcgccgcttcccgcacccgggcggcattgatggatttctccagaatcgccttggccaccgcgggattttcctcgagatagggcgcgagcttatcgttgagcagggtattgaccagggtgccgatggcggtgttgcccagctttgccttggtctgtccctcgaactgggcgtccttcagcttgacgctgataaccgccgtcagcccttcccgcacgtcgtcgcccttcagggaggtgtcgttgtccttaagcagcccgtgcttgcgggcgtaatcgttaaaaatccgggtgatggcggttttaaaagcggtttcatggacgccgccgtccaccgtgtggatattgttggcgaaggagacgatgttttcgttatagctgtcgttatactgcagggccacctccgcgatggaatccccgtcggacaccgacatgtggatgacatcgggatgcagcacctggtagcctctggttttgatcatgaaatccacgaaggaggagataccgccctcatagcagtaggtctcactctgcaccagttccggatccctggtgtcggtcagccggatggacaggcccgcgttgaggaaggcctgttcccgcaggcgcttttgcagcacctcgaactcgtattcggtggtttcggtgaaaatttcgggatccgcctggaaacggatgagggtgccgtcgtgatccgacgcgccgatcacggtcagctcgctgaccgcaacgccccgttcgaagcgctgggcatacaccttgccgtcccgggagatctccacttccagccaggtggacaaggcgttgaccaccgaggagcccacgccgtgcaggccgccggacaccttgtagccgctgcccccgaacttgccgccggcgtgcagcacggtgagcaccaccgtcacggtggggatccccagcttttcgttcatgcccaccgggatgccccggccattgtcccgcaccgacacgatgttccccggcagcacatccacctcgatatgggtgcagtaacccgccagagcctcgtcgatggagttatccacgatctcatataccagatgatgcagcccccgcggcccggtggagccgatatacatgcccgggcgtttgcggacggcttccagcccctccagcacctggatttggctttcgtcatacggggtgttttcagggcgcaccatgctgttttccagttccaaatccatgtccatctctgtactcattctgggtcattgcctccgttttccgttaatttgcgtcagatgttggcgatatcctcgatgaacccggtgcgtttgagcagggtggaggaggaaatctgcgatatataaacagtttcgccgtgttttttgtccatgcagaccacaaaagacttgggcagctccatcgacacgttgaatatccgcccgcccttctgggcatccgataaaaaccggcgggtgtgcttggaaatggtggcgttctccatgtcgaaaatgcccacgatctcgtccagacggaccaccgtgtcctgtcccagatgcagatacatgcctgttgcctcctccccagagccggtatggtattggctaaaacggcactacccgtccggcgtcaggattccgtcctgcatccggaaggcccggcctccgtccagccgccgcaccgcgcccggatcgcagcaggtgatgaacacctgccagccgtgaatgtggttgagtatatagtcctgccgggacaaatccagttcgctcatcacgtcgtcgagcagggcgacgggctgttcccccgtcacctcccgcagcaccgacgcctcgg

SEQ ID NO: 3903 - DNA, 30520 bp, Unknown
  16S sequences of unknown bacteria
tcgactttcatgccggagtttttaactttttcggacatttcggaaataacaccggctctgataagcccgtagagcccctgatcttcttctgtgatcccgggaatctcgtcggaaatgccgtttttgatatccactcttacctcgggatcaaataatgattcggaagcggaagtttcgggattatcagtgctttcggaatccgttacggtatcggcaatgctttcggcagctgcgtcggcttttggttcttcggcaccctgaggtgccgaagaagtgaaagcgtatatgatccccgatgcaagcataacaatgataagagtgatgactattatgatcgcaatggttgaatttttcattggtttatctccttcatttattgggatacgcggtaatagcgaatatcgctgtcataaaacggggattttctgtttcttgcccatccgggagatgaatcgtttgtgggatgatcgtccgcatcaagaagctttgagtcattcagcccgtttttatgagcccatcgtccggtatcggttctgtaccaaaaatgataatcaaaatcccattcagaacattctttgtatgaattataaacaaactgtcttccggctcgcatacaaacgatccattgattgctcctcatagaactcaacgtaaatatggaatcggaggctgtccatttgccgggaaaataaatatccaagaatttcccggaatcttcaagaagggctctgaaataatcaagcatctgctgaagagtttttccttccgcctcctctaagtagtgcatgtcatcccaagtcatccaatcgaggctatcattcgcaataaagaaagcgtactcttgacagtttagaagactattttcctgcacatacggttttgctccgtaatagatgagtgttgagtctatcgcgcttttgcttgcctttgaacgtgttccggaccacgcgacaagtcccgcctcgctgtatacacggatttcatatgttgtgttcggagaaagatcggtcaccacaaagctcgtattagtggaagtgccgcagttgcgccaagctcctcctattgcacgtcgttggatgagccaacggtctgcaccgtgaggaatcggagtggaccacgacagtgagatcgaaaacggctggcggtcggttacggtcagatttgtcggctgagcgggcaatgtagtcacggaaacggtattgcttaccgccgatctgataccgctccatgcggtacttcctctttccgcatatacgcgaaattcgtatgtggtgttcacatcgagactgcttgcaacatagcctttataggttgatatgttgcggtttgtccaagctccgccgtcttttctgcattgaattaaccagcggtccgcaccgtgcggagaagcggtctcccatgtgatgtatacggagttttcggtaaagctttcgaccttaacatttttgggctgagcgggcaatgtggtcacggaaacggtattgcttaccgccgatctgacaccgctccacgcggtggctcctctttcagcgtacacacggaattcgtatgtggcgcttgcgtcgagactgcttgcaacgtaacctttgtaggttgatatgttgcggtttgtccaagctccgccgtcttttctgcattggatgagccagcggtccgcaccgtgcggagtggcggtctcccatgtgacgcggacactcgttccggtgtagtcgtgtgcttggagatttgccggcgttgtgggcagtgtcatggctgtagcgatactgctgcccgccgatcgtgtaccgctccacgcggtgcttccgttctcagcgtagactatgaaatcgtacgatgtacttgcggaaagccctgttacagtatagtagttgttgagcgaggttgttcctgcgttgatccaacttccgcctatcggtctgtatcggataagccagcggtcgggttgggtttccggagcgtcccaattcaaattggttgtctctccggaataactgactgctctgaagtttttcggggcttcgggaactgccgctgcttctgccgctgcaggagcagccggctcgggaaaggaggtctccccgagattgtcggtaagccttaaattgtctcccggactgtacctgaattgaggttcatatgaggcagcttgattagagggacgggatataacgggggcagtgcaatttgccgaaaaacctaaccgaggcgatgcgagcactgtgacaactgccacagcactgatggcaaggataaggggttttttcataaatgcaattcctttcaatattttatccgcataatgaattttatcagataaatatatgaaagtcaataaatttccgtaatacgacaaaaaacattgagattttatgtatttatatgtctgcttgcgcggtttaaagatgccttttgaggcttcttcccttcatttatatccaacaataatttttgaggtatacatgtactcctcagccaaattgtagcatgaattatgaagtgtgtcaacaaacgccacagaaaattaaattaatttacaaagaggtcgctttttgtccaattttaagttgtccgcgcttcgccggattatcaacctacggtgagattctttcggacaagccggagggggttatatggagattttccgttcgtcgtttggccggtggggagttcttgcgccgtgagcttcgggcgcagatgcggagcgttcggagaagagctgcgggaaggcaaaaaaacgaagggactgtcaatttacatgacagtcccttcggaacaaatcggtattctgctgcgggattaatacataccgcccataccgccgcccataccgcctgcgggtgcagccggttccggctcgggctgagatacgacgagagcctcggtggtgagaacggtggaagctacgcttgccgcgttctggagagcgctgcgtgtaaccttggtaggatcgacgattcccgcctcaaccatgtcgcagtaggtctcggaagctgcgtcgaagccgtatccgaccttgccgctcttgcgaaccttgtcaacgatgacggagccttcgaagcctgcgttctcggctatctgacggagcggagcctcaagtgcgcgtacaacgatgtttacaccggtcttttcgtcgccttcaacggtgtcggaaagctttgccacatcgtcaatgacgttgatgtaagcggtaccgccgcctgcaacgatgccttcctcaactgctgcgcgggtagcgttgagggcgtcctcgatgcggagcttcttttccttcatctcggtttcggtagctgcgccgaccttgagcacggcaacgccgccggaaagctttgcaagtctctcctgaagcttctcgcggtcgaaatcggaggtggtggtctcgatagcgttcttgatctggcttacgcgggctttgattgcctcgggatcgccagcgccgccgacgatgatcgtgttgtccttgttgaccttgatctgacgtgcgtgaccgagctgctcgagagtggcttccttgagctcaagtccgagctcgctcgagatgacctcgccgccggtgagcactgcgatgtcgcggagcatttccttgcggcggtcgccgaagccgggagccttgaccgctacgcagttgaacgtgccgcggagcttattgagaacgagagtcgtgagagcttcgccttcgacatcctctgcaatgatgagcaggcgtgcaccgctctggacgatcttttcaagaaggggaaggatctcctggatgttcgagatcttcttatcggtgataagaacaagcgcgtcgtcgagaacggcttccatcttatcggtatcggttgccatgtagggggagagataaccacggtcgaactgcatgccttcgactacttcgcagtaggtttcggcggacttagactcctcaacggtgattacgccgtctgcggtgaccttttccatagcgtctgcgatcagggtaccgatcacctcgtcacctgcggagatagtgcctacgcgggcgatgtctgcagtgccgttgaccttcttggaattagcggtgaggtctgcgacggcgcggtctacagccttctggataccgcggcggataaccatcggatttgcgcctgcggttacgttcttcatgccctcgtggatgaatgcctgagcgagaagagtagcggtggtggtgccgtctccggcagcatcgttggtcttggtcgcaacttcgcggacgagctgtgcgcccatgttctcggatgcgttctcaagctcgatctcctttgcgatggtaacaccgtcgttggtgatcagcggagtgccgaacttcttgtcgaggacaacgtttctgcccttcggtccgagagtgatcttaaccgtatttgcaagcttatctacgcctgcgagaagagcggatcttgcatctgctccgtaaagaatatccttagccattgtaaatccctcctgttattactcaactattgcgagaatgtcgttctgacgaacgatgttgtattcggtatcaccgcactttacttcggtgcctgcgtacttgctggtgattacacggtcgccgaccttaacggtcataacgacttccttgccgtctacgagtccgcccggacctaccgcaacgacctccgccatttgaggcttttcctgagcactgccggggagaatgattcccgccgtggtcttttcctctgcttcgatcgcctttactacaacgcggtctgccaaaggtttgatattcataatatacctcctgcttttgtgcatcgcactttatttatttcgttaatctgatttagcactcactgtacctgagtgccaatcacatgatatattctatacccggcatatagaaaaatcaagggaatttcgaagagttaacatatcgtttacaaaatatgcctaatatgtttttacactgacctgcggcgagtgctaaacgggcggagaaaagcccgaaaaaaggggaaatgaccgcgacacgtccgcacgcggatgtaataatccgtgcggatcgggcgtaaactgtaatatgcttgataatattaacgctcttctgtcgggaatgataatgcccgtgctgcttctcggctgcgggcttttgttctcgtcgtatcttcactttttctggattgtgcatccggtgaaattcttccgttcgctgaaaaagggtctgaccggagggggacagacaccgttcaaagcgatgaccgtggcacttgcgggcacgctcggcgtggggaatatcgcgggtgtggcaagcgccattgttgcgggcggcgcgggcgcggtgttctggatgtgggtcagcgctcttcttgcgatgggggtaaagtatgccgaggtcgtactcgccgtggctcaccgaagaaaaaacgccgacggctttttcggcggcgcgatgtactatatgtcggatatgctttctccgcggctcggcggatttttcgcgctcctctgcctcgcaaattcccttgtgacggggaatatcgttcagtcgaacgccgccgccgcggtgtattccgagcgcatcccgccgatcgccgtcggcgcggtcatgtgcgtgctttcgcttgcggtgatgctcggctctctcaggcggatctccgacgtgacggtgaagcttatcccgtttctttcgggagtgtatatacttctttccctttatataatatttgcgaacacggaaaggctgccggggatattcgccgatatcttcggctccgcgttctcgcttaaagccgcggcgggcggtgcgggaggctttgcgctgagccgcgccgtgcgcttcggggtcacccgcggcatactgtcgaacgaagcgggatgcggcaccgcgccgaccgcacatgcctccgcaaatacaaattcccctcacgatcagggaattttcggaatattcgaagtgtttgcggatacggtggtgatctgcacgttgacggcgatcgtgatacttcttctcggcgacggcaggggtgaggacggagtaaggctttcggtcctcgcgtaccggacgttcgcgggtcgcgccgcgggacatgtgatctcggtatccgtaattcttttcgcatacgcgacggtgatctgccaatcgtactacggcgtggtcgcgctgagatatcttacgcacagccgccttgcgctcggaatttatttcgtgctgttcggcatttcgtgtatcgcggggagcgtcatcggctccgcactcatgtggaatatcgccgatctgtgcgtgtcggcgatgaccgcgacgaatgtcgttgtgcttctgtatgcgttcttcaataagcgggaacgccgcctcatgcttccgggagacggcggctgattctcagtcctcaaaccacagaccggagtccggcgggactttctctttgcgctccttcggcattgtgcggaaaagagatgcgggatgcacttcggcggcacccgcttcaaggagcagtgactcgcatttctcgacggtggaaccggtggtgatgatatcgtcgatcagtatgaagcgttttccggcgacctttgctcccggcttcagccggaatgcgtccgatacgtttgcgcgccgcattgcggcggagagctttttctgatctgtgcctccgcttcggatgaataccgcgtcgaatccggctccgatgtactcggcggtcagcgatgccagacgttccgactgatcgaagccgtatttcctttcggcatcgcggcttctcggcggaaatgtcacggtgaagtccgatatgtcctttccgatatcggagctcagcgcggcggcgagagaacgcgcgaaaaaatttcggatgtcgcggtcgtattcgcgcttgaaacggtatacaaggcgaccgatatcgctgtccgcccccgtataaaatccgagcaccgtgagcttggcggcatcgggggacgaaccgcagcggcagcggcatgatttcgcgccttttccgcatacggggcaggtgagcgcgagcgcatcggaatatgcgccgagacacttttcgcacatttccgcgccgcggtccggatcgagaagctctccgcacaggatgcactttctcggaaacacggtgttgcatatgcgcgcggcgatgcggcgcagcgtaagcttattcaccgcgcgcctccgttatgttttccttcaggcgggtgaggcgttttgtgtgccccgtattctcgatcatcgtcgagagtacggacgggtcgccgacgagtatagccatacgcgaggcgcgtgtgatcgcggtgtatataaggtttctcgtgagaagcatcggagcgcagcggtaaagcgggattatgacaaacgggtattcgctgccctgacttttgtgaaccgtcacggcgtaggcgtggtcaagctcgtccgcaaaggcaaagtcgtagtcgcagatccttccgtcaaagtttattctgaacgtgccggaggcgtgatccacggaaataagctgtccgatgtcgccgttgaatattccgacgcccgaaaccgaatccttctcccattcgacggagtagttgttcttggtctgcattacccgatcgccgtcgcggaatatcttttctccgaacgccttttccgctttttcgggtgctcggggattcagaagctgctgaaggcgcgcgttcagctcgaccgtgccggacgcgccctttctcgacggtgttattatctgtatatctcccgcgatgtcctttccgtattttgcaggaagccgcttctttataagctcggcgaccgtcgatgcggtttcgccgtcggaataccgcggcatgagaaagaaatctccgtccttattcgagcagtcgggaaatttcccttcatttatcatatgtgcgttggtgacgatcatgctttcgccgctctgacggaatattctcgtcaggcgaacgagcggaaacgcctccgagcatatgagatcgtcaaggacgttgcccgcgccgacaggtggaagctgatccgcgtctccgatcaggatgaggcgcgcgccgggcttgatcgcgcggagcagggaatggaacaggaagatgtcgatcatcgacgcttcgtcgatgatgaagacgttttcatcgaggagatttttctcatcgcggaggaacgaagcgttttcgtcgtctccggtgtattccatttcgagaaggcggtggaccgtttttgcttcatacgacgtcgcctcgctcatgcgctttgccgcgcgtcccgtcggtgccgcaagcgcgcacttcagtccgagcccgtcgaatatcgatatgagcgcgcgtatgaccgtcgtttttccggttcccggaccgcccgttattacgcagactccgccggagagggcggcatatatcgcttccttttggagatcggcatattcgatatgcgaatcgttttcgcagcgcgagataagtatcggaatatcggcatcgccgattctcgggcagagacggtaaagctgcacgagcttcgcggcgcagtatttttccgcttcggcggcgcgcggcaggcttatgtatctttcaccgttcgagaccgtgccgacggcgtgtgacctttttatctcgtcatcgagcaccggggcgagaatctcggcggggacatcgagaagcgcggctgacgtatcggtaagctcgccctccggcatcagggtgtttcccgttttctgcatatatgccgagaggacgtaggagattccggcagacagcctttcgtgggaattcttgtcggtgccgatcgtgagcgcgatctcatcggcacggcggaatcctatcccgtggaattcgctgcaaaggcggtacgggttttcgcgtatctttccgacggagtcgcgtccccatttcttgtatattctcattgcggtcgcgccggagcagagattgcggcagaacatgatcacgtcgcgcgctcccgccatctcacggaagctttgcgatatgacggcggcttttttctgcgatataccgttgatctccgcgagccaatcgggatgattttcgatcacgtcgaaggagtcctcgccgaatttgtccactatgcgggaggcggtcttcggtccgatcccctttacggcaccggacgagagatagcgcagaatgtcccctttcgtttcgggcatgaccctttcgaagaattcgcacttgaactgaacgccgtataccggatgattgacgaacgatccgtatgcggtgatcctgtcgccctcggtcagatagggaagcgtaccgacgacggtgacgcattccccctcggattcaagcaggcagacggtgtatcccgtttcctcgcttgagtagataacggaatccacagtgccggagaccgacatattctttttctgttcgtttatcgtcagctcttccggcatggcattctccttttgataataagaaatagtgaaggcgggtgcaccgcatcgtacattacggcaaggccgggcgctttccccggcatgtgagcgcggtttctgcaaaacgcaccgtatcggcgcttttcagcgaaaactcacccgcccgaaaaagcgtcatcacttcatttgtttattgtaccatattccgaacaaaagttcaatcttttgaggatttttcctcggagacattatgcggctgtgattcctcggagcttttgtcggagacgttctcgcagcgggacagcgtacagccgcggcaggcgatgcagttatgtccgcagtcggagctgttgtcctcgtcgccgtcctcgcttctcccgccgcgcgtcatgagaagaaaatatacctcgcgcgcggcgcagtagattccgtagacggcaaatacgcagagcagacagcaaattatttcataaagcataaaaatatccccctgcgctcagtatatgccgcagggggagtatttgcaattatcaaagtccgaattcgcttctgagggtatctgcgagatcggtcttttcccaaagtacgccgagttcctcgcgtcccatgtgaccgtaagatgcaagaggctcatatatgggcttacgcagattgaattttttgattatcgcatcgggacgcagatcgacaagctcgcttatcacatcgccgaggcgggagatgtcgcacttttcggtgccgaaggtctcgatcatgagcgataccgggcgtgcaacgccgattgcgtaggcgagctgaatctctgcgcggtcggcgattcccgccgcaacgatgttctttgcaaggtaacgcgcggcatacgacgcgctgcgatcgacctttgtcggatcctttccggagaaagcgccgccgccgtgacgtgaagcaccgccgtaggtgtcaacgattatcttacgtccggtgagaccggaatctccgtagggaccgccgatgacaaagcgtccggtgggatttacatatattttcgtctccgcgtcgatcatgccggagggaacgcagggcgcgatgacgtgatccgtcatgtcgcggcggatatcatcgaccgacgcgtcggggctgtgctgagtggagacgacaaccgtgtcgatgcgcacgggcttgccgttttcgtactcgacggtgtactgagtttttccgtcggggcggagataggtgagcgcgcccgtcttgcggacctcggcaaggcgctttgcggtcgtgtgtgcgagggagatcgcaagcggcattaattcgggcgtttcgtttgtcgcatagccgaacatgattccctggtctccggcgcccgtctcgagcgaatcgtcctcgccgagctttgcctcatacgaatgatccacgccgagcgcgatatcgggagactgacggtgcaccgactgaatgacggcgcatgtgtcgcagtcgaagccgagctttgcgcggtcatagccgatccggcggacggtttcgcgtgcgacggactctctgtcgatgtgcgcggatgaggtgatctcgcccattatgaggatcagtcccgttgtgcagcttacttcgcaggcgacgcgcgcgaacgggtcttccttcagatatgcgtcgagtatcgcgtcggatatctgatcgcatactttatcgggatgtccttccgtaacggattcggaggtaaaaagtcttttcattttgatttcctttcccgtatcaaaagcaggcggcaatacatacgaaacaaaaacgcctccggcagagcggaggcgcgaatgtgctttgacctcttatctgtcgggaattagcaccttgtcctgcgtgcaaagcaggataggttgccgggcttcacagggccagtccctcagccgctcttgataagtttgtatttttcttttcggtctattgtatcacacattgcggcgcaatgcaatagaaaatatcgaatatcgacgttattttgaaaaaattgtgctctttatgccgagctcctcgggcgttttgtagactatctcggtttcctcggggataccgtaaaggattttgaattttcccgcctgatacggatcacggaagggaagcgtccagccgtactttgacttcacgggatacgagagcacgagcggtccgtcctgatcttcaccgacgaacgaagcacacgcattttcgttgaagcggttgacttcgtaattcgaaaagtatccgaatcccacggagaggaagagcatcagcgagaacgcggccgcgagaacggcagaaaggcggaatttccgctttgtgatggtgagagtcgcatcggcaatcgccgtgacaacgagtatgcataatacggttttgacggaaaacatctcacatttgacggcggcaaaggacatggcgagaagcggaacaagcgattttttgaatacgctgtcgggcagatcggcaagcatgtatacggtcgtgacggcgaggaagatgaccgtaatgtagagcgtgcgcggtccgtatacgggagagatcagcatggcgcccgatactcctacgcaggcggcggtgaagataaacggaacgacgctctccccgcgcagcgcggagatcataaagtatacagtgcagaacgcaagagagacgaccgcggaaaccgtaagctgggcgacggacggagtgagtctcgggaaaaactttgttccggcaagtaaaagcacggctgaaactgagcacgacagagcggaggctccgcagaatacggcgtatgcgatatttccttcccgtttccgcacgatctcgatgaatctttttccgaaggtgtatcccgcaacggtaaaaaagaagaggaaaaagacgaacacaacgccgacgttgaacactattccgaaaaattcgctgaggtttcctcttattttcccgaacagggactttgcgtaaaactccgggtaataggtctggcggatggagttgccgggcgagaacatcactgtggcgaacgccgccgcagacgtgaatatgcttacgatgtacgaggtgcagagcttttttttctttacggcggcgatgtagatcggcattacgatgcagatgaacagcgatgccgtggcgctttgctcggcggtgaaggatgcaaagaaggcgagcacgggaagataccgcgcgccgcgctcctcatcggcgaggcgtgagtaagcgaagaagagcagcagagtgagcattaccgggaagacataattcagtgatcccgtcgcccaatacacggcttcgcggagtatcggaagtccgatcagcgagaatgcggtgcacgacatgataagcgacgagggaaaacgcgcccggtcgtttccggaggcgatctcggcgacgagaagaaccgtcagcgcaatgacgaagaactcgaacaccttccacgccgcaagcggcagataaagaagcacttcatctaaaagatgtacgaagaatcttccgtttgtctgcgtataatggactgcggtctccgaaagaaaatatgatattccgcggcggaaaaacatgctgtaatagtagtcgtctccgtagcgtatcacggggatcaggttgaaagcgtgtattgcgagaaatatcccgtatacgatataatgaagtcgttctttaagcgcttttgcgatatttttcatttttcctccgaatcatttcatagggatcaaagtgtgtcggcgtcggcttacggagaataaaacgtcgatttttatagggtgcggtctgctcaggcaagaaaggtgagaaacgataccagtccgtatgatgcaagcgacattatcagaccggcgataagtactccgcagaatattgacgggatcgcgtatttcatccgcatatcgagcatggcggcgacaagagcgcccgtccacgcgccggttcccggcaggggaagcgcgacaaatataagaagtccgagggatgcgtatttctgtaccttgggggtgttcttctgagctttgttttctacccagagggctattttatcaagacgggggatctttttcatccattcgagtacatgacggacgaagagaagtatgatcggaacggggatcatatttccgatcacgcagatgaggtagttcgctacccattcaagcccgagcgttgcgcctatcgggatggccgcacgaagctcaagtacggggaccattgagaggaaaaagacccaaaggtagtttttcagtgagagcatattaccgcctttattattatcagattaaaacttttagaatattctatcatgtttccgaaaaaatgtcaatagtgtcgaagtaataaatgatgcggcgcatttattttatcggaaacgaaaaaaacgagttgccaaacggttgaaggtatggtaaaattacaatgaccgtttccgggtcatcacgcccgtcggggaagtttcgcaataccgcgcggctccgcaatgatcgggcgcgaggactgcaccgtcgtgctgcgcgcacttttgcccgctttgcattcggacagaaaacgtgcaggagacgtactccacagcttatccggatatgcggtccgtaaaaatgatatccgcaaaggagaatccatgtcgataaaatttgaaaagaacgggatgcgcttccgtctgaggacaaaaaatacggaatacgatctcatgatccttcacggaaagtatcccgtacatctttactacggaaaaaaggttcgcgggcttgatccgcagtatttccaccgcctgcattcgttttcgccttacaagcgcgaggaggatgaggagctttcgctcgacgaggcgtttcttgaatgcccgttcttcggttcgggagatttccgctccaccgctctcaaaataaagaacgcggacggcaattccgtaacgctctttacatataagaagcaccgcattttcagcggacgccgcgagatctccggtcttccgtttgcgcgcgcggacgaggacgcaaagactctcgagatcacgatgaccgacgatgaggttacgggatgcacgctgaagctttactacaccgttttcgaggactgcgatgtcataagccgctattcggtgcttgaaaaccacggcaaggctcccgtagatatcgagaagatgatgagcctcacctgcgatattcccggacgcgagtgggatatgataagcctgcacggcgcgcactgctgggagagaaacgtctgccgccttcccgtcagaatgggatcgcagagcgtgttcagccgccgcggcgcgtcgagccaccaattcaacccgtttattgcaatagcggagcgtaaggcgaccgaggagcgcggaagcgtctacggcttcaacttcgtctacagcggaaacttcctcagcgaggtcgagcaggggcaggaggagtacacccgcgttcaggtcgggatcggaagcgagaatttcggatggaggcttgagccgggcgaggtattcgaggcaccggaagccgtcatgacgtattcggcatcgggcatcggacagatgagccgcaatttccacaagttcacccgtgcgcacatacttccgcccgacaagacggagcaccgccccgtcgtcctcaactcgtgggaggcggtgttcttcgacatagacgaaaaggtacttatcgacttcgcaagggagagccgcagatacggaatcgatatgctcgtcatggacgacggctggttcggcaagagagtgaacgaccgcgccgggctcggcgattggttcgaaaaccgcgaacgcttcccggacggattaaaggcgtttgccgaacgtgtgaaggcggagggcgtcggcttcggaatctggattgagccggagatggtcaaccccgacagcgatctctaccgcgcgcatcccgaatggacgctccgcgtccccggaagaacgtcgtcgctctcgaggcatcagcttgtcctcgatatgtcgaaccgtgatgtcgtcgagtatctcaagacatcgtttgaaaaaacattcggcggtgtgccgatcgactatataaagtgggatatgaaccgccacctctcggaggtgggcagcgacttcctcccgcccgaaaggcagaaggaggttccgcaccgttatatgctcggcgtgtatgagcttctctcgtggttccgcagccgattccccgatattattatcgagacgtgttccggcggcggcggacgttacgacctcggaatgatgcgatacggcgagcagatatggacaagcgatcttactctgccggcggcgcgcacggtgatccaatacggctccacgcttgcgtatccggcggcgacgatgagctgccatgtttcgcatcccggcgacgatcccgacgagatcgactaccgttgggcggtcgcaattcacggaatgctcggatacgagatgaacatacttacggtcgatgaggcggtcaaggcgcgcattcctcacgaaattgagcagtaccgcgagtacgagcacctcataaaggacggcgagctttaccgtctgaagaatccgccggagaacggatgcgccgcatattattacacgaacggcgacagctcggagatacttctgtcttttatccagacggaggacagcgtgaagaatgtctcatacaggctgaaaatcagccgtgccgagcgcggagcggtctatatcgaccgacgcagcggcgaaagattcaccggcgacgagctgcgcgcgggaatcgtgtacgaaaccgcaccgaagcattttgcatccgtgcgctatcttgtaaaggaataagccgccgaaacgcggttcaataaacaaaaggggatttttatggaaaactacatttacaaaggggatcggtacagccttgaaataggcacttcggcgatccgcgtttatcaggacggcgtgagagtcaccgacctcatgcccgccacatccgtcggaaccgttacggagcttgacggagaattcacagagcatgaggagcacggcgagcacactcccgccgcgattgagaagatatcggacggcgaattcttgtggaagggaacttccgatctgtggaacaaggaataccgtctgtcctgcgatagggaaggcttcacctattccgtgacggtgaagggcaaaggacgtgtcggcaaggtcgattacttcagcgcgcatcttgaggataccgattacacctgctcggactacaatttctgcgaatacttcattccctgcggcggaaccgatccggcattccgcaatataatgcccgcggcgcttccgtaccgctccttctttgagctcctgattccgccgccgtactgcttctcgttccgcaccgagggacttgacggacgcttcggtctcggaatgtgcgcgaaggacggagagtacaacttcttccacttcgattacaatctcggatttaatacgcgccgccgcggcttctatctctcgaccgcgctcgacggacatactgccgttgacggtgaattcactcttcccgttatccgtgcgttcttcggagacgacgatcttgatatcgtaagaaagtattccgcttatcactttgatacggggctttgccgcaaaaacgagagaaaggacatcccgcgctggtggagaggtcctatcgtctgcggatggaacgagcaggagatgctcatcaccgacggatgctctcaggcgggaatggcaagacaggacgcatacatgaagatcgcggacatgataaaggatcacaacatacgtccgacgatgctcataatcgacgacaaatggcagaagacctacggcgactgcctgcccgatcccgaaagatggcccgacatgcgtgcgtttaccgatgaaatgcattcgcgcggaatacatacgatcctgtggttccgtctgtggggcggcgagggacttcccgaggatgaggtaatgaccggagagggaatcccgtacagaagcttcagcctgaactatccgccttatgccgatcccacgaacgagaagtaccgcgcgcatctcaagaaaatacttcattatctcctttcggacgaagagggatgcatgaactgcgacggcttcaagcttgactattcgctcatcatgccttacggcaagagcgcaaagtctgccggcggcaagtacggcgcgcagatgacgaaggagctttacaatctgatctacagcaccgcaaaggagatcaagccggatgcgcttatcaacgcaagtccgtgccatccttattttgacgaggtttgcgatcaggcgcgtctccacgactattcgtgggatctgcgcaacgaaacggagacgatgggtctgagagcaaagctgttcgaggctgctatgccgggcgtgcttatcgatacggactccgtaaactttgcaaaccatgatgacgctatgcgcttctaccgcaatatgccgaagatcggtattccggatatctaccgtttttccgacgatccggcgatcaccttcaccgacgaggactgggtggagatcgaggcgatgatgaacgcatactccgacgagatggacgaaaagtacggaaaataaatataagccgctaccgcgagaatcggcgtgaataattgaaatacggctgccgcaattgaggttactcaattgcggcagctttttgtgccgtgggaaataaagcgggggatgcagggcttttccggaggtatttttcgctttgcctgaaactgcaacagtttgggcggcgtttggggagcgcagacaacggagcatcagcgatgacaacagtttttgggtgggtactccgagcgtgggcagacgtcacagctgccggggaggtactccgttcgacttgcgtgagtggtaggcaaaataaaaatcccgcagataattctgcgggatttttgaaagaatcggatcaattactctttgatctcgataacgacgccggaaccaacggtacgtccaccctcacggatagcgaaacggagtcccttctcgatagcgataggagtaataagctcaacgctcatgtcaacgttgtcgccggggcggcacatctcaacatcatcgggaagagtaatcgtgccggtaacgtcggtagttctgaagtagaactgaggacggtagccggagaagaacggcttctgacgtccgccttctttctcggtcagaacgtaaacctgtccgacaaacttggtgtgcggatgaatggagccgggcttgcagagaacctgtccgcgctcaatctcgttcttcgcgataccgcggagaagaagacctacgttgtctcctgcttctgcctgatccatctgcttgtggaacatctcaacaccggtgataacggtggtctttctctcctcggtgagaccgatgatctcaacggtgtcggaaaccttaacggtaccgcgctcaacacgtccggtagcaacggttccgcgtccggagatggagaatacgtcctcgacagggaggaggaagggctcgtcagtcttacgagcgggagtaggaatatactcgtcaacagccttcatgagctccttgatggagtcgtatgcaggatcgttgatgtcgttgggagcttcgagagcagcacgagcggagccgcggatgatcggaatatcgtcgcccgggaagtcgtactcgttgagaagctcacgaacttccatctctacaagctcgaggagctcttcgtcgtcaacgaggtcggtcttgttgaggtaaacaacgattgcaggaacgccaacctgacgagcgagaaggatgtgctcacgggtctgctgcataggaccgtcggaagctgcaacaacgaggatagcgccgtccatctgtgcagcacctgtaatcatgttcttaacgtagtcggcgtggccggggcagtcaacgtgtgcatagtgacgtgcttcggtctcgtactcaacgtgacgggtgttgattgtgattccgcgagctctctcttcgggagcgttatcgatctggtcatatgccatgaattcgatgttatcgtttgcgagagaaagagtcttggtgatagccgcagtcagagtggtcttaccgtggtcaacgtgaccgatggtaccgatattaacgtggggcttggttctttcaaaatgtgcctttgccattggaaaatcctcctaaaaataatttttgttcgttggaccggattactgaccggttttctgcttgatgatcgcttcctgaatgctcttcggaacctcagcaaagtggctcggctccatagaatactgaccgcggccctgcgttctcgaacgcagctcggttgcatatccgaacatttccgcaagcggaatcatcgctgtgatctgtgtcgcacccgggatgttctccatcgtctggatctgaccgcggcgcgagttgacgtcaccgataacatctccgaggtattcgtcgggagtgatgatggtgaccttcatgataggctcggtgagcacgggatctgccttgcgcatagcttccttgaaagccatggagccggcgatcttgaatgccatttcggaagagtcgacctcgtggtacgaaccgtcgtaaagagttacctttacgtctactacgtcgtagcctgcgaggacaccgttctgcatagcgccctgaatacctgcatcaacggcggggatgtattccttcggaatagcaccgccgacgatcttgttgatgaattcgtaacccttaccgggctcgttgggctcaatgatgatcttacagtgaccgtactgacccttaccgccggactgacgggcatacttggtatcctgatcgacggtcttgcggatcgtctctttgtaggacacctgaggtctgcctacgtttgcctcaatcttgaattcgcggagaagacggtcaacaatgatctccaggtggagttcgcccattccggcgataatcgtctgtccggtctcttcatcggtgtaggtcttgaaggtcggatcttcttccgcaagctttgcaagggcaatacccatcttctcctgacctgccttggtcttgggctcgatcgcaacacggataaccggctccgggaactccatggactcaaggataatgggatgtgcttcgtcgcagagggtatcaccggtggaggtgttcttgagacctaccattgcggcgatatcaccggagtagcacttttcgatgtcctgacgctcgtttgcgtgcatctgaagtatacgtccgcagcgctccttggcgttctttacggagttgtatacgttggagcccgcctcgaccgtaccggaatatacgcggaagaagcagagctttccgacgtacgggtcggtcatgatcttgaatgcgagagcggcgaaaggctcttcgtcgcttgaatgacgtacctgctcctcaccgtcgggagttacaccggagatcggcggaacgtcgagcggggaaggcatgtagtcgatgatcgcgtcaagaagcttctggacacccttgttcttgtaagaggttccgcatacgacgggaacgatcgtgttcgcaatggtctccttgcggagtgcggacttgatctcctcgacggtaagctcctcgcccgcgcagaacttttcgaaaagctcctcgtcggattcggcaaccgcctcgatcatggcattcctgtactcctcggccttctcgcgcatatcctccggaatgggctcaacacgcatatccttgccgagatcgtcgtagtagatgtctgcttccatattgatgagatcaataataccgcggaacgaatcctcggcgccgatcgggagctgaatcggcacggcgttagccttgagacggtccttcatcatctggacgacgcggtagaaatccgcgcccatgatgtccatcttgttgacgtatgccatacgcggaacatggtacttgtccgcctggcgccaaaccgtttcggactgcggctcaactccgcccttagcgcaaagaacggtgacggagccgtcgagaacgcggagcgaacgctcgacttctacggtgaagtcaacgtgaccgggagtgtcgatgatgttgatacggtgcttggggtactggttcttctcaccgccccagaagcaggtcgtagcagcggaggtaatggttataccgcgctcctgctcctgctccatccagtccatcgtagcggcaccctcgtgaacctcaccgagcttgtgagtacgtccggtgtagaaaagaatacgctcggtagtggtggtttttccggcatcgatgtgagccatgatgccgatatttcttgtgcgctcaagtgaatactctcttggcattgatacagtttttctccttcttcaacgcgcagatcaatatctgtagtgagcaaacgccttgttcgcttctgccattctgtgcgtttcttctttctttttgaatgctccgcctgctccgccttttgcatcgattatctcgtttgcaagacgctccgccatagtcttttcgcttctctggcgggagtactgagtcatccaacgcagaccgagggtctggcggcgctcagcgcgaacctccataggtacctgataggtagagccgccgacacggcgagccttgacttcaagtacgggcatgacgttttcaagtgcttcggtgaaggcttcaagaggattgagacccgtcttttcctcgatgatcttgaaagaatcgtaaacgatcttctgggcaacgcccttcttgccgtcgagcatgatgttgttgatgagcttggttacaagcttcgaattgtaaagcggatccggtaaaacgtctctctttgcaatctgacctcttctagacactgaaattccctccttcattaaaaaatatgagatcattggtactcgaaataaaattccgtaaatgcctatcggtcagccgtatataaacaaatcatattacagcgtcagtgataggaaaaaggattcgagcggcgcttatttctttgcgcgctttgctccgtacttggagcgggactggttgcgtccgcttacgccctgcgtatcgagggtgccgcggatgatgtggtaacgtacaccggggagatcgcgtacacgtccgccgcggatgagcacgacagagtgttcctgcagattgtgtccgataccggggatgtaggtccatgcctccataccgttcgtcatacgaacacgggctaccttacggagagcggagttcggcttcttcggcgtggtggtggaaaccttggtgcagacaccgcgtttctgaggtgcgctcagagcgatcggcttgttcttgatggtgttgaagccggtctgcattgcgggagtcttggacttgtaagtcttcttctgacgtccctgtttcacaagctggttaaaggtcggcattgtcttcctccttcttgaaagatttgtttatatacgaccgcggacgagagatgcccgcgagaggtatcataaaaaggatacgcaggtatttttgccgcgcgaaagcgcaaagatacaaatacccttataaaagcgtacatcacattataacaccgccgtctgcgcttgtcaagttatttttccgttttttgcgaaatagccggatttgcgcaccgaaagcgccgaggagggctttcttcgggcggtgtgcggcgacggggattttacatattatatttttatatccggcgtgcggagcgccgccgcacatcggagcaaggacgcaggaactgggacgaataatccggcgttttgccgcagaagggaaattaccccttgacacggagcgggaggtatggtatacttgatacggtaaaaaattcagacttgctcggacaggaggggttgacatgaaacgcataattttgtcggatgtcatacggctctccaaatcagacggtgtcctgcggtaaagtctaaagaacgtacacatccggaaccgggtgtgttttttattgtaaacggcgtcccggcggggcgccttttatttttctcccgatattgtgcggcggagccgattacataccgaaaatcggactgtgccgcaaagccggaatttccggcatgctgcccggtgaaagcggagcgcgcggcgatgcccgaaaaacgaaagggggattttgtgtctgcacgctttgccgcacgggcaaagccgaacaaacgaaaaactcgacttttaaaaacaaaagggggggagtgcttttgaagagacttgcatattttctcagaaacatggatcaggatacacatacatatccggaaatgtacgatgccgaactttttgtcgttgatcccgaacgggctgcgccggataaatgctttgacccgatatattataatgaagatatcggattcaaaatcacgggaacacacaaattggcgcaggataagccgacggttacgatcaatatcccgattgaaaagctgagcatggaagaggatacgctgcagtcgcatacttcggctatagcggcagccgatcactgcctgcgtaaatttgctccgtatatcgacgggcttaacgccgagctttataaccgaagccgtcccgacagcgaaaacgggaaatattatctttaccgcccgggcggcgaggtactttaccgcaacaccgcatactttgcgctgtgtccgcagcgggactacgactatctgagcaaaaacaaggttattcttttggacgacgggataacgcgccttccgaaaatgtgtctgtgcatacggatgctggtacagctcccgaaacgcaagattcgcaggacgcttcggatgctttgccgcgatcttccggatgcagtagacagattcatcacggagtttgatccgatgtcctttgaggaagctctgaagctcgccgaaaagcagaatgctgtccgcagctggctgaaaaacagcgattactgcgcgtttatcgccaacggaagtattctgccgagagcgaaggggaccgatctcccgatgacagacgccataccgttcagatcgacgccggacgacgagatcgaggtctgcggcgtgcgcggaatggggatcagaaaaggcgtgacggtcattaccggcggcggatattcgggcaaatcaaccgtgcttgatgcgatctctgccgggatttacgatcatgccgtcggagacgggcgcgagctctgcatagccgacggcagcgccgttaccgtatccgccgaggacggaagaagcgtaaagcacgtcaacatcgctccgtttataaagtggcttcccggcggagatacgtccgatttctcgacggatcacgcctccggctcgacttcacaggcggcgaacattatggaggcggttgactgcggcgcgaagcttctcctgatcgacgaggacagaagcgcaacgaacttcatgatccgcgaccgcatgatgaaggagcttataaagaaggaaccgatcacgccgtttaccgaccgtgcgggcgagctttacaaaacgcagggagtatcgacgatccttgttatcggcggaagcggagaatatctttacgttgccgataaagtttacatgatggacgattatctgatacacgatgtgacggaggaatcaaaaagaatctgccgcgatcaccgaataacgcaggatcagcctcccgaagtggaatggactcagcagagaaaactttattccgatcatttttcctcttatcccgaggggagcggaagcgagaagcttgaagtatccgacatgggtattatcacgatcggggatgagaagatcgacgttcgcggactgcacgacatcataacgtcagcgcagcttgatgcgctcggatttatgctgaggtatctggaaatatcaaataaaaatcacgaggttgatcttcccggcgagatcgataagctgtatcggaagatcatggatacgggtatggacagcgaagggcttgatacagtttggtcgtcttatttcacgaactgcgaacgctttctcgatcttccgcgcaagcaggagctgtttgcagtgataaaccgtatgcgaaaagtcatgatcgtaaaagacatgcataaaaattcatgattcatcctgaatattcattttgccgaaacagcgcccgcctttgtccgatgcgcggtcgccgctttgctgcttcgaagggcaaatattgccgaaagtcacctaaatatacaggctgcgttaaaaaaataggcttttattcgcaaaatttcatgtaatatgacaacggcggaaacgaaaaaatctgttgacaatccgtctttgaaagtgtattattattgtatcttaattcatggaggatgtagatgatgaagaaaatactttcacttgcaacggcggctctgcttcttgccggatccctcatatcctgcggcggcaaaacaggcggttcttccgacaccatcaagatcggcggagtgggtcctacgaccggcggtgctgcctcctacggaacatccgtaaagaacggcgcgtctcttgcggttaaggagataaacgacgccggcggcgtgaacggactgaagcttgagctttccttcgaggacgacgaaaacgatcccgagaaggctgtcaacgcgtacaataaactgaaggacagcggaatgcagattctcatgggaactgttacctccaccccctgcaaggcggtcaaggacaacgctcatgacgacaacatgtttctgctcactccttcgggttcagccgttgagtgcacgaaatacgacaacgcattccgtatctgcttcaacgatcccgatcagggaaccgcatccgcacgttatataaaggaaaattctcttgcgaccaaggtcgctgccgtttacgacagctccgacgtatactcgagcggtatttacgagaagtttgcggcagagtgcaaggctgagggcatcgaggtcgtcgagagccaggcgttcacttcagataacaagtccgacttctcggttgcgcttcagaagataaaggacagcggcgcagagcttgtattccttcctatttattatcaggaggctgcgcttatacttaagcaggcagacaccgcaggtcttgatgtcaagttcttcggatgcgacggactcgacggagttatctcccagctcaaggacgacgctgctcttgcaaacggcgtaatgcttcttactccttttgccgcagatgcaaaggacgacaagaccgtcaagttcaccgcggcatacaaggctgcttacaacgacgagactcccgatcagtttgcggctgacggatacgacgctgtatacaccatcaaggctgcgcttgaaaaggcaaatgtaaccgatgcgaatatctccgcatccgacctctgcaacaagctcaaggctgtcatgaccgaaatcaccgttgacggagttaccggaagcatgacatggaacgcagaaggcgagcccaccaaggagccgaaggcaatgtacattcaggacggcgcctacaaggcgatggactaagccgacatagccggacgtgatctgaaatgaataaatccccggcatttccttcgtaaattgatataatccccatagagtagacacttgaaaaaacaaaaagttttcaaggctacactatggggattatatctatgcttcgggattttagatataactttattctccggctttttcttcagcgttttcgagctgtgcgatcgcttcctcgagaagtcccgcgcgcttaatcttctttgaagtgtttttcgggaattcttcgctgcgcacgaggaatttcttgatccgcttgtactgctgaaccatggagtttgcctgcttgacagcctcggtgagcttttctcggacaagctcttcggaatatccgtcgggattttcctcatcgagcctctccctgtcgggcaggatcatcgcaacgatatcgtaatcgcgtccggtctcgtccggtacgccgaccacgacgctctcgagcacatacggattgcgcgaaagatacgtttcaagctcctcggggaagatgttctttccgttggcggtgacgatgacgttctttctgcgtcccgtgatgtggaggaagccgtccttgtcgatgaatccgagatcgccggtgtagagccatccgtctacgatgacctcggcggtgagctcgggcgctttgtagtatccgagcatgatattttcacccttgaagcggatgtccccggtgccgtcctcggcggcatcgacgatttcaagagttgcgttcggtgtggcaagtccggcggagctgtcgcagtagaacttgtcgcggttgacggctgcgagcggcgcgcactcggtaagaccgtatccctgaaccgcaagaataccgaaatcgcgcagtcccttcagtatgtcgggatcgaccgcggcaccgccggcgatcatcattctgagcttgccgccgaaggtctcatgaatctcggagaaaagcttctttctgaggtcgataccgatcttgcgggatgcattggaggcagcgagagccttcttcaccatcttctccatgccgttcttgcggatgtttgcccatatcttgtggtacatggtctcaatgagaagcggcacgcagaggatcatcgtcgggtgaacctctttcatgttcttcatgatgtagcgcagtccctcgcagtaagcgatcgtcgaaccgcggtagatctggcagaggaagccgcaggtgcattcgtatgcgtggtggagcggaagaaccgaaaggaaggtgtcttcgggtccgatatagatcatctggcacatttcggtgaggttgaaggtgatgttgtgatgcgaaagcataacgcccttcgacacgcccgtcgtacccgatgtgaatatgagcgatgccatttcgttcttgtctatctcgaggtcgagatatgtgcggtctcccgcgtttatcttttcgcgtccggctacacaaagcccggcaagctcgtcaaagcatatgaagtcgagaggcttctcgatcttctttatcttgtcctcatattttgcggagtatataaccgcatccgcttcggatacgttcgcaatgtttgcgatctcctccggcgggatttccttgtctaccgggataacaacgccgagaccgcagataacggtcatgtaggcgagtgcccatgcgtagcagttttcgcccgtgacgataacgcgcttgccgaggagtcctctcgcgcaaagctcggtgccgagtccttcaacatcgaggagatactgattgaaggtgatcccttcgtaaactccgtcccgcttttcgagaaatgcgttcttctcgggccacgttgcggcgcttgtgtagagcatctccttcagattctcaatggggcgcacttcgtaattcttatactttttcataacgaacaacctttcctgcaatattcgcaccgcattacgggatcttgtccgtttccgtcgtgcggcaatgtttattaaatacaatcacgttcacagtttagcacagtttgcataaaaatgcaataacaaatagaaaatccgggcgattttctacatatagtatattcggcgcgctttatatatttacccgaatacgcgtaaaacaagcatgagcaccgcatattgcaggattattattaccggaattccgatcatgaatttcggttttttcgttttgtgcctgataagcagcatcacggtgagcattgcggcgcttccgccgagcgcggaaagaaggagaagcgtcttttcgggcacacgccgccgtccctttattttggaattgtgcttgtcggcaatgcacacgacggcggatataagcgagatcaccgcaatgtacgatatcagaatataacgcagggtctcgttcatgtcattcgccgtactttccggattcgctctgcgccattgcgtcgcaccgctcgttgtacggatgaccggcgtgacccttcacccacacgaacgtgacatcgtgaagggcgaggaggctcatgagcttttcccaaagatcgggattcaaaacggctttgccgtccgatttcttccaccccttctttttccacgaataaacccagcccttcgtgatcgcatcggtaaggtatttcgaatccgatgtcagagtcacgcggcacggctccttaagcgcggaaagcgcctctatcgctgcggtaagctccattctgttgtttgtagttgcggcttcaccgccgcatatctccatctcgcgcccgccgtagacgagtaccgcaccccatccgccgggtccgggattccgtcggcatgagccgtcagtatatatttcaacctgtttcataaagttccccgttccgccgcacgtcaggcggcagcatctccgattttctggcgattccgagcgtaaagcagcgttttttgcctttcggcagaggaaaagctatattttgcaagcgccgaatgataaaagacatacgactaaaatgataaaaatccgtgctttccgaaccgccgttttattctatcacattgtcggagcgttttcaagggctcacgtcattttgatttgcggcatatactttattgaagccgacgggctttgaaaagaaaatccggaacgcgctcgggcgtttcggacgcggttcggcgaggcggcgcgaaagactgcgcaagcctttgggagccgccggaaagataaagaaaggtttgatcttaaatggattacagaaacgattgcagaactccgcgcgaccggatagacggcgatatgcgccgccgtatgacgtgcgggtgcacggcaggcggacgttcggacggtatgtcgggaaatacggtaaggcgtacacagaacgcaagggataacggagggtgcaatatgccgtcgctggcgatggtatattcgccctatcaggaatttaccgatctctacgaggtttcggaggcacttgacgcgggaacgatattccgtcagctcgatctgcgcttctacggagaaaaatgctgcaggggaggcggaaacagatgagaggaagaaaaaatgacgctcttcgcacggtgtcgatgtatgggctcgcaatgtacgatgcgctcctgtatctcgacgcttacccgtataacgaggaggcgaagaaatatttcgcggagatgacggagaacgaaagatgcgccgtcgccgaatacgagaaaaactacggtccgatcactgcttcggcaagtgtggaaaatgaaggatggcagtggtcggagggatcgtggccgtggcagaactgtgaaggagggatgtaattatgtggtcgtatgtaaaaaggcttgaataccccgtaaatataaaaaatccgaatcctgctgcggcaaaagtgatcctcgatgccctcggcggtcccgacggtgagctcggtgcggcaaaccgctacctgagccagcgctttacgatgccgtacaatgaggtcgtcggaattttgaccgacatcggtagagaagcctctgaaatgttccattcagaggctacggctttttttgatgctt

SEQ ID NO: 3904 - DNA, 20218 bp, Unknown
  16S sequences of unknown bacteria
ctgccagggggatctggagatcgactgtcatcacaccatcgaagatatcggtatcgtcatgggagaagcgatcgcgaaagccctgggtgaaaaaacgggcattgcaagatacggacactttctgctgccgatggatgaagctctgattctgtgcgccgtcgatctgggaggccgcccttatctgatcttcgatgcggatttccgcagtcctgcctgcggcgatatggatacacagatggtccgggaattcttttatgccgtcagttattccgcacggatgaatattcacatcaaagagctgtacggttctaacgaccatcatgtgatggaagcgatctttaaggcttttgcccgttctctgcggactgcctgtgaaaaagatctcagaatgacggggatcccgtctacgaaaggcgtactctaaagacagtaaaatcgttcggtaaaaaccggagagtggatctctccggtttttctgtgagaattggaaactgtttttcttttcggcgggaaaataagccgtataaggacaaagatcctgcacataaagtgaaattaggtcatgtgttatgacgtaattataaggaaagaaaacagcagatctcattctgcagatattttaaggaggacacagaattatgtcgtttaatccgtttctcgaacgatcgattgcgccggaccggctgtttatgaactgggataaaatgcagccgcggccttatgacaaggaggacgtagatccctataccagatgccgcgtgattctgatgaatggtgcggaatttgaggcccagtggttttcgcggaatttttcgcgtcactgtcctgacaatgagctacggcgcgagctggcgctgtccagacgttccgaacagcagcagcagaaacggatcagcgctcttaaaccgaaagaggaatcgattctcgaacacaccatcggctatgaacagttagcggtggatctcacctgcgctctggccagacaggaaaccgactgcaatgtgatcaacgccctgcatctggcgcttctggaggatttcgaccacctttaccgctactccaatctgctgaatctggaatacggtgtctatccggaaaaaatcaccggaggctacacggaaatcacacccggccgccctaccatcagcgaacaccggtttccgacggacagcatctgtcattacgcggataaccgcagcgcggatctgaagacaaaactgaatatcggcattatcactgccgcagagcagcagacgatgaattattacatgaataccgcgaacctctatccgggccgtgaggaaggacggagaatgtatcaggaaatcgccatgatcgaagagcagcatgtaagccaatatgaaagtctcgccgatccccgggccacctggctggaaaatcttcttctccacgaatacacggagtgttatctttattactcctgtatgcttaccgagaccgatgaatacatccggcggatctgggaggaatctctcgcacaggaactcgcacatctccagaaagccaatgaattgctgcagcggtacgaacagaaagactatcagcaggtcgtcggagagggaacgttccctgagattctcagtctgggaccgaatgtggaatatgtgcgccgggtactgaatacgactgtgggaaatacacagaaaatggaacacgtggtacccctgaacgctctttcacatgacgatccattcttcctctatcagtacgcggtcaatacgccggaagaaatagtggccactcacgacatcattcagcagcgcattcactgcgagggctcggactaccggtatgaaactgcggaaaatccggtggaggaacttcgcgaccgtaactgcgacaatacttctctgggacgcattcctgacgagacgcctgcgcagtacagtgtctgcggcacgacgcaggataactgccgctgtgatttcacggaagacggctgcgtctgattcgcttccggacacagtccagagaaaaatgttctgaaataaagaattgataaaataaaaagaaaagaccggatctgccgcagtatccggtcttttcttttcgcttctgttcgtttttctttctttgtccaagtaggtttccgcactgcggaaaaaacgctatctggtgccgaaaatccggtctccggcatcacccagccccgggcagatatatgcgttttcattgaggcagcgatccacctgacctacgtaaatctgaacgtccggatgtgcttctgtaaatcgccgcagtccttcaggcgctgcgataatggccatgaatttgatattgactccgccctttttcttgatcaggctgacagcatccgcagcggagcctccggtggccagcatcggatccacgacgacgacgatccgctccccgatattttcaggaagtttgcagtaatattcgtgcggttcatgggtctcttcatcgcggtacataccgatgtgtcccacttttgcggaaggcaccagcgccagcattccgctgaccattcccagacccgctctcagaattggaatgatcgccatcttttttccggaaatcatcggcgcggtacacgtctcgatcggagtttcgatctccacatcttctgtggggagatctctcagagcttcatagcccatgagcattgcgatctcttctacgatcgcacggaattcatttgtgcccgtggccttgttccggagaatggaaatcttgtgtttcagaagaggatgctctaaaatagtgacgtttttcatggatttgaaatgatcgtttgctgccatacttcttctcctgtcttgttatctggtgttggtctgatatcttttgaaatcgagccgagtttctcaaaaacactgaaatcgaacgctctctgaaaaattttttcgtcttccgattatttcaggaagccgttgacgatctgttcttccgcctcttcttctgacagtccgagagtcatcagtttaatgatctgttcgccggcgatttttccgatggctgcttcgtgaatcagtgcggcgtcgatgtcgtttgcctccaattgcggaatcgccaggatcttagcattatccataatgatagcgtcgcattcggtatggccggtgcagggtgcatttccgcagatacgagaatcaaatttctgataagaggagtccttcgctaccgatcttgagatgacgtctgcactggatccttcgccgtttaatttcacctcatagaaactgacggcgctctggctgccgtgagtcatcagacgttcccggaccacgagagaggctcctgccgccagttccgcttccgttctccggtcggtggaatctactcccttgatctgtaccatctccatttccatgaagctgttctcttccataaatacttcggtcaccggattgagaattcgctttccttccccctcgccggaaccgtagtgcttttccacatacctgactttcgcgttctttcctacgaaaaaccggtgaacaccgtcgtgttccgaatcctgtgtaccgcagttgtcgatgccgcagcccgcgacgatcagcacatcgcagtcatcacccacgtgaaaatcattgtagaccgtctctttgattccactcttgctcagcactaccggaatatgaatactttcgttttttgtgcccggtctgatgaaaatatcgatgccgctgacgtcctccttcgacacgatatccacgtttgctgtggtgtttctctgcgccatttcgccgttggcgcggatattgtacgcgccttccggcaccccgtgaaggtcagcgatttcctcaagcaattttaactgtacgtcatttaacatctctttgtacctccctgacagaatgcgccgcagatatccgcagcggaagccgtacccaaaagtcccggaagaatctcctctcttcttccgtgctgcgcgatctgtccttctgaaatgacgatgatttcatcggcgatattcatgatgcgctcctgatgagagatgacgagaatcgaaccgtcccgatttttctcctgcatgcgctcaaagacctgaatcagattctggaaactccagagatcgatgcccgcttccggttcgtcgaaaatggaaagctttgtccctctcgccagcactgtggcgatttcgatccgcttcagctcgccgccggacagactgctgttgacttctctgctgatatattcattggcgcacagtcctacctcggagagatattcgcaggcatcggaaatggcgattcttctgcccgccgccatacgcagcagatccagcacctgaattcccttgaagcggacgggctgctgaaatgcgaaactgatgcccagccttgcccgttttgcgatatccagatctgtgatatccgttccgtcaaagaagatctttccggaagtgggcttttctatgccggcgatcaattttgcgagagttgatttgccgccgccgttggggccggttatgacgataaacttgctgtcgccgataaccgcgctgacatctcggataatttcttttctgttattttcttctgtcacttcaaatgacacattttttaattcaagcatattcttacctcagcttttatttcattttacctctataagtatcgtaaccattatacaggaatcacactcaggattcagcctgtttccgtccattatgtccgttcagaccgctgtaaagccccagcagttccgcctgataaagcgataagataaataaagcgtcgcacgcatcttctccgttttcctcgaaagactgcggctcttgcgaaaggccggaattatcctccgcctgtaacggcgaaggatatcaagtactatgttatactatcactgtttttcgggagaatcaagaaagccgctgtgacggaacagagaaaaggaaattttcggcatctttcttcctgctctgaaaacgtctttccgaggtccgcgaaacgagacgaagttgaaagagacacgttctgatagtaaaataaaatagttttgtactgtaaggaacttttataataaggaaaaaaagggacgaagattataaaagaggaaaaagaaaaacagtttcgaaaagattctgaacttgaattgtcgaaagagagaaaagaagtgagagacggccggatcggtttgtcaaaagatgcggaaaataagcgcagactgtcaaaagcggaagaaaagcgaaggactgtctttgaaatgaaaaagaaagagtttctgtcgcagggatggcataccgcagatcttacggtaggcatggtttatgcgaatgtcatggcgattctgctcggactgccgatcattctctttctgctcatcctttatctgctccgcctgttttacggaccggaatccgccgctgcgagctggcgcggcgccgattttgtcttgatcttcctgttctgtctgctgctgatttttgttcatgaactgattcacggcattacctgggctgtttttgcaaaaaagggccggaaggcgatttctttcggttttatcccacagtatctcaccccgtactgcacctgtaacgagcctcttaaaaaaggggagtatatcaccggcgctctgatgcccgcgctgttgctgggctttctgcctgccgccggggctatcgtcacggggtcagccgtcctgttctgtatcagcgctgtcatgatcttcgccggaggcggagatctgaccattgtcctgaaactgctgcgatacaaaaccgaatcttcagaggcgctctacctcgatcatccttaccaggcgggtctcgtagttttcctgaggccgtaaccacctgaaaaagaggaaagacatctttcacgcttctctgcgcagatcctttccttttttttgtttacatttataaaaaatttctataaataaattcaactgtcagctcaaaaccggattttcgttttcgccggacatccagcctttgcatacgtccacccagccttttgcccgggcgtaccgttccagctccggtatcgtcagacgtacggtagccgtatcttttcctgccgccgtatagataacggaaaaccgcctgagagatatgtccagatagacttccaccccttccttgacagcaaaaggacagacgccgccgggagcgtgtccgatcagtatctccacctgctctgctggaatcatcacaggtttctgatgaaaataggatttgaatttagaactgtttatcctggaatcgccggcggcgacgatgacgatcggctttccgccggcagaaaacgacagcgattttgcgatttccgccggagaacagccgacggtccgggctgcatgttccaccgtatccgcagtgctgtcgtgttctgtgatatgatcggcgataccttcccgttcaaaataggctctgacattttggtaagacattttgaaattctccttttttctccggtattcttttctgcaatactcgtctgctttaaatttgattttactatacaacgccaagccggaagatgtaaaacgataaatcgtccgcggttttgcccggcggcaatatgcagtaaaaccacgggcaaaaggcagaaaaagagcggcgccattgaaaacggcgtcgctctttttcttcgctcattatatttcattcagcttttcattcatcctgcgctgccggaatcatcattttcactttcccttaaatgcggtgaaaaacagcctgtgccgccattttttccttccgccgtatcggatagatcagacggaaatctttctattccgtcgtaaaattatcgaaatatccctgaatgagaataatcggcgtacctttgtctccggaaccggaagtcagatcgcataaagaaccgataagatcggtaagctgtctcggcgtcgttccctgagacgccatttttcccaccagattgtcttctttggaacgaatgctctctgcgatagcctctttcagttctgcaccgctgaggtttgcaaagtcgttgtccgccaggtatttgagcttcagctcgttgggcgtgcccacgagtccgtctgtaaaccccggtgatacgacaggatccgccagctcccagatctttccctgaggatccttaaacgcaccgtcgccgtataccatgacttccacatgttttcccgtcttttccaggatggaatcctgaatctcacgaaccagaccattgcatttttccgggaacagcttgattttatcttccgtggatttgttggaaccgagtaagccgtatttggaattatatccgcttccgttgaccggagcgttgagaatatcatccagaccgcacacgatcttggctccagccttctttaagagacgcttagtgcgcgctctcgtatgaatatcacaggtgagaatacagtccgtatagtccagaatcgtcttggcttggttggcaaagacgatttccacctctgcgccggcttctctgatgatgtcggagtaatatgccacataatcgatgcctgtaaattcgtgctttacttcgccgaataatttacggtattcttccagtgtcagaacatcggaatacgggttgattcccgcctcatccacctgatcgtaggtgagaagagcgtttccgacctcgtcgctcggatagctgagcatcagtacgactttcttacagcccatagcgatgcctctgagattgatcgcaaaacgatttctcgaaaggatcgggaaaatgacgcccaccgtttctccgcccagctttgttcttacatcagaagcgatatcctcgacagaagcgtaatttccctgagcgcgggctacgatggattccgtaagagcgataacatcgcggtctctgagttcaaacccttcgctttccgcagcccccaacacgctgtctactgtaatttctacgagattgtctccctcgcggataatgggaccgcgaatacctctggagacggtgccgactcttctttccatgtttttatacctcatttatgtttattttttttctgcctgtaataaccacacattattatacatggatgaagcttcgttctcaagcattcttttgcagcctctgtttactccgacatcctcagcatgttgctgatgaatatcccgtaacctcttcgcggatcgttgacaaagacatgagtgactgctccgatgattttcccgttctgaaggatcggacttccgctcattccctgaatgatacccccgcttttttcaatgagatccttgtctgtgacccggattaccatattttttacagaatccggatcgtttttgttgattttttcgatttttatcttaaatttttccacgtgatctttttctaaagtggtcagtatccaagcatccccttttttcacttcgtcgggatccgctgtatgtaccggagtggcgtattcttccgacgaaagatcggtgtatgcctttccgaaaatgccgtattccgtatttttggacaattcgcccagcggcttatccgcttcataaaagattcctttgatttcgccgggctgaccttttctgccctctttcagcgacatcacctgcgcatccagaagctgaccttccgcaaccttcagaacgcttcccgtctccgcgtcggtgataccgtgacccagtgcgccgaacgttccgtcataaggacggtaataggtcagcgtaccgatgcccgcggtcttttcctttacccagacgccgagacgatatttaccgtcttccgccgattttaccggttccacatccagatagcggatttcgttttttcttgcgattttcaggcggacgctctctttttctgtattttccacgatcgccatcacgtcggaagcgctgtgaacttcacttccgtcgatcgccagtatgatatccccgatctgaagacctgctttaaggccgggattggtctcctccccgtcagcggttttgatctcttccagacccacgaccaggacatcttccacatccatcttgacgccgatggatcttcctccggggatcaccagatcgggacttatcgtcccgtcagatgctgtctcataattaccgctgccagccgccacacttttggaaaaaggcagaccggaagcgaacattcgaaataccgccattcccaccagcacggcgagaatggcgaaaaaaatcagtcggatcaatgtgacagatatcctgtccatgcggtttcatcacccctcaaaatcctgaagcagctctgacagttcggagtcgtcgtttagtgcaatccctttctcaaagagtttctgatctgtttccgtcagcatagacaaatcgatggtagtcttttccctcgaggttacgctaccatttttatcataccggagaactgagatgctgccttcggtatcggcgatgacgagaattttgccggcatattttttatcgctgtcatttcctgcggacgaaggattttccttctcctgtccgccggtcgtactcttttcgccgtcctcgtatctgccgtttccgtttaagctgccgctgctgtaatcgctgccgacgtcatccggaaaatcatcggaatccgagtcatatctgctgtcatctgccgtctctgatcctgcgccgttctgcccgtccgcctgagcggatgaatccggatcggacgaagtatccgacagaccggcaagatctgatatatcttcttcatattggtctgaaccggccggtatactctcttctccggtattgtccttcaatccggcattcagccaaagacccacacccagagcgaggatgacaggaaccgcgatccaaatttttgatttctttttcttttgtgcaaacatgatatcacctgcattcttaatgaattctcttcgctgagcccggaacgaacgctgccggacttttttgcgcgtcttctatcatgcagtcttgtcatctttgcggccttttattcacaccactttcaatatatgcggaagctttgactttggtgatatttttatacgcaaatttttgaaataaatttctccaaggttttgtctccgatgccgctgacatccgtcaaatcctctaccgattgaaagctgccgttggcctgacggtactcgataatgcgctgcgccatagacgggccgattccgctcaaagtctgcagttcttcagatgtagcggtattgatattcaccttcgtttctcctccgccttctgaactctgtgacgaaatcgctgacggatctgcggaaaataaaccgctgctctgaacgccgctgcccgctgcgtcttcgacttctgaaaccgtagggatatagagtttctgcccgtcgctgcattccgatgccatattgagatatttcgtctctgcttccgatgtggttcctccgacggcttcgatgacttcaaatacacgggaaccttccgcgacacttaccacgcctggatgaaccacagccccgcctacatccacatagatcaccgtttccttttccggttctgtattcgccccatcctctcctctttctgccgtttctccttctttacgctctgtcgagacctcctcctgagaatcttctccgagagacacgctgatgtcctgttccgaggaacgcgaagccgtgccgtagaccgctgcggcggcaagcaataccgcgatgagcagaatttttctgaattttctccgttttctttcctcttccatatatttccaatcctcccgtgtaaagaataaatcattttacaaaaaatgtcaatccttcctgttcaaaaaagaaaagagtccgcggcagatttctccgcggcggactcttttgtaaacagatgcctgctttttgcacactgactcagatcatcgaaaactgcttccggttcagaggaatgtcagggaaatcgatctattcgacaacggataccgcatcgccttttacgatttttcccggtgtgacgacacggcagaaaagcccttcctttggcagcagtgaggtgccgaaagtcttcgttacgatgctcggatggtcgggtttgccgatctgagaaacttcgatgaccgcttcctcgcccagacgaatttttgtacctgccttcaccggagcgaaatccagcccttcgatgagaatattttccgccatatctcccggccccatttgcagaccgtgtttcgcattggaagctgcgagactctcgtaacgaagacaagtgatctgacggctccagtctcctgcgtggccgtcgccttccagtccctgaggggtaactatgcattcttccacttctcttttcagcgttcctctctcttcgctgacagaaatcgcgtaaatcttaccgttttccattatcacaaacctcctgatagatttttttttacaatcggacagaaccggtccgagcatatcattttttattataacagataaaatgtccgcggaaaaacattttgacaaaatcaacagaaatacggatatgagcgagagaaattgaaggacgcagcgacaaattgccgaagtatacacattgtttttttgtaatatcatgaaatattccactccgtaaatccgatgataattttacgttttcacaaaattatgttaagatgctgagcgtcgctgtagtaaattttccggaaaccaaaagctgaaatttatgttacagcagcgatgcggtcaaagagaaaaagaaaaggagaacttttcatgttggaatttatcacacaaatcaacgctgctgtcaataattttgtctggggcgttcccgccatgatctgcatcatcggcgtagggctttatctgagcgtccgcaccggatttcttcagttccgaaaattcggctacagcataaagatgacccttggcaggctgtttcacaaaaaagaagccgcagagggatcgatcactccctttcaggcggtctgcaccgcgctggcggcgacggtaggcacgggaaatatcgcaggagtggccggagcgatcgcgatcggcggtcccggcgcggtcttctggatgtggatctccgccctgcttggaatgtgtacgaagttctcagaagtcactctcgccgtccattaccgcgagaaaaatgctcacggcgactgggtcggcggcccgatgtattacatcaaaaacggtctgggcaaaaaatggcagtggcttgcggtcatttacgctgtcctcggtgttctcaccgtattcggaacgggaaatgccacccaggtaaatacgatcacggccgctatcgattcggcgctgctgaactataatgtcatctctgaggacagtgtcttttctctgaatctcgtactcggtatcgtcatcatgtgcatcgtggctctcgtcctcctgggaggtatcaaacggatcggaaaagtgacggaaaagcttgtgccgtttatggcgctgctgtatattcttctggctctgggcgtcatcgttatccatatcgacagcgtaccggaagtcttccgctccatcgtagaaggcgctttttctccggcctccgtcacgggcggcgtcgtaggaagtttcttcctcagtatgaaaaaaggcgtagcccgcggtatcttctcgaatgaggccggcctgggtacgggttccatcgcgcacgcttcctctgatgtgaaggatccggttcagcagggactcttcggaatcttcgaagtatttatcgataccatcgtggtatgcaccatgacggctctcgtcattttatgcagcggcacggattttacttatggcgtggacgcgggtgcagaactgacgatcagcggatttaccgcagcttacggaaactgggtgtccatctttaccgccgtagcgctttgctgttttgccttttccacgatcatcggatggggtctctacggttcccgctgtatcgaatttattttcggaccgaaagtgatcagaccttttatgatcgtctacgcgctggtggccattctgggagctacgatggacctgggacttctctggagtatcgcggagacatttaacggtctcatgtccattccaaacctcatcgctctcttccttctatcaggcactgtagttaagctggtaaagagacatttcggaggcgagatccgcaagaggagataagagacagatattttgaaaaaatcagataaaagaatacagccgtcaggataatctccctgacggctgtatttgtatcaacagaacgcggcaccctcttccgcctctaacggcggaattcatcttcagttttcaaaaaaaccataatctgcctgtgaaaatccgaagaacagttactggaggcacatgccgcaccgtttccgcgactctgatcagaccggctttccagaatttgactccggcgcggaatccggctgtatatttttcaattggtgcatacctgaacgtgtctgtattccgcagaaggtacgaaaactgcggcggccatacagagcgtctgcaaaatgatgtcgcagtctctttcaggattcgacgcctgctttcgataatcgcggtgaaggcggttgagttcttccacaatgcccgctctcgaaccgatgaccggcacagcctgcgcagcggtatctttcagcttttccagaaatatcggctgcatttccagctcatatctcacatgatccgccagtgttccttcgtagtgactgttatgcggaaacgtaaaggcatccgccagataatggagcatccggccaaactgataataatcccagagattccaggtatgtttttcagacagatacctggcgttttttcggatgtaatggcaggcgcactcataattttgtccttttacccgggttcccctcccccagcctttcagatacgacgcataattataatccggctctacacagccgaagacaaaagcctttcggcacgctttcgtagcatcgtccatgtagcgttccgcaagataaattcccaataacttgtgacttctttttttcatccattcctcccgacgaaataaaaaccgacagatcgatatctgacgtctttgccccattggattccattataaaatataccgttaaaattctccttaaaagaacatcaacagtacataaagattgcgataaaattatgatttcccgcttcatacaaattattctgcagcgcgttttccgttgcagaatatttatcggaattttatttttcttttattctaccagagaaaatcaggctgtaaagcgaaacagcaaaaaaaataaaggaaatattattctttttttccaaatttatatcattttaaatccagacgactgctgaagatcccccaaaaggatgactaaaaaacaagttgaccgctgtaacatattttctatattctgtcttttttcggatattttcttgtctgtaatttacgggaaattacgttcgccatagtacggtatcctttttcagaaagcaaaacgcccgcagcaatgcgggcgggatttccgacagatgattatactttatatgcctcatagtgatctaaatcgattctctcaatgtaatccgacagttcgcatggcctcagcaagatgacgaaaacggttaaagaggtttccgcccctctactttcggagtgacgagaaacagcgacggagccgtctttttctgattaatcatgtggacatatgctacatgatactttttagacggaagtgtcttcaaaaattcgtaaatcgcagcacactccgcctctccttccttatggccgctgtaggccatgacagaaacgatgcctccggtcttcaccagattgatcgctttttttatcgcgggcagcgaggtatcttctgtcgtcataatcgtcttgtcgcgtcccggcataaatccgagattaaagacgaaagcggaaatttctccgggaacctcggccagataacggtcgatctctgtatgagaatcgcagatcagacgaatgtttgtccgctcaggatcagcgatgccgtgttccgacagataaattctcgtagcatcgagagcttcctgctgaatatcaaaggcatacactgcgccccggccgtctgcgcatccgaccgcttccgccagggaaagggtatcgtatccgtttcccatggtacagtccaccaccgtatcccccggcgaaatatattcactgacgatatgcatcgttagcgatgtcgtcttgacgatgagatttgtcttttcgctcttgatttccataattttacaatcatccttaactttaacttcacaactgttctctaccacaaacgatttgtcatactataatcttctcagatattcgagctcgtgaaccgtcatcttgcgatacattccctctctgagatgggccattttcagatcacctattgcggtacgctgcagtttcagcactttatgccctaccgcctcaaacatttttctcacctgccggtttttaccttctgaaatacggatctgcaccacagtggtatcggctccctgacgcaggatctccacctctgcgggcttcgtcacgtagccgccgatatcgacgcccttctgaagccttgcggcgtctttgcggagaaacaggccggaaacctcagctaaatatgttttaaatatatttttatgcggactggtcagcttgtgagccagatctccgtcattggtcatgatcagcatgccggacgtattgaaatccaacctccctacgggataaattctctcgctgatatccggcatcagatcgagtaccgtcggccgtccctgttcgtcctccgaggtagtgatgtatcccgccggtttattcagaatataatagacaagccttttttccggggtgatcgtccgacctgcgacagagaccacatccccctctgttacatcgtatccgcactcagcctgcagaccgttgaccgtcacctctccctgctgaatcagctcgtcagcctttcgtctggaacagaccccgctgtgtgcgatatatttattgagacgcataattttcctttctgtgccaatccgcaaatcttctccaaaactcgactttatcgtaattccgtaattttccgtccgattttctctttgcggagtctgtccgaaaatccggcggaatctctgtataaaaacagtgaaaaaaagaccggccctttctttcagaatcgccgcaaatgccgcagctgcggcgattcccgctcttcgtctgaatcattttatcataaaagagaacagaaaagaagaaaaatgtcgccgaatatgttcaaaatgacaatttaacggcctaacaacttttcattatagatatttctcaatccgtatttttccagacgtttttgaaccgtctctttatctgttgtataaagaccgcggttcttcattctctcgaaaaattccgctcctgcgaaagtatagcgtgttttcagtccgtcttccttttcactttgtgcatttgcataagaaatcagatctccgactgccagcccgtcgggaagttccagcagaggaatccctttcagatagcgacatgcgttgtagccggcgaggcttcccgtggtgatcgcctccgtatgccctacgaaaagtccggacttttcacctccgcagaacatattctccgcaccctgaaccatcattccatcggtacgccgcgctacagagagatagcggatggaattgccttttccgccggcataaggatccgcataacgggcattttcaaacccttcaatctctctcagctgtgacagaggcataaacggtgtcatgagtttggcataacccgtatccaaaagtacgatattttccgcgaattctttcagcgcgtattgctggcagaccttcaggctgagcttttcttcgtgtatctgttcttttttcagtccgacgatcacaacaccctttctgtccagttcgtcgcgaatttccttagaaagagagtgtttctccagtttgcacgaaccgctgaacgctccgaacgctccgtcttctctctgtcccatcacatctgtgagaccgattttgttcgttatgctgacccgcggaccgaaagcggggcagcggagaatacacatcaaacacccgatgatatccgtaaaatcagcgtagccgccgtgtcggctgtcagaattgccgccagtccccagctcactgctctgagcgctccgcgcggaatccgggccgtcagcctctcaaagaaaggctgaaaaagatagagaatgatcataccgcccgcgccgaaacgaagactcgggttcagcgcgattctgccctgaaaatcgaaggagaatctccggtaatcccacatccagccgccggtcagccattccatgagataactgccgatcaattccgtcactgtagttacggcgacaattccgaggaacacgagaaacggcgtaatgagaatttttccggcataaatccgctttttcttcagtcccgtcagtgtaaaaagcagaagcagcgctccaaatccgtagatgatacagtaaggtccaaacaagattccccggttggaaaagccccaccggtaaacgaccacctccaaaaagacttcatacagccatccgaagaccgaatacatcataaaatacaaaaaataccgctgcagtttctccgttttcttcatcatttccttgtcctgttcctgcgttcttcctaccttcagcatttctatcttgtctgtcagaatccatgatttcctgacccgtaaacatattaacagacgaaagcctgtttgtcttcccctttgccgaccgatttggcactctttaagtttcagtcagcagcatttcttccatcagaagattcctgcgttcttcttccgacagcttttcccacattttcagaattatttcgttcagcggtctttgctgctcttttgtcatttttgccggcgatctcatggatgccacgtcgccggtacgaaagaccgtcacgtaaccgtcaccggaaaacccccgaattttcagctcttccgggattttctgcaccggtccttgccagatgatttgattattcaaacagatcacctcccttttcattttatgatttttgcacttcgtcctattacagcaaatttcgccatcattctgtgatatactgaatcaggaaaaaagcaaacaaaaacaccaaaagagagatctgtttcggcagatattctgaacatacagctatggagagaatacgatgaaatttaagacaaaaattcagattctgctggcttttgccgcagcagcagtcggctttgccgcaggccgaacctccgcttctctgcggatctgtcccgcttcctgtcctgtaaaaactccgcaggatgcggtttcgccgcgggaatcctcagcatccggggaaccggcggaagagaaaatttccgctcagacttcccgccccgaaccgcccgacaggagttccgagattccggcatctgcggaaatcgaaaagccttctccgaaatatatcggaaaccgtctgagcaaagtctttcacgatgcttcctgccgatactgttccggcgcatccggcaaataccggatggaattcgattcggaaaatgacgccagatcccagggatacaaaccctgcagaagatgtctgccggaagagaaaaaagaagagacggatgcttcataaagaaaaacttgctgcattatgacgcggacgccggcattgtgtcggaattattcccactgttaggatcagatcgacttgatgcagcgttgctccgatttaaacccggaaagtatgactttccgggtattttactgtctgtaaaacaatagaataggtcgaaggatggaaattcaactccaaaaaagaagtcattcccgtgaagaagatgaaatttcgggaggtatacgatgaacacgtgcatttatctcaggaagtcgcgcaaaggcgacgaccccgacgagacggcggcagagacgctgcgcaggcacagagaacagctgctcgcactggcgcaggagcgaggtcttaacgtcgtagaaattaaagaagaaatcgtctccggcggcagtatcgcggcccgtccgcagatgcgggctcttctgtctgaagtagaagaaggccgctatgatgctgttttagtgatggatatcgatcggctgggcagaggcagtatgatcgatcagggaattatcggccagactttccgggagtcagagaccctggtaatcaccccggataagacttacgatctgtcggatgatctggacgaagattattatgatttttacgctttttttgccagaaaggaactgaagcagatcaaaaaacgtctgcagcgaggcaagatgaaatcctttcgagagggaaatttcgtctgggcccgtccgccttacggctatttaaaatccggccgaaacgagatatctcctgatccggagacggcggaagtggtgcgccggattttccgccggtatctggagggcttgagtatgggaaaaatcgccggacagctgaatgaggaaagaattctgaccgcgtccggatgccagtggtcccacaagacagtctccgccattctgagaaacagagaatatgtcggagacgtcgtctgcggcaagacgaagctaatccgcggaaaagcggtaaaacagcccccggaaaactggctgattctgcccggccggcacgaaggaatcatctctgaagaacaatttgagcgagtgcagcagaaattaacgacatgtccctcgcgcagcgtccgaaaagatttgaaactgaaaaatccgctgtccggcgttctgcgctgcggtgtctgcggcggcagtatgacgagaaaatccggcggcaggggaaaagaccgccttcgatgcgcccgctcttgtcctcagacctgttcttcggctctgaatgcggtggaaacgcggcttctcagcgaagccgccgcatgtatgcttccgcgaatgcgtcctgttccgcttccttcttcggataaagaaaaacaacattgcaaaacgtatcagctcgacgcagaatttctgacacgtcttctgcagcaggccgatccctccgatcgaaatgctttttacaaaagcttcctccatcaggtagactacttccggaaccgggacagcgacaaagattctttccttctccattttatattctgtctctgaaccgctccggtaatgatcctgcggatttcacagaagtaccgctgcggattgagtaaaaaatgaagccggagatatggaaacatctgcagcggaaaaatgcgggcatcaccgggcatccgatacatagagcacccgttgccgtaagtcaggcagttacccataggtccggtggaacctgtcgtttcgataaatacgtctccggagagctttgttccgtcaaaaagcgtaatactgctgatatactttccagaggc

SEQ ID NO: 3905 - DNA, 1756 bp, Unknown
  16S sequences of unknown bacteria
atcatggagacggccgaggcgcgcggcaaggagttgctcatccccgtcgacgtcgtctgcgcggacgtgttcgccgagggtgccaagaccaagacgacgagcgtcgaggacatccccgaggacatgatgggcctcgacatcggccccgagacctgcgagctgtaccgcagcgccatcatgggcgccaagaccgtgttctggaacggccccatgggcgtattcgagttcccgtcgtttgaaaacggcacgcgccgtgtggccgaggccgttgccgattcgcctgcgaaaagcatcatcggcggcggcgattccgtcgcggcggtcaagaaattcgacctcgccgaccaaatgtcgtttatctcgacgggcggcggcgcctccatgcgcctgctcgagggcaagccgctcccgggcgtcgaggcgctcatggacaaagacgaaccggccgctcaggactagtttttacaagaaagacgcgaggtaacgaagatgggtcttttcggcaagccgaaaggcggcgcgacggagacggcggcgccgcgtaagttcaagcgcaaaccggtcatggccggcaactggaagatgaacaagacgaccgcagaggcggtcacgctgtcccagaacatctcgtggggctcgaacaaggcggagtggaaagagctcgacgtcatcctgtgcccgccgttcgtcgacctgaagtccgtctacaacgtcatcgccttcgacaaggcgagcatggagctcggcgcgcaggacgttttctgggaagaggagggcgcgtataccggcgcgatttctccgcgcatgctttccgagatccactgcgcgtactgcatcgtcgggcattccgagcggcgcggctacttccacgagactgatgaggacgtgaacaagaaggtcaaggcgctcatcgcgcatggcatcaagccgatcgtgtgctgcggcgaaagcctcgaggtgcgcgaggcgaacggcacgctcgagcacatcacacgtcaggtcgaagcggcatttgccgacgtcgacccccaggatatcgctgagtccatcatcgcctacgagcccatctgggccatcggcaccgggcatgcggccacgcccgagcaggcgcaggaggtctgcgcgcatatccgctccgtgatcgcctctgtggcgggctcagacgtcgcggacaagatccgcatcctctacgggggttcgatgaagcccgaaaacgccgcgcagttcctgccgcttcccgatgtggacggcgggctcatcggcggcgctgcgctcgacgcgaagaagttctgcgagcttgtcgaccttgccctcaaacactgctgcgaaaagtatcgccggggcgtttgactgtttggtgcgcgctgcggctgttttggccgtacgtgacgcgaatctgtaaggagcacgaaagacatgaaacctgttctgcttgccatcatggacggcttcgggcttgcccccgacggcccgggcaacgcgatctcgttggcgaacaagcccttctacgacgacctgtgggccacgtgcccgcatacgacgctcggcgcctctgggcgcgacgtggggcttcccgacggccagatgggcaattccgaggtcgggcacctcaacatgggctccgggcgtgtcgtccaccaggagctcacgcgcatcaacgacgcgtgcgaggacggttcgatcgagaaaaacgaggtcctcatcgaggccatcgacaaggcagtggcctctgggaacgccgtgcatttcctcggct

SEQ ID NO: 3906 - DNA, 9286 bp, Unknown
  16S sequences of unknown bacteria
gaacttcagccttccaagctgactacgtgagttcgattctcatcacctgctccatttaagcacagctcatgatcattcatgagtttttttgtattccgcttacgatgatcgacgaacacgctcatgagcgggctgccaataagatgaaaaacaatagaaatggagagcacaacaacaatggagcacatccggatcgaaacagacaggctgatattgagaaaatttgaagaaagcgatatggaagcgatctattcgctgctttccgatgaagaggtcaacacgtttctgccatggtatcccgtcaaagacatggcggaagccaagagcttttttgaagaacggctgcgcgatcaaaagtatggttttgcgatctgcctgaaaagcgacgatcgcccgatcggccatgtgcacgttgaagcagaagatgacagtcacgatctgggatatgcgcttgacaaagcatactggcatcaaggcttggtcagcgaagcatgccttgcagtgatcgatctggtaaaggccgcagggatgccctatatcaccgcgacacatgacaaaaacaatccgaggagcagcgccgtcatgaaacggatcggaatgagctaccgctattcatacaaggagctgtggcagcccaagaacttccccgtgatctttcgcatgtatcagctgaacctcgatggagaacaagatcgcgtatatcgaaaatactgggatctctatgatgaacatttcgtggaaacagcgttctagatcccccgcctcgacacgccggtcccgctgcatgtcttaccaggattgcatgaatgccaaaagcaaagtcaattccaaagatgttttttagcactctgttgttgacagtgctaaaagaatgagtataatcataagtgtgatcggggaaatcccgatggaaggacattcatgaagacggctgcgagaaagacaaccgtaaggatgtgtaatggaggcgattgagatgaaattcttccctggaacaacaaacttatttgacgacatgctggatgatatgtttacttcaccgttctttagcaatcggagcgatatggtgatgaagacggatatcacagagaaagatgggtattataccctggatatggaactgcctggctgcaagaaggaagacatccatctggagctgaaggatggctatctgaacgtgagcgcggctcgcaatacgaagaaagaggagaaggacgcgaaaggcagcctggtgcgccaggagcgttacagcggcacgttctcgagaagcttctatgtgggagacaagctgagcgaagaggacatcaaggccggctatgaaaacggcgagctgaagatcaccttcccgaaggaagtcaagaagctgccggaaaagaagaccattacgatcgattgatcaggcgaaggcgcagggctcatcttgtgccttttcttttttgcttgatatcataacccgcaggttcaaacctcgtaacgaagcgagacttctgtttgtggccgggcaggatataataagatcagaatgagacaggaggcaatgaatatggaatatgtaacactgaataatggcgtgaagatgccgatggcaggaatcggaacattcttgctttcaccggacgaagcggaagcgtccgtattgagcgcattacaatgcggctatcgcctgatcgataccgcgaacgcgtatgtgaatgagaaagcggtaggacgggccatgaagagatccgggctgaagcgcgaggagatctttttggagacaaagctgtggccgagcttctatgaacaagatgatgcggtagataagacgctggcgcgcctggataccgactatatcgatctgctgttgatccatcagccggccggaaactatattgccggatatcgtcagatggaaaaggcatacaaggaaggaaaagtcagagcgatcggactgtccaacttcaatgaagcgcagatccgggagatcctggagatctgcgaagtgaagccgtctgtgctgcagactgaggtgcatccgtattcccaggaaaaagcgctgaagcagtttttggcgcaggaaggcatggtcatccaggcatggtatccgctgggtcatggcgataaggctttgatcaacgagccgctcttcaccgaactggcgcagaaatatggcaagagcaatgtgcagatcatcctgcgctggcacatccaggatggcaacatcgtcatcccgggatcgaagaacgctgagcatatccgcgataacttcgatctgtttgatttcagcctgagcgatgaagaaatggcaaagatcgcggccatggatcagaagaagcgctattacacgagcacgccggaaatgctggatcgttatgtccagatggttccgccggtggatgagcagaaatagggaggaagatgaagatgagaaaagatttcgggacaaagtcatggttttacccgctgccggtattgatcatcgctacgtatgatgagcagggcaaggcagatgcgatgaacgcagcctggggcggactgtatgacgcagacaaagtcgtgctgtgcctgagcgcagggcacaagacgaccaagaacatcatggcccgcaaggctttcaccgtaagctttgccgatgcggcgcatgtgatccctgcggattatgtgggcatggtcagcgccaacgatgagccggataagctggaaaaatccggtttccatgcggtcaagagcgataaggtcgacgcgccgctgatcgaagagcttcccgtcacgctggaatgcaccttgatgaaggtaaatgaagacggcaacatcatcggcaagatcgaaaatgtgagcatcgatgaagcggtcctggatgagaagggcgagatcgattttgcgaaattccgtccgatcgcttttgagccggcgcataatgggtatcatgtgctcaaggagcgcgtgggcaatgcgttcagcgacggaggcaggctgaaataaaggatgcaggacatgcatgcggcggggacagggatcgatgatttctgtcccctttctcattgcgtgcctgcaggcagagactgccgggaggatatggatgaaacgaatgatgatcgcggcgctgtgccttttgctgtgcggatgccagagcgtacaggaggatacactgcgcgtatcgcaaacagaagatgcaccggcacagctggtggcagagcaggtcctggaaggagagagcgggaccattcattacagttatcagctgccagagggctatcatgaaacaggcagctatccgatgatggtcgtcatgccgggttacgatatgatgtggtttggtgaagattcttccggggcgaatctggattggcaggggtttcgctgctggagcgatctggacgaagagatgatcgtcgtctcggcacagctgacggattggggcgagacctcggcacgtcaggccatcgagctgaccgagcatttcctggatgattttgccgtggatgcaaagcgagtctatgcggccggctattcggctggcggagagacgatgtccagagcggtgtccatgcgccccgatctgtatgcggcttatctgcatgccgcatcacagtgggacggggatcttgtttcggtcacagcgcatgatgtcggcgtctacatctacatcggatcaaatgacgaatactatggatcacagcaggcacaggatacgtatgacgcgctgtatgcggcgtatcaggcggatgggcgaagcgatgaacagatcgcctcgctgctgcagatccagatgcccgatgacgcatactttgcccagcagggagcaggcggctatgcgcggcagccaatgtcgtgtttgacgatgacgaggtgctgaattggatcatcgatcaccacaaatgagagccgatcagacacgttcacgtcggattcagaaaaaacgatggccgtggctgatgaattatgatatactgtttgcaatggcagagaaggaaagagtaccggtgcggaatgcatagagagcagatggttggtggaaatctgacaggaagcatccgggaacatggctccggagccgcttttccgaatcatgaggaaaggccgcggaaacggcgttaacgttcagaggtgcatgacatgcatgaaaaaaggtggtaccgcgaagctttcgccctttggcgcaagctttttttctttttcagctgaacgcgctctgcaagaggacaggaggaattttcatggacaaaaaaccgtactatatcaccacggcgatcgcgtacacgtccggcaagccgcacatcggcaatacttacgagatcgtgctgacggatgcgatcgcccgttaccgccgcgcacagggctatgatgtgttctttcagaccggcacggatgaacatgggcagaagatcgaagaaaaggcaaaggaaaagggcatttccccgaaagaattcgtcgacggcgtagccaataccgtcaaggaaacgttcgacatgatgaacaccagctatgactacttcatccgcaccacggatgaggggcatgagaagcaggtgcagaagatcttccgccggctgtatgagcagggggatatctacaagggaacgtatgaaggcatgtactgcacgccttgcgaatcgttctggaccgagagccagctggtcgacggctgctgcccggactgcggcagaccggtgaagaaagccaaggaagaagcgtacttcttccggatgcagaaatatgcggaccgtctgatgaagcatatcgaggagcacccggaattcattcagccggaatcccgccgcaatgagatgatcaacaatttcctgaagccgggcctgcaggatctctgcgtgtctaggacctcattcaaatggggcatcccggtcgactttgacccgaagcatgtcatctatgtctggatcgacgcgctgagcaactatatcacgtcgctgggctatgacgcggatggagaaagcgcggaaaacttccggaagtattggccggccgatgtgcacatcatcggcaaggacatcctgcgtttccatacgatctactggccgatcatgctcatggcgctggatctgccgctgcctaagcaggtgttcggacatccttggctgctggtcggcgatggcaagatgtccaagtccaagggcaacgccatctatgccgatgagctcgtgcattatttcggcgtcgatgccgtgcgctacttcgtcctgcatgagatgccgtttgcccaggatggaacgatcacctgggatctgatggtggagcgcgtgaacgctgatctggccaatatcctgggcaatctggtcagccggaccatctctatgtccaacaagtatttcggcggtctcgtatccgatccgaaggtcagcgagccggtggatgatgaactgatcgcgctggcgctggagacgccgaaaaaggtggaaaagaagatggacgagctgcgtgtcggcgacgccatcagcgagatctttacgttgctgcgccgctccaacaaatacatcgatgagacgacgccgtgggtgctgggcaaggatgagcagaagaaggatcgcctggccacggtgctgtataacctgctggagagcatccgcttctccgctgtgctgctgtccagcttcatgccgcagaccgcagagaagatcctcgatatgctcaacacgcagcagcgctcgctggacagcttgacgcagttcggcaatctggaatgcggccagtgcgtcgtcaagaaggcggagatcctgtttgcccgcatcgatgcggaggaattccaaaagcagctggaggcagaccgcaagcaggaggaacagcctgccgaggagaagaagcctgctaagccgcagatcacgtatgatgacttcagcaagctcgagctgaaggtggggaccgtcgtctcctgtgagaagcatcctaaggcggaccggctgctcgtggaacagatctctctgggggatgagacccgtcagatcgtcagcggcatcgctgcgcatttcgcgccggaagacatggtcggcagacgcgtcatcgtcgtcaccaacctcaagccggccaagctgcgcggggtggagagccagggcatgatcctgtgcgccgcatcggaagatgaccgcgatctggatctggtcacgctcacgaaggatctgccggacggcacgatcgtcagctaaatgtatacagaccggcctgagatacagaccggtcttgctttaaagaaaggaagagtgaacatgaagatcagtgaactgctcagacagcgtcctacgctgtcctttgagatctttccgccgaagaacaaggatggagacatctcttcgatctacagtacgatcgatcagctggctcagctcaagccggatttcatcagcgtcacatatggcgcaggaggatcgacgacccgcaataccgtggagatcgcaacgatgatcaaggagcgctggcagatcgagagcgtcgcgcacctgagctgcatcgacgccacggcggaaaacctgcggggcgtgctcgatcagctgaaggagaagggcatcgagaacatcctggcgctgcgcggcgattaccccaaaggctatgatccgcagactgcaccgcaggagtttcgtcatgccagcgatctggcggtattcatcacagcgaattatccggatgcgttctgtctcagcggcgcctgttatccagaggtgcatgaggaagcggattcgcttgaggcggatctgcgccatctgaagatcaaggcggatgccggcgcatcctatctggtcacgcagatctttctggacaataattattattaccggctgctgcgagaggcgcgcaaacgaggcatccaagtgccgatcctggcgggcatcatgccagcgacaaacgcgaagcagctgctgaacatgtccaagatgtgcggctgttcgatcccatatacgctctctgcgatgatcgagcggttctccgcacatccggcggccatgcaggagatagggctcaattatgccgcatggcagatcatggacctcatcaccaacggggtggagggcatccatctttacaccatgaaccggccgcagatcgccacggagatcatgcgccgctgtgatgcgatcctcagggaattccgcgatgctcattgagcgcacgctgcgctatctgggcgggagcggcatggcgcccaacgatgcgatgcgtcagcttctggcttcttgcgagcaggaggtgcgcgcgctgcgcccggcattcacccatgcgcgctttacgcttgcgcatgatccgctgcggctttgcgaggcagatatcgcgctgccttctgcgcagcttgaacgcagctttcgtgactgcggggcatgtgaggccgtggccatcacgctgggcagggaggcagagcgcctggtgcgttattatgcctgcatcgatatggccaggatgagcgtgctggatgccatgctcagcgcctgggtggaggaatgctgcgatgagcaggagcggcagatcatcacggagaagaggacggcgcgtctttgtccgggatacggggatatcccgctggcgctgaatgtccagctgggcacggcgctttccttgccgaagcagatcggcctccatgtgaaggagggcggggcgctttccccgcagaaatcgatgatcggcttgatcggcatcggcgatgccggcgaagcaaaagaatgcggacgatgtgtccgcctgcatgcatgtgaatacagaaagcggggagaaagatgttacgacagcgactaggaaaagagatgctcctctttgacggagccatgggatcgatgctgcagcaggcaggaatgcctgccggcgccgtccctgaggaatacaatatcgatgacccggccctgatcgaacgcatccatcgcgagtatctgcgcgctggcgcggatatcctgacgaccaacaccttcggctgcaatgcgttcaagatgaaggacagccggtatgcggcgcaggatatgatccgcgctgcgcttggctgtgcccgccgggcagtcgaggccgaaggaaagcgggcatacatcgcgctggatatcggcccgatcggtcagctgatggagccgatgggaacgctgaagttcgaggaagcctatgctttgttccgggacatgatcgtctgcgcgaaagacatggcggatgtgatcttgtttgagaccatgagcgatctgtacgaggtcaaggccggcgtgctcgccgctaaggaaaacagcacgctgccggtattcgtctccatgacttatgagcgcagcggacgcacgctttccggctgtgatccgctcacgatggtgaatgtgctggagggacttggcgtggatgcgctgggggtcaactgttcgcttggcccggatgagctcggcgatatcatggaagaggtgctctcgcatgcgcatgtgccggtgttcatgcagcccaatgcaggcttgccgcatctggaacatggcgtgacttgttatgcgatggacgcgcagcagtttgcgcagcgcaccgtggattacgcacagcgcggcgtgagcatcctgggcggctgctgcgggaccacgccgcagggcatcgccttgctcaggcagaagatgcccaagatgtgcgtgcgccgcgataatccctatcgcaccatcgtatccagcggcgtgcgcagcgtatgcatcggcgatcagcctgtcgtctgcggagagcgcctcaaccccaccggaaagaaaaagctgaagcaggcgcttctggaagagcgctatgaagatgtgcgcagagagggcgtgctgcaggatcaggccggcgcgcaagtgctggatgtcaatgtcggcgtgccgggcatcgatgagcagaaggtcatgccgaaggtgatcgccatgcttcaggaagtgctcacgctgcctctgcagatcgatacgagcgatccgcaggccatggaagccgcatgccggcgttacaacggccggccgctgatgaactcggtgaatggcaagcaggagacgatggaacagatcttcccgatcgcgaagaaatatggcggcgtggtcatcgggctgaccctggatgaggagggcatcccggatacggcagaaaagcgtgtggcgatcgcacagcgcatcatcgatacagccagatcatatggcatcccatccagttcgatcatcatcgatacgctggtgctgacggccagcgcccagcaggcggaggtcatcgagaccatccgggcgctgcgcatggtgcgcgcgctcggcgtgcgcacagcgcttggtgtcagcaacgtctcttttggcctgccgcagcgtccgctgctcaaccggaccttcctggtcatggcgatgacggcggg

SEQ ID NO: 3907 - DNA, 32759 bp, Unknown
  16S sequences of unknown bacteria
cttgttggcgtggcccgacggaagacaaaggctttgccgggagggcgacgccaacatgggcgccggcagcgcgggaaaggacgggccttgttggcgtggcccgacgaaggattaaggctctgccggcagggcgacgccaacatgggcgccggcagcgcgggaaagggcggagcttgttggcgtgacccgacggatgattaaggctttgcgggcagggcgacgccaacatgggcgccggtaatcagtcattgcagaaaggactgtttctccgtcccattagaaagaaaagggcgaagccgccgcacatgaattgcgactgctccgccctctacttgcttaattgtccggcaggtcctacttatcggatttgcttgccttctttacctcgtcggtcttgaagatgatcttgctctctccgctctgaccatcctgctttccgccgatgaaggaaccatcggaagcggcatccaaagttgcctttacccggttcaccgtgctcttaatatccgaatccttcatggtggataccagcttctggattccggtcttattgaacgttgccattccgcttgccaaagtatccgcaccgtcagacagagtctccgcaccttccgtcagctgtcccatgtaggtcaccagctttccggctccggcatctacctgaaccgcaccgtttgccagctttgtagtgccggcatccagcttatttgcaccggcatccaacttattcacgccggttaccaggctggtcttatccttagtatcgaccttgattcccgcctgcaggctctggaggcccagaagtgcgcccggatggaactttccgtccttgtcggtgtatccgttcacgccggcatccagctgtgcggcaccggaattcagtccggccacggccttcgacaaactcggaacctttgttccgtccgcctttgtacctcctacattgacggcggtatccaaagcctgggttccggccttcagttcatccgcaccgtcctgcagcgtcttcaagtcatcattggaagaagatgcaatactctgatacattgccttcgccgtctgatttgcggtaataatcttctgcttgtcggtattcaccgaagaaaccgtatcgtttacgtttgtctcgtatgttcccaacttttcttttgcattcttcaatgcattgatggtgtcctgatctccggaagcctctgccgctttgatggctgtttccagagcgccgtccacatcggcggaggatggagcatttaccttctcggtattcacgccgtccagattgtcgctgatggatttcgcagtctgagccagcttggcgttctgtgccgcaatcgtttcacccatctgcttgattccggcatccacccgagctgctccggcactcagtttcttagcgctgccgttatcaccggccagtccgtccgcaccgttcacgctggaattcagcgcctccgttccttctttcatctgagtggtcccggaagacaggtcctgggcaccggctaccagcttatccgcaccgtcggacaagtccttcacgccggtcttcaggtctccggttccttgcttcaggtctccggttccggccttcaagtccttggatccgtttttcatgctcccggtgccgtccttcagggtttcggttccttcttcaatctgagaggagctgttcgccagcttattggcacccttggccagcttggaagttccgtccaccagctttttggaagcatcggacagcttgtccagtgcgctttccagctcgtcaatctgaccggtggcgtcatccaatttcgtggtatctacatcattcatgaaaccggaatccgctacggtgtaggttccgtcgatttcgaaattcgtggtctttgcgttgatggttacgtggtccggaatgtccagctcgtcaatctgcaggttgtcgctcattcccggaagagcgattcccacaacggcggtgctgtttccgtcgtttaccgccttaccgttgtttacggtgatgttggtgaagttgtcgttgctcagcacgaccgcactgacaattgcgtacggacgagtcaggctgtagccgttttcttttacgctgtcgttgatgtcgtaatcgaaacggatttttacattgcccttcttgccggcgatttcatcggcggaaaccttcgtgccgttcagatagtagctgaccttcacatttaccggaagctccccgtcgtagtctccggtgtagtggatgtccttgccctttgcggcccacaccagcttgttgccgtcccggctcatcttctcgtcgccggaggtgttcttgatgttcttcaggttggagtaatcgctaaggttgttggacttgccctcattcttcagccactcgcttaccgaaacatcggttgtattgccatcggcgtccattaccgcatacacggtctcggatttgtcgccggtctgtgcggtcttcagcatctccgggaagttctcattaatggacttctccgtatctgcatggactgcactcatctgcggcacataaaacaacgctgtgctgcatgccagaacgcccgcaagaatcggggcgccgattttcttgattttgttgttaagctttctcattgttcaatcctttcatgccccttgtagttttacaaattatacgatcgaatgccataagcatggatggcagcaggaagattaccgtaatcatactgataatcgcacctctggccatcagtgaacacatggtgctgatcaggtatacattggaatacttcgatacgccgaatgtagaggcgaagaagcccagcgcactggtcataatcgacggcagcgatgttcttacggcgatatcaatggactcacgcttgctcagtccacccattcgctcggtcttgtaccgagtggacatcaatatcgcatagtccaccgtggaacccagctgaatggtggtgacgcataccggaaccaggaacggaagctccactccggtaaatccacagattcccatgttgatgtatatggctaactcgattacaagtatcagtataaacggtagtgatatcgagcgcaatacgaagaaaataatcaggaataccagtccgatggaaatccagttaacgacctggaagtccttagacgtcagctgaatcagatccttcgtggacggcgcttcaccgataaccgatccgtttttatcgtacttgtgaacgatactgttgacctgtgtcacctgacgatttacctcatcggtagaaatccgatacttcgagttcaccagtatcatctggtgcttgtcggaccgcatggaagtgttcagctcatccggaagcatgttccgaggaatcgcagaacccagcattccgtccacacccagaacgctcttcacgcccttcacgtctttgatttcctcactcatggcccggccatctttcgccgacatattcgcatctgcgatgatgatataggaagtattgattccgaaatctttcgatagcttcttatttgcagtatagaacggaaccatctctttatcgatatccttgccgtctcccaccaccatcttcgtcaaatcgtaagatgtattcgtgtgagcatatccatacagtgccggagctaacaggagtccaaagcacaggatgtaaattccataccgagatgtgagcttgtgagacaatctgttggcacttgggattaaggtcttgtgacgagtcttctgcaatgttttggtaaagaacagaatcatcaccggcagcaccgtaacgctgcacactacaccaaagacaacgcccttcgccataaccaatccaaggtccatgcccatcttataggtcatgaaacacaatgccaggaaaccggcaatcgtcgtaacggagcttccggtcacagaaatcaacgttgcgttgatggcctctgccatggccggtttcggctctattccgtcatccagcttttccatatagctgtgccacaggaagatggaatagtccatggtcacgcccagctgcagcaccgccgcgatggctttggtgatgtaggaaatttctccgaacatgatattggatcccatgttgtacagaattgccagtccgatactcagcaggaacaagaacggcgccacataggagtccagcaacagcatcattaccagaagggacaatgctactgccaccgctacgtacttgatttcttccgtctccgcaatattcttcaaatccagaaccatggacgtcattccggcaacatacgtatccttgttgctcatctttcgaatctgatccacggcattcagcgtatgctcatccgaaattcccgtatcgtagaatgttaccagcatcgttgcattcttgttattgatattgtcctgcaccaccttcgggtacatggcaatcggaatggatggattcaccacgtcctgcaaattcacgatggattccacatgatccaccttcttaatgtccttcttcagcttcgtcacatcgtccgtcttcatattctccagaacgagaatggagaagccgcctttgtggaactcgtccatcaacaggtcttgaccctttacactttccatatcgctcgggaggtaggacaacatatcgtaattaacatgagtcttcgccattccaattgctgacggaatgattaaaatcaatgctattacgaggattgcgtgtctcagcttcacaactgctttgccgaatttcatctcttgcatccccctataaaaatagtttcgcatatccaaattgaccgatggtcattttatctgccagtatactagcacaggaatgaccggtagtcaatatttgagataaaattcttacaaaattcctttgttcaatttccgaaacactttatatataagagtttcgcacgcctgaccattggtcattttattcttgacgaatccttcacttaattgtatattatagaaaaatcggtaacgttgagccgaacggatctttttttttaccaagggtgtagttatgacaaaagtggatatgaagaaaaataaaaaacgccaggacatcctggatgcggcctatgagcttttcaccacgaagggcttctccagcacgacgattatgaacattgcgctgaaagccggagtggggaagggcacgttctatctctatttcgacagcaaggaggcggtgcgggatgagctgattgtgattaaggcttcccggattctcaccaaggccgttaacgcgatggaggaaagcctgggcgccaaccgaaaggtgggggtggcggatcggttcatcttcgtggcggatttcattctgaattatctgtcgaaagatctgacgttgctgcggttcgtatccaagaatctcagctggggtctgttcctgaacagccgcattgaggagaagaattccgatgtcatcaatttcaaggatttcatttccctgctgattgagcgggaccacgtgcacctgaagaatccggacattctgatttatacgctgattgaaatggtgaactccacctgctacagcgtcctgattaacgaggatccggtcagcttcgaagagtacaagccgtacctgtaccactgcattcggctgctgattgatgatgccagggagaattaagtgttggcacggtaagatacctgtgatataatacgactcgttctgccggtttccggcggaaacgaaccggcagattccatggggatggctgtgaaacatcccggacacaacgtggggtctgccgcccaacccgaatacgaaaaatttgcgatatagtgaaggaggagcatttgccggtgcaaacgctcctctttttgattcttcacttttttatttcatcgcctgttcgattaagtcgttcagcgcttttttctgttcgtcggatgtgatgctgcccacaatcggcttgcccacaacttttccttttgaatcaattacataggtagtagggaaggaatacatcccggaagtcagtttcccggcggcactgtcggacttgaaccagatgtttttatacgaaacgccctttttctccagaagcttcttcgcatcggcaatggctttcttgtccccgtccagggtgtacgcgttcactcctacaacctcgccgccttttttcatcagcttcttgttcagagcctccaggtccttcagttcgcccacgcagggtttgcaggtggtgaaccagaaattgattaccgtcactttgttgccgaagaacagcttcttgctgctaactttttttccgtccaggtcctttccctcaaaagcagggaactcgtccatatttccggaatccgccggcacgctggtgcttccgtccttgcacgacgtcgagccgttttccttagctttctccgccactttcggatatttttcttccagcatggtcagcttctcttcgattttcttaatctcctccgctccgcttttcagcgtcttcagctcgtcctccgtgaatttgtccttcgcggattcgatggtgtccagaaggaactccccgtaattctttccgtcctcctgcagggtcattcccttgtccgcttccataaagactttttcccacaacttcttgttctttgcaaaaatctgattctcctgctccatcagctcctgatacatggcaaccgcctcgtccagattgcttggttccttgctgttgctgcttttcccgctgcacgccgccagggacagcatcagaaccgccgccaccgccagcatcatcattttcttcattttcgtcttcatttttctgtctcctttttcatttcttttccgtcacttccgaagccacacccataggccagggcatcgacagggcatacggtgacgcattttccgcaccgaatgcactccccgtgattcggcgtccgggtgatgtccacgtccattttgcacaccttggcgcaccttccgcaggaaacgcattttccccggtccacttcaacgcccaacagggccaccttgttcatcaatccgtagaaggcgcccagcgggcacacccacttgcagaagggccgataaaacaccacgctcaatattcctaccgccatcagaatgattagctttcgggtaaaaagagttcccaaagcgctgcggattccggaatttgccgccgcaagggggagggctccttccagcacgccttgcggacagatatacttgcaaaaatagggatcgcccattcccacatcgttgatcatcagcgccggaagcagaatcaccgttccgatcagcaccgcatatttcatataggtcaggggcttcagtctcccggtggaaatcttcctgccggggatcttgtgcagcagatcctgcagccagccgaaggggcacaggaatccgcagacaaatcgtcccaaaagcacacccaccaagatcaagaatccggtgatgtaataggaaaaaccgaattttgaggatcccgccacggcttggaatgcaccgatgggacaggccccggaggccgccggacaggaatagcagttcagtccgggaacgcacacggcttttccgccgccttgataaattccacctttgaagaagttggaaaggtggatattcgaaaggagggtggcacccgcctgaatccatccgcgcatgcggccggtaattctcgagaggttgtttttatttttacccaattcccacacactccagacataatcgtatggctttgcccagcaccagttccgcctcgccccgcatcgcgccgaagcacatcatgccgatgcccgtggcaaccaacagcaggcgagcggcgttttttcttcttctgctcatacctcctcctttcctttacgcctccactatagcaagccggatataaaatcttcgttaagaaaggaaagttaacggaaattttatacgggtagggtataatatagataatcggatgaatgtttgaaaaaagggagatttgttatgcgtattctggtggttgaggatgagaagattctgtgcgacacgattgttcgcagcttgagccggttggcgtacagcgtggattcctgttatgacggggagagcgccatggagcttctggccgttgaaaattacgatttggtggtgttggatctgaaccttccgggggaagacggcatgacggtgctgaagactcttcgaaaaaacgacgaccatacgaaggtgttgattttatccgcgcggtgcgatgttatggataaagtagacggcctggatgcgggagcggacgactacctgacaaaaccgtttcatcttgaggaacttgcggcaagaattcgcaatctgaccctgcggcgatatactaagaacgatgtggtcttgacctgcggcaagctttcctttgatacgaaggcgcgacgggcggcggtgggggaggagattctgtcactgacgagaaaagaaaccggaatcctggaatatcttatgctccacccggggcggccggtgagtcaggaggagctgatggatcacgtgtgggataacagcgtggatcgtttcagcaattccattcgggtgcatatttccgcgctgcgtaaaaagctccgccaggcgctgggatacgatccgattcacaatcgcattggggaaggatacgtaatggaggaccgaaaatgaagaaaatatctttgcaatggcgcatcacgctgatgacggcgattcttctttgtgtgacctgcgtggtgatgaattgcctgattatctattccggaaaacattatatggatgtgatcggaagcgggatttccgcttatagcagtaacgatgcaagccgcgaatccagcgccgaaaagttggatgaaaaaggagaatcgagggcaggtgcggattcctcgggggaatcgtttaatcccgaaaatgtcgacctgaatcacgagctcacgattatcgtggacagcgcgcaggaatcctttggcctcacaggctggtgcattacggcattcatgacgctgctgggcggcgtgctggcatatttcgtcaccggccatgcgctgaaaccgctgcgcaccttcacttctcagattgaaatggtgcagccgaataatctgtcggatatgaaaatcagcgaggatgtacttccggagtttcaatccttcagcaaatccttcaacagcatgattcgtcgattggatgaggggttctcggcccagcggcagtttacgggaaatgcagctcacgaattgagaacgcctcttgcactgatgcaggcgcagatggaactttttgcccaagaacacccggtgctgaggccggagactcgtgttttcctgaagctgctgcaggagcagacggaacgtatgtcccagatgacaaaaaccctcctggaaatgagcgaacttcgttctgttccgtgcgaggatgagattgagctggcgccgatgattgaagagatttataccgaccttgcgccggtggccgaggaaaaaggagtatcattgaaatgtgaggggaatgcccggatgatcggaagcgacaccttggtctaccggatgcttttcaacctcacggaaaacgccatccggtacaatcgtcccgatggcgccgttaccatttccatcactggggatgaaaggcttattcagctccgcgtggcagatacgggcttcggaattccggagcagtaccgggagagcattttccagccgttcttccgcgtggacaaatcccggagccgggaacacggcggtgtcgggctgggactttctctggtctgggaaatcgcggcgcttcatggcggcgcggtgacggtggaggaaagctcggaggccggcaccgtggttctggtgacgctgcgcagacaaatctaatttacaatttatccctgcaccagcgtgccgccacagctggaaccggcaccggcggtacagccgtagcagtgcgccccgaaccgaatctttcgctgaagcgaattaatttttcccgcagccagatcatagacggtcaaatcccgaccttcgttccggcacggcatttccattacctgattgaagtcgcagtcgtaaattctaccgtcgtatcccacgctaatctgatcccggcacatcattttttcgcaggcctccgggttgaatgcatccagcagcatatccatgtactgttgatagattccgttctccaggaggtgacacccgtatcgtccaatcgggttgttcgtcaccgcatacagccggttgaattccaccccgtattttcgaagctccttccggtacaaattctccagctcgtcctgatccggcggcagaatatcccgctgcggattgaacaccaggttcagctccggtttctgctcacacgatgcctcactttccatttccgcaccgtagcccacagcattcagctcccgaagcacctcaatgctctgacggaacacgccgtcgccccgctgactgtccgcctccgattcactgaaattcggaaggctggcaatcacagttacccccagctcccaatatttccgaatcaagtcccgatatgccggcgccttcagaatcaccaggttggtccgaaccatcacccggaatcccagccgcgtcgcctcttcgatgaaccaccggaagtccggcgccatttccggcgccccgccggtgatatcaatcgttcggaatccgtaccgaacccccgcatccaacaccgcttgcagcgtctcccgggaaatcacttccttccgatctgggccggcgcccacatggcagtgctcgcaggacagattgcacttctttcccacattcacctgaatcgtggacagctccggccgcgtctccagatactccgccttcggaaccatatcctcaaaatacataatccgcgccatcgcatcttccagatcctggggtgacgccggtttcctcttcggatatgcctcttcctggtacgcgggtaaaaccatgaatccgcccaggagcgcgtttccgatggtgcaggccggaccgttcagaatacggttgcgataggaaacctctgccggagagttgtgtttccacagccggtcaaaccactccacataggccgcctgatcatagcgaacgggaaccgcttcgatataaagtcccttgtattccgcccggtagatggcatcctccgccggcgtcgccgcaattcgggtgagcacgccgaactgctgtccctcaaaggtgggaagccccgccgcaccgttattgattaccacaccgccccggagttttccggcgactgccgcacaggtatgagtggtggcgaaaatatcgattccgttttcttccataaaatcggacagttctccctggcgaagcacatcctccagctgctcgatggcacagtcccagccccccagcagcttctcatctccatgagtgattccgattttacaatcgcccacctgagcgaccatgtgagccggccgatcctttagcttcgcaatcaattccggatgtttcccgatttcttccttcatcatatggtgaattcggttggagcggctcacgctggcatcatcggtgcaatccggataggcgcagccacagcccacgcccacatcttccgttcttcgaacctctgcttccacatttccaaccattggaatatatttctccgcaccggcttctacccgggcaaatgcctctgccgtccggtcgaaccagtgtatgtcgccgttgaacaccattcccacccggccgccttcgcccaagcgttcctgttcttttacgaacattgcctgtactgcatccatggcaaaggggtttccgtacagtccgcccaccaccagcagggtgtcgaaggtgtgcgccggagaaggggccgcggcccataccgccggatccaggcggtaatccaccggacatgctcttcccgcatctttgaaattatgtctcgcataactcggagttgtacaacttgccattttttccttctttcttttctctacttcaaaatcgcctgacggaggttctccagatccgccgcatccggatgggacagggcccggtcgaaattctcgatcatctggtccagattcggtgctgcatccggctgcgccttcatcttcacataccgatcccgaaccgcctgctgcatctttccctggcacatgaattcgcccaccagggtattgctctcatccatcgacgccttcacgttattcagcacccgctgaaaatacgcatcctccacgccaaagccggctgttccgaataaaaatacgtttttgtttctcagattcttcagggcatttaaggctgcctcgtccgcgttgcccttgtccgtccagaatcccaggtataccgtcttcgcttccggaatctccgcaccggcttcgccgaagaattcgcagtcctcttccggcagcgccgcccgaattgcatccgccagaatccgggtatttccggttctgctgctgaacaaaatcgcatatttttccatctgtctgtcctcctgtattaaacgatgccttccgggtcgatatcttcccatccggcggcgctgcgctctgcatccagagccgcgatttcctcatcggttctgcctttccatgccggacggccttcggtcttctccgccatggaagccacgacgccgcataccgcataggaaccccagcacagtacggcaccccagaagttcacgcccaggaagttggcatacgcaccgtttccgatattcataaatgccaagctgtccgggcttacggtgtccacgattcccagaatcataccgatccagaaggagaggtggaagccgattttcgtcggcttaatcggaccagcgccgtgaagcaggaaaatcggacccagacccataatcatggttccggaaatggtggttgccgccagaatatcggttcccataatcatcggcaggttgcccacaactgcgaaaaatgccatgaatccgatgccaatccagcgagctttttcatgcggatccttgcccagaatggccggaagatcccgcgcggtcagcttcgccagggaactgaaggtggagtccagagtggaaccgccgcacattaccatcatgatcgccatcaggaagaaggccgcaatgcccattccctgcgccaccgcctgcgccgcgtcggtcacattttccaggccggaaagcatggcgtccacaccgatcagggagaacagggtgattgccaggaatcccagaagacccgcaacggtgaagcacttcagcattttcttttcctcgcagatgaatccccggtcggtgagtaccgcatcatggaatccgtaggacaggcactgcagcagtgcacccagaacgaagtccacgccggcatccatcttccaggatccgctggttaggtatgcgctcatcgggtgttccggcagaatccagaagatggtgaataccagcagtaccacgaacaggccggcctgcagcacgtcggtaatcagggaagaacgcagtccgccccagcagctgtagcccagtgtgattgcggtaaaaagaagtgcggcgatgacgaagggtttgctgcccgactcaccgtagtatccgccgatgaccgaggtattggaccaaacctcgttgaacagacgaaccagaatcgctgcgctgaagcagaatgccgctgccacaccgtagttgcttgtgaggaagtcggtcatggactttgcggcgaaacgacggcgcagtctgtagattgcaaaaccggtgaggggaatgcagagccagtacaccgcgtagccgataccacccacgatgccgtagctgtatcccatattggcgcagttatatacggattttgcgaaaatccaagcgataaataccgaagaggtgaccatcaaagaagatgctgctcgtcccttcttgtcggttcctttgaaaaagccgccgattgtaacggccttcggggagatggcgaacatgacgatgccgtataccaccaggaatccccagaaaaacagtcctgtaccgttgtgcatgatgttttatcctttctgctatatataattcataaaaaaaacataaaaaacgctgttagaattcactaacagcgataatcgatttattttaacaaattgaggacttgcattcaaccgattttttattgaaaatccttatattgaatctgcacatttcctcatatttctatattgtcactaggcgtctttcagaatttctccggtcagggtgttggcctcttccacgatagaagcgatttcccggttccactcctcggcctgcttgcggtcagtgagggcaggggtgttggccaccacgttcatcttcgccgcctgaatgcaggcattcaggttcagagccgctacgtaaagatcgctcaccagctgcttgttggatttgccaatcatctccttggtgaggtgcaatccggccaatgctgcgcggcatgcgttcagcggagccagtcccgctgccaccgatgcctccgcaatcgctgcctttcgagccgctttctcttcatccgtggatttcggaagggcataggcatcggaaacgccggtaaaagcttccttatcttcatcgattccctgaatcaacttggtgagaacttcctgagcttctttcagcgtctgctgattcagctcttcgtactcttcatatttcttctttcccacggtgaggttcgccaccatcataatcagggctgcgccctgtgcaccggtcagcgccgcaaccgcaccaccacccggcgccggtgctgccgatttcagttcattcaggaaatcgataatcttctggttttctgtcatttcttttttcctttctgcttcccggtgcccgcagttcgaacggacaacccggaacaatagcaccaatacttttatttcattataataaaaagaacgccggaaggaaacctccagcgttctcaaattactttttctgcggattagttgttcagatctgcatcgaaaggaaggagtgctaccacacgagctctcttgatagcagtggtaactgctctctggtgcattgcacatgtaccggttactcttctcgggagaatcttgcctctctcggtagtgaacttcttcagagtctctacatctttgtaatcgatcttcttatccttgtctgcacagaactggcatacttttcttcttctcatgccgcgctttctgttgttattgtccatttcgacttaatctcctttcctaagatatgtctagaacgggatgtcgtcatccgctgcctggaatgcatccgggaaatcatcctgacctccgaaagcgtcctgctgcggtgccggcgcgctctgctgctgatcgccctggtagctgtcattgccgccaaagccggagttcgcgttggagcctccaccgttgttgtttctagagccaaggaactccacgcgattcgcgatgacgtcagtggtgtataccgtctgaccgttcttgtctctgtaacttcccgtctgaatccgtccgcttaccgctgcctgactgcccttcttcaggtatctgtctacggtctcggcctgctttccgaatacggtgattcgaatgaagtcagcctgacgctcctggccggcggacaccggtctgtcgattgccagcgtgaaatgcgctacggcagtctgagtgttcggtgtatagcgaagctccggatcccttgttaatcttccaattaaaattacactattcatgtttcacctgtcctttccgaacgctgtgaacgatacttatttctcgtcctggcaaacgatgatatgtctcatgcaattatcggaaatcttcagtcttctgtccagttcctttggcagttctgcacttgccttgaatggaatcagcacgtagaaaccgtccttcttcttgttgatcgggtaagcgagcttcttagcgccccacagatccgcttctccagcttcaccgtcagcgttgatgatgccctttacggtctcgatcatctggtttcttgcagcttcatccatagccggatcaagaatgaacaataattcataatttctcattgttttcacctcctatggcctaatgacatcttgcgatgtaggattctggcctgcttattcagaccacacccaattattatacagaaaaatagccggattgcaagcttttatttccgaaattccttgaaaatccggtgaattcttccgttttctacccgcaaatctgctgggaatccagaattacggtaaatggaccgtcgttcagtagctcgaccttcatttccgcgccgaattctccctgttccaccacatccacgcgctctttgcacttctcaatgatgtattcataaagagcattggcatggtccggtgatcccgcttcgataaaagaaggtcggtttcccttcttgcagtttgcgtacagggtgaactgcgaaatcagtaaaagttctccccccacatccgccaaggaaagattggtctttccgttttcgtcttcaaatatccgaagtttaatcatcttatccagcatcttgtcggcgatttctttcgtgtccgtatcggatactccgatcagaaccatgtatcctttaccgatttttccaatcacgttattatccacggtgacgcttgcgtgggtgactctctgtattaccagtttcattctcgtaaacccttccttgctttttttatagcgttattttacaatagattctaacctattgcatgaatacctgcaagtctggtgatgaccggaaacttcagggaaacggaggatatttttaggatatgatgaatccattcaaaagcattccggcgggactggcgattctgtcggaaataaatcgttttaataaaatggcgccgcagttcgaagcccttcggaaggaaggaaagttcgaggaagaacgggcgctgattctggaaggcaccggtcggttcgccgataccgtatctcagaaaatcggaattaccttcgatattcacggggaggagaatattccggatcacgggccgatgctgattgtggccaaccaccagagctatgcggatattctggcgatgatctatgtgattcggaagttccagatcggcttcattgccaaatcggagttcaccggtttcaagccgctggcaaaggcgattgactacactcgttccctgtttctgaagaggggagatgcccgggcggccattcagacgctgaatgaggcggcgaccttgatgaaagaagggttttccctggtgattttcccggaagggacgcggagccagtgcagcgagatgggcgagttcaaggcgggcagcttcaagttcgcccagaaggcgaaggtaccgattcttccgattaccctggaggggggctaccacttctgggaggagaaggggacggttcagccgtgcaccgttcatgtgaagattcatccgctggttcattttgaggagatggaccggaaaacgcagaacaacgcccatgtggagattgagaacaccatccgcgaaggactgaaggaattcgtttagttttattttgttatgaatacggaaactttaggaaaggaacccgaaacgccgggttccttttatgattaatataattgactatttattgtttatagtctaatatagtaaacataaggaggtgatttcatgagcaaaaggaccgttgtggtaatgccggaaacgcaaagaattctttcaataatgggagagcagattaaacttgcaaggctaagaagaaatcttgcaactgaacttgttgcagaaagagcaggtatcagccgagcgacgttatgggcagttgagaaaggaacccctacggtttccatcggaacatatgctgctgtactacacgcattgggaggaatggatcaagattttgccttagttgccaaagacgatgagctgggaagaaaacttcaggatttgcagattaaaacacgcggcagggcgacaagaggtaaacagagatgattgagaataaaacagatgataaagcaacaaattacattgaaaatgtaaaagtcacattagagaataactggaagataatcgcgaaaaagcatggactcagcagaaatgagatagaatatatgtctccggcattcaatatggagtataaataacccttagcatgcacaaaagtgttgctgcattaattcttaggaacccgaaacgccgggttcctttttcatagtttttttcttttctgcctaccaaagtaataggctttctctattggaaaaaattctttcttgttcttattataattattaacaggtttttattcctgttcaaaaaaatcatcgggctcgatcgggcgcgttcgacgattggaatttatttttacagagattaaaagagtaaagaggaggaaaatgtttatgaatcgagcaattcgcagcttgagtgcctggcttctcgctttggcgatgattgtcagcggattcagcgtgttcggctccttcggtccggcgaccgcaaatgcggcggtggacaacagcaaactggtcatcaaggttaccaaccagtatgaccggccggtgaagggtgctgaattcacatttacaatgggaaatgtaaccaaaccgattggggttgcgtcagatgaaaagggtgttatcgaaacatccaccctggacaaggatggatgggtggataccatgaatttggaactggtttccggaagtccatataccatgacttccaatatcaccgtttctttcaccgataatgatgatttccagccgattatcgaatatgtcaacgatgaggattataccggcgaaatcgtcgtaaaggtgaacgatccgaatgcggtagatcctggaacacagaagccggagaatccgtccacagcaactaccgatgaggtaaagggatacatgtccgactctgacagcagcaccgttctgatggatgccagaagcgtgaacgcatacaatggctgggctatcggtaatgcaaagagaggcggtcacctgaagaatgcggtaagcttcccggcggatgccatccgaaacgcggtaacaccgaacaagaaggaaggcaaaaccatcgaggattatcacaagcagatgacggacgatgccggtattaccaagaattccaaaatcatcatctacgatgtgaacgattccgatgcggaatacgtgtacaactggctcaagggtcagggatattccgcagacaacatgaagactttcaacggaaccgacctgattaacagcggcaaagccaaggttgtaaagtacaagaattacgatatgtacgttccggaagatgtggttaaaaacatctccgacaacctcaccggaaaatccgataaatatgacagaaacgcaaaacacatcgtcaacggtgatgacgtggtaatcctggacgtaagctggggagacgaaaccagcgatccgaataccggttccggatacgacgccggtcacatcccgggcgctgttcacgtaaacaccgacgagtacgaaactccgagagtatacgtaaagaccaaaccagagaaatacagaaccgaatggaaactgaacagtgataaggaactgattcagctggcagagaagaagggcatcactttggactcctgcgtaatcatcgccggtccggaaccgatggcaaccaccagaatggcggttatcctgaaatacctgggtgtggaaaacgttcacgttatgagtaatgccatgaccggttggaatgcggccggatactccatggaaaagggaatcaacaccaacaagaccaccaacctgggaatcaccaagcctcagaatccggatgtcatcgataccatttccgaggtaagaagcgaactgaagaattcaaaatatgcggtaatcgatacccgaagcaaagcggagtgggatggaaaggataccggatacggttatcacgatctcgccggaagaatcacggggaccatctattccaactgcggatacggctacagcagcagcgtgttccgttacagaaatgcggataagtccatgagatccggtgaagccattaagaaaatgtggaaagatgacggcattgactatcagaataaacatatggtattcttctgcggctccggctggagagcagccgagaccacttgggaagcatggctcatgggctacgatgcatcactgtacagcgatggctggattggctggtccaacggtggatacagctactaccgcgatggcaagacctttgcaatggacaagaagaccggcaaggaagtcaacatctccgcaattaaagcagcgaaagtttccaaggtaaaagcaaaagccggaaagaagaaggcgaccgtaacctacggaaagaccaccggcgtgaccacttacaaggtatactacaagctcaagaaaaagggtgcgaagtataagctggcaaagaccacaacatccagaaaggttaccatcaagaaactgaagtccaagaaaacctactacgtaaaggttcgcgcttacaagaatgtcaacggcacaaacgtttacacaaagtacagcaagaccgtaaaggttcgggcaaaataaggttttatgcatcacggattcccgattatccgaagaagaggcgtcactgcggcgcctcttttagtttataatcacagttttccataatttgttaacatctctgtgcataattattcattcatatccgtacacctcttatatttcaaccgtttcggcacattcccacacattgttgataactgtggaaaactttttctttttgtgtttttgacaagtttataaacatatttatttgacatacgccaaatagattactatcattaataaaaaaatattatgcgaaataacaggaggtgtaccatgctgaaagattacatcaaagagaaccgcaccgtgcggggattcgaccaaagcgcaaaagtttccaccgaggagctgatggacatgattgactgtgctagactgtcatcctccggcatgaacctgcagccgctgaaatattttatcgccaaccgggactccgccgcagccattcttcagaaagcgaccaagatgggtggtcgtcttccggagcgccacctgccggatgccggaaaggagccggaatcctacatcgtcatccttcaggatccggacatcagcaccagcgacacctttaccaatatcgacctgggtatcgcggcgcagagcatcaccctggcggcggtggagaagggataccgctgctgcatgctggggggcggctataatccggaagaactccgggacgagctgggcattccggacaaatacatcctcaagctggtcatcgccgtcggcaaatccgcagaggaaattcgcctggtagaaattgaggtcgggggagacaccggctactaccgagatcccgacgacgttcattacgtcccaaaaagaaaactgcaggacatcatcatccgctagtttccccaaaatgtaagagcgtgcgtacgatgcaccaagtgccatccaataattagaatcattaaaataattgtaattaaatatgcctagaatttcgaagtgacttcacgctattcttatattttttcaaaaaaatggacgcagagccggacgtttccgactttgcgccattctttttttattcattaatccagaagagaaatctgctcaccctcggatttctttttttctgaaaccttcggcttctgtgcgttctcttcatcatccacaaccttggccaaagatacgatgtggctgtcttcctccaccttcataatctttacgccctgagtggttcttccggacttggagatttcctctgctcgaattcgaatgattacgccgttggagttaatcagcatcacttcgttctcgtcccgaaccagcattccgccgaccagcgtaccggtcttgctgaacttggacttgtcgtaagtagcgatacccttaccgcctctggtctggaggcgatactcatccagagaggttctcttaccgaatccgttctcggaaaccaccagcatctcccgggttccgtcgatatccagctccatagaaacgacttcgtcgccataatccaggttgatggcgcgaacgccggctgcattccggcccatgcttcgaacgtcgttttcgttgaaggcgatggccttacccagcttggtgatgacgtagatattctcgtcgccgttggactgactgacggaaatcagcttgtcgccgtccttcaggttgatggcgatgagaccgttcttccgaatgctgtcgaattccgacatcggcgtcttcttgatggttccgcttcgggtgatcattaccaggtagttatcctgggagaattccttcaccggaatcaccgcgctgaccttctcgcccgaattcaggttcaggaagttgatgaccggagtaccctttgcggttctggatgcttccggaacctcgtatcccttcatcttgtacaccttacccatatcggtaaagaacagcaggtcatcgtgggtggaggtgatgatcagatctttgacaaaatccgaatcccgggtagtcagtcccagaattcccttgccgcctcggcgctgtgctttgtaggtgttctccggaactctcttgatgtagcccatgtgggtgagggtgattgccacatcctcttcatcgatcagggcctcttcatccagctctccgtcgccgttcaccagcttggttcttctcttatctccgtacttcttcttgatttccagaagttcgtccttgattacgcccatcagcttcttctcatctgccagcagttccttgaagtatgcgattctcttccgaagttccgccaattcttcctctattttctcacgttccaaaccctggagtctggccagtctcatatcgagaattgcctgcgcctgcgcttccgacaaactgaaccgaatcatcagcttttctttcgcatcgttataagcggaacggataaccttgatcacttcgtcgatattatccagcgcgattacgtaaccctctaaaatatgtgcccgttcctctgcttttctcaaatcgaaccgagttctccgcgtcaccacttccttctggtgcttcagatattcgtccagaatctggtacagattcagaatcttcggctcgccgtttaccagtgccaacatgatcatgctgtaggaagtctgcagctgagtgtgcttgtacagtctgttcaggatgacattcggattcacgtccttcttcaggtcgatgacgatccgaagatttcctcgagcggactcatcctggatgttggaaattccttctatcttcttatcctttaccagcgctgccatggactcgatcagccgagccttgttcacctggtacggaatggagcttaccacgatacgggtacgtccacggcttccttcctcaatttcgcactccgagcgaaccagcaccttgccggtaccggtacgataggcttctcgcgcaccttcttttccgataatctgcgcaccggtcgggaagtccggcgccttgatgattttaatcaagtcatccaccgtgcactcatcgtcgtcaatcatcttgacgcacgcatcgatggtctcgcccaaattgtgcggcggaatggatgtagccatacctaccgcgataccgttggatccgttaatcagcagattcggcacacgggaaggcagaaccaccggttcctgttcctcgccgtcgtagttatccgcaaaatccacggtttcctttccgatatcccgaaccatctgcagggagaacggggacattctggcctcggtataacgagaagccgctgcaccgtcgccatccacggaaccgaagttaccgtgaccatccaccagcggatatctggtggagaaaacctgtgccatcttaaccatggcatcgtagatagaactgtcaccgtgagggtgatatttacccattacttcaccgacaatacgggcggacttcttgtgcggcttgtccggcgtaattcccagagcgctcaggccgtagagaattcttctgttaaccggcttcaaaccgtctcgaacatccggaagggcacgtcctacaataacactcatggcgtagtcgatataggaagtcttcatttcctccgacatctcatgagtgattattttgctgtcttccaataaattcgttgacattcaatctcctttatctatacttcttcagtatctcaagctcttcgcgatttcccataaaaagaatttcgcaggtcaccggataccgactataaatccaatgtggcgtaacgcgcgttttcctcaatgaacttcttccgcggcggaaccttgtcacccatcaatgtggtaatcatctcatccgccttttcggcatcatctaaagaaatccgaatcagggtacgatggttgtagtccatagtggtttcccacagctgagtgtagtccatctctccaagacccttgtatctctgtatttccacctttgtcttgctgtccttctcccgaagttcggtcaaaaggtcttcctgctccttgtcggaataggtgtaccaagtctctttgcctctcttcacccggaacagcggcggctgtgcggcatatacatagccttcctcaatcagcggtctcatgaagcgatagaagaaggtgaggagcagcgtccgaatatgagcaccgtccacgtccgcatcggtcatgatgatgattttatgataacgcagttttgaaatatcgaagttgtcgtcgattccgcagccgaaagcggtaatcatattccgaatttcctgagaatccagcgctctcgcacgggttgccttctctacgttcagaattttacctctcagcggaagcaccgcctggcgcgctctgtctcttccttcctgcgcacttccgccggcggagtctccctccaccaggaaaatttcacagatttccggatccttctcggaacaatccttcagcttgcccggaagcgatgtgctttccagtacgttggttttacgcgaggtctctcgagcctttcgtgccgcttctctggcgttggccgcgttgatgcactttgtgacgattttcttggcctgcgccggatgctcctctaagtagaaattgaagtactcgttcatgctgctttccacaaaaccacgaacttcactgtttccaagctttgccttggtctgtccttcgaactgaggatccgtcagcttcacgctgacgatcgcggtaacgccttcccggcagtcatcgccggtgagggaatcgtccttctccttcagctgcttggtgcggcgagcatagtcgttcagcgttctggtaatcgccgccttcagtccctggaggtggaaaccaccttcgatggtgttgatgttgttggcgtaggacattaccgtttcgttgtagtttccggtgtactgcagtgctacttccacttcatactctttgccggtggcttcgtccttcttgtggttctcgaaatagaatacatcttcgttgatgaccttcttgtttcgattcatgaaggtgacgaattctcgaattccgccttcgtagcagaagctttctttcttcttccgtccctctctcttatcttcgatggtaatccggaggcccttattcaaaaaggccatctctctcattcgattctgcaggatatcgtagtcatagatggtttcatcgaaaatttccggatccggccagaaggtggtcttagaaccggaaccctcggcctctcccagaaccttcagctcggttgctctttttccctggaaatattcctgctcgtacagctttccgcctctttttacctcaacgatcatgtgcgtggagagggcgtttactaccgatgcacctacaccgtgaagaccgccggataccttgtatccgccgccgccgaacttaccgcccgcatggagctgtgtatgaataacttcaaccgtcggcttatgctccgtcggatgcatatccaccggcattccacggccgtcatcgcacaccgtgatggaattatcttcattaatggacagctcgatgtgtttacagaatccggccagtgcctcgtccacactgttatccacgatttcgtatacgagatgatgcaaaccctgagatccggtactgccgatgtacatacccggtctgacacgaaccgcttccagtccgtgaagtacctgaatctgttggcctgtatagtcgcttttctttttttctgcgctcattcaaaccttccttttatgattaaaacaaacaaaaaatcggttatttacataaccgatttattttaccatattcgcgtcttttattcaagaataccaaaatcatcataaggtataattttggctcgttttggcttgtttttaaatcatttcaaggtatttttaaacacagtaccactcttcacagaataaacatttccctttggcattttcttcagaatccgattgttcacatccgtggtggtaatgaagagctgcacgtcttcgatttcttgaaaaaggaatgtctgccgttcttcatccagttccgacaatacatcgtccaggaggagcaccgggttttcaccgatcacgtcccgagcgattccgatttccgccagcttcagtgccaaagcgatggtgcgatgctgtccctgagatccgtacttcttggcgtcctttccattaatcagaaattccatatcgtctcgctgcggtcccagactgctgtgcccgctgtaaaggtctcggtctctcgccgccaccagcgcgtcgtattgattctcttccgaaagagagcagagatatcggatttccaaatcttctcttccgccggaaatgctcttctgaatttccgctgctctctccgaaagcatgcgaatgaaatttctccggtacttcacgatttccgttccatacttcgccagctgcaggtcgtagatgtccagcatgtcttcgtcgattttcgaattcttcagattgtccttcagcatgctgttcttctggcgaagggcttcgctgtaaaggcgaaggcattcgtaatagcggggccgaatctgggacagttccttattgataaaatttctccgcttctccggactgtctttgatgatgcgaagatcttccggagaaaaaaccatcaccaccagattgttcagcagctctgcggtttttcggatgaccttgccgtcttttttaatcatctttttgccggtacggtccaggattacggaaatgcttttatccatatcctcgctcaccaggtccaccgtcacgctggcccgcggtcgatccagcataatcatgttggcggaattctgggtgcggaaagatcgggcgaaagcgcagagatagatgccttcgatgaggttggtttttccctgcgcattctccccaataaaaacatttctagagctgtcaaaagacagctctagattttcgtaatttctgaagttgtggagttctacttttttgactatcataaattctcactagttgattcgaatcggcagtgccaggtacaaatagcgctctccctgaagagggcggaagatgcatgggcttacattatctctcatgtaaagaaccacttcttcatcatcgatgctccggaggatgtcgatcatgtaacgggaattgaatccgattttcaaatcctctcccttctggataatctcaatcttttcgttcatattgccctggttatccaacgccgagatttcgaggagatcgtcctgtatatcgaacttaatcatattgttgttttctttttgagtcaggatggatgcacggtcaatgcttcgaatcagttcatctttctgaattcgaacctcggtggtgctgtctaccttgatgattcgtttgtaatcgatgtatcttccattcatggtattcagtgttaccttggttccatcaaaggaaaataccgctttttcgtctactagctccatgcggatggtttcatctccgtcatcggaaatgatttttgacattttgttaagctgttttgcgggaatgaccaccttaaacgcatcgatggaatcctccagcggttcgttgtagattgccattcggaaggcatccaccgcaaccatgcggaaattgccgtcgccgatttcgcagaggacgccggtaagaattccattgatttcatctgcgctggcagagaaggcggttttccgaatcagctttcgaacggattctttattcagtgtgatgctcttctgcggttccttcatctgaactttcggaaactctgcggaatcgaagcagatgacttccgaccggtaacgtccgctctgaatcgatagaactctttttacggaatcgtattccatcatcacatcttctgacggaagtttgccaatgatatttgcaaagagtgcagccggtgccacgaaatccgcaatgccgtcgcattttgcggataatttggattccaccaccatgaaggtgtcggtaccggtgatgatcatttcatcttcttttgtttcaatcagtacgccttccagaatttttgaagtggaccgggacggaactgcctggatggcgttgttcagagcacggtaaagttcggatttagtgcaatagattttcataacgattcctttcgcgagagcattattattaatataaataaatatagttatagtagtagggggtgtcgatactgtggaaaactccccgaattcataattttgtgtgagtaacgggctttttgactgaggaaaaacccgtacaaaaactctgttattcgaatgtgtataacttttcggcaacgcccaaaaatgtgtttatcgatgttctttgatttttttcttcaaagcatcgatatccttccgagtctcctcgtcgttatcatactgtgaggtaatcttgttcaccgaatgaatgacggtggaatggtgttttccgccgaagagttcgccgatttccggcagggaaagctcggtgttctctcggcaaaggtacatagccacctgccgagggtaggcaatttctttatttctcttggtagaatccatatcggaaaccttgattttgtagtattttgccacgatggaccggatgcgttccggggcgatgccgccgtcggaatccttgatgatgttccgcagcgttctttttgcaaaagccacgtcgatgtgttcgtccaagagattggaataaccggtgatgttgttgaaggcgccttccagctctcgaatgttgtcggtgaatttctccgcaatgaggcagcatacttcgtacaggtcgtcatcccattccagctgcgcattttctgcttttttcttcagaatggccactcgggtttcgaagtctgccggcgtgatatccgcaatcaggttccacgcaaatcgagtacgcagccgctcttccaggtttaccagttggttcggcggacggtcgctggagatgacaatctgtttttcgtcctcgtacagcgcgttaaacgtatggaagaattcttcctgggtcttatccttgttctccagaaactggatgtcgtcgatgaggagaacgtcagcttttcgatacttatttttgaaagcacgcattttattctcggaaattgccttgatcaattcgttggtgaaggtttccgaagatacgtacacgacgcgggattccgggtcatttttgataatatggatgccgatggcctgcatcagatgggtttttcccaggccggaccctccgtatataaaaagaggattgtatgcttccgccggggattccgctacggccagggcagcggcgtgggcatacttattattattgcccaccacaaaattatcgaagttcagccgcggattgaacagcttgttggtgtcttcgaatttttgaattcttttccgggcagccaaagccggccggctctcttcctgatattcctcctccaactttaccagtacgcggtagctctggccggtgacgttctcaaagccctgttcaatcaggtgcatataacgctttttgatcagattgaccgcgatatcgttttttgttgcaagataaataatgttcacatcttcatcaatacggtagatggagagggatgtgaaccaggtgttgtagctgacctctgtggtgtttgcttttatgaattgcaggaattgctcccatatcttgttagtatccaaaatgctctttctccttgttgataacatattttacataaaattttccacaatgacaagtggtcagaaacgccaaaaatctaaatattagggggtacaaaaagaatgttatacacatgttgtggaaaaaattatgcataactttttcgaaacactaaatgttgtggtaataagcatttttgatacttttttgaaagaaaaagatttcatttttcgatataattcagactttcattgactttgaaggcggaaatcagtataatattttgatgtatgtacccttggaatttagaaggtacggaattttatatcaacttagagatattgtaatatcggaaggagaaaaggaagatgaagagaacatatcagcctaagaagagacagagaatgaaggaacacggattcagaaagagaatggctactgctaacggcagaaagattctgaagaacagaagagcaagaggcagaaagaagctgactgcttaattcccttgaatgcttgaagcggttattcgataacaaaatgaagtgcagaaaagaaattcttagcaatcaaagaaatttcaacaatgtctatcgaaaaggttcttcccgaggaggccgatacgtagtcgttctgtataagaagaaccgactgccggtttctcgaattgcatttgttgccagcaagaaggtgggcaacagcgtatgcagaaacagagccagaaggttgatgcgagaatccatccgtacgatgggactggcaatccggccgggatacgacatcattttcgttgcacgaaattcaattaacggaaagaagtgtccggaagtacagcgaactttagtgaagtcgctgaagtcttgcggattaattgaagagaagtgataaacgcgatgaaagcaatcagcaattttatcaaaagaattttaattttaatggtaagaggatatcagctgtttatatctcctctgttcccgccggcatgtcggtttactcctacctgcagtacttattttatacaggcgctggagaagtacggtccgattaaaggtagttggctgggaatcaagagaattctgagatgtcatccgggaaatcccggcggatacgatcctcttccatagacagggagaattatatgggagtaatagcggtacctcttggatacctacttacactgatttataatttcgtgggaaattatggtatttcactgattattctgactgcaatcgttaagctcgcgctgttcccgctgtatgtaaagcagattaaatccactgccaacatgcaggaactgcagccaaagatgcaggagattcagcagaagtatgcacacgatcagcagaagatgaacgaagcgatgcaggagctctacgccaaggagaaattcaatccgctgggtggatgcctgccgatgctcattcagtttccgattatcatgggtctgtttgcattgctgagaaatccgatgcaatacctgaagagcgaagatatgctgttcgctgtacacgaatcttttctttggatcaaggatctggctcagccggacctttggattctcccaattgcggcagcagtagcgacatatttctcgttcaccatgactcagcagcttaccactgctgcaggtgctgaaaatgcacagatgaagtccatgaacatgatgatgaagtatgtatttccgctcagtattctggtcatcgccagatcgtacccggcaggtcttgcaatctactgggccggcggtcagaccatccagattttcctgaacattcgcatgaataaggttcggaaggatttgaaggagaaggcggatcgcgaaaagcttgttgcccgtgcggaaaaagaattgaaaagaagactgaatgcaacttctaaattgaaaggaaatcgttagaaaatgagagtttcagaaaaatggggaggagatgttgacgcagcggtagagcttgcgctcaaggaactcaaactcaccatcgatgaagtcgatgtcgaagttctggaagaatcctccaaaggtttcctcggcataggttccaaactggcaaaggtcagagttacagcaagggaagagaagtcgaataagaaggagaagagttccttcgatgatatcgacagaatcctggcttctttacctgaaaatcagaaagtagaagttcctgaggaaatcagagaagattatgataagttcgagcaggaagagatggaagatgctcgagcaagtgcaaaagcaaagaagaaagacagacataaatccagaaacaatcggggaaatcggagaaaagagcataaggaaaatcgtgcagatagttctatgttcgccgatctgaagaacctggagccggcagaaggtcatccggtggaaacattccttcgggatgtaaccacagagatgggcatcgatctggatttcaccgtgaaaagcggaaacggaatcgtctatgtaaacattaccggtaaggataccggaaccatcattggaaaaaggggtcagaccctggatgcgattcagtatcttgccagcatcgttgccaataaggaaagcgatgaatacgtgagagttattctggacgcagagaattaccgttccaagcgggagcgcacactgatgaacctggcaaacagacttgccggcaaggtggagcgttccggaagaagcattacgctggaaccgatgaatccttatgagcgtaaagtaatccactccacattgcaggatcatccgtatgtgacgactcgcagtgaaggaaaggaaccgtatcgccgggttatcatcgagaaaaagtaaaatgaaggaatctcggtccatctccggatgaccgggattttttttaaaggagagaaaatgggagacacaattgcagcaattgccacgccgcaaggcgagggaggaatcggcatcgtccgaatcagcggagatgattcactgaaca

SEQ ID NO: 3908 - DNA, 14055 bp, Unknown
  16S sequences of unknown bacteria
accgactacctcttgaatgccattcaagcgctctcccaagtgagctacacccccaaggtactttaatagtataccataggattttacaaattgcaagcagttttttcttctttgccaaaattatcaaatggcaaaatgcacaaatgaattgttattttctcagcaatattgaacatgatcttggtgacagaaaagtgacccgatttatgcataaatcccgccatgcttcccgatactgccactccacccccctttttttgacagaggaaatccatcattattcaatttggaatatcacggcgtcaatccgcttcccataccgcttcccgcagattttgactgtttgatgatatgcttaaacattctaagcatatcccagatttttcatcaatttgccgattgaataatccatattaaaggagtagaatatgttggttaaatatcattgatgttaggaggaagtgcgtctatggataatatcattgacaagctgctggaaatcgaccgcagcgcccgcgagatggtagagaatgcctcgaagcagcgtgaatcgtcgattgccaatctggcagccgtcaaaaaagagatcgacatgaccgctatgaatgaggcccgcgccaaagcggaagaataccgcaaacaggccaaggctgataccgagaaactcaaaaacgcctatgccgctgagtatgaaaagaaccggtccgctctggagagcacctacaatgccggctgcagcagctgggtggatgccatcgtggaaaactgcactcgggtaaactgaccatacagcttccctattttaataagtaaaggagggtattatgaggacagatttttccgaaaatgccatttccgccaaagtccatgcgttgtatggccgtcggatcgtccggagtcagtatgaagaactgtgcagaaagcacaccacctccgaaatcgctgcatatctgaaggagcgtacccatctcaccgaagtgctgaatacagtacagcccgctaccgtgcgcagcgatcagctggaaagcattctgcacaagggccggtacaacaagtacctggatctggtcaagtacgccactcccaaaacccgggaattctaccgcagctatgtactgaacctggtggagatccagctgatcctgcagatgatccggctcatcaacatcgggcgtaccagtgaattcatcgtcagctatccggcctttgctgagagcgatctgcgcattggtctgggcaagctctccaaggtgaaaacctatgatgaactcctggaggctctggaaggcactgaataccatgatccgctgctgcgctaccgcagtacggataaaaagaaccccatcatcaactatgccggctgtgaaatggctctgatgaactgctattatgagaatctcaaagccattgtttcccggaccttctccggtgagacccgccgggaaattgatgacatcatggcgaccaaaatcgccctggaaaacggcatcatcggttaccgcctgaagaagtattatccggatatgactccggaggatatcaagggctatatgctcgacttctggcgggaacctcccatgaagctgctggacaccgcactgcgtgccaaaaccgcggaagattacctcaatacactgaaaaacggccggtacatcgccggcatcggtgatggggaaatccagtccatcggacttggttcccaggcaatccgcagtctgctcagtcagcgctatatgcgccgtacccagcagccggctgtggcatttgtctgctatatgttccacagtgaaatggagatcgacaacattgtgcgtatcgtcgaagcggtacgctatggtatggaccccagcgaaatcatgcagcttcttgtcattatttaatattttacatagtcaggaggttttgactcagagatgtccatcgaaaaaatgaagcttgtgaaagtcacaggcaatctgaacaagatgaacgcggctcttaccacctgctttgagggcggattcttccaccccgaacatgtttcggaaaaagcaggagccgatggttatcatccgttcgatgctgtaaatccctatctgccgatcctgtccaaacttgaccagatcgccaaagactgtggggttgactttgctcccaagcagaagatcgaccgggagaaaatggagattgcggctaccctgcttctgggaatcgagggaaaatacctcgaaacccggttcggtaaactgcccactgcacaggtggaccgtttccaggagatgagcggttccaagttcttctttgttcccctgatcgaaaaagtgaacgactgctggtgtatttacagcgccagccgtcagagcatggaggaagtggatcacctctttgctgaagccgggtttgaaaaagcctgggtacccaatttctccgaggaggacggaaccgttaccgatttcgccttcgaagcagagatccgtcagctcaccgaacagaagcagctcctgctggctgccaaggaacgcggttccagcgccattgaacagctttcccatatggaaaacctcagtgtcagcctggacgacatcttcgccagcaaatacctgcaggtacggttcggacggattccctcggacagctatcagaagctcaagtattatgacgaccggctcttcttcttccagccgctgagtgaggatggggaatttgtctggggcttctgcttcaccgacaagatccatgtggctgaagtggatgagatcctctcctcgctgttctttgagcgggtatggattcccgaatatgtacacggtgttccgggacagaccttcgaacatctgcgcaatgccattgaggaggctgaccgggaactggctaccaccgatgaactgatccatgaaaccatcgatcagaacttcgatatgtgcagcattctctatgccactcttcagtacctgagccgttcgttcgagctgcgccgccatgtgagcatccatgatgacagctttatcctggtgggctttgtcccggaaaaggaaactgctgccctggagaagaagctgcatgagctggaccccaacctcactgttgagatcactgcccatgacagcgacaagcgcttccaggcgcccaccaagctcaagaacaacttcatcgtcaagcccttcgagatgttcgtggatatgtacggcactccgggctacaacgaaaccgaccccacctccttcctggcctggacttacatcctgctgttcggcatcatgttcggcgacctgggacagggtctggtcatcgccgctctgggactcttcctggatcgggtcaagaagatgaacttcggcaagatcctcgagcgcatcggtatctccgctgccatcttcggcaccatctatggctcggtattcggcctggagcatgtgcttgatcccttctacaccgatgtgctgggtctgcccggcaagccggtggaggtcatggacggtgaaaccatcaacaccctgctgatggctgccattgccctgggtgttgccatgatcgttatggcaatgctcatcaatgtgttcaccggcctgcgcaaccgcgactgggaaaaggcgctgttctccaacaacggtgtggctggtctggtcttttacggcgctgtgctggctggcatggtttccatgctcaccggcggcccgaacctgttcaccctgccctatatcctgggtctgctggtactgccgatcctggtgatcttcctcaaggaacccctgggccggcttgccaagggcgaacattttgaactggaaggcggcgtcggctctttcatcatcgagggcttcttcgagctgttcgatgtggtgctgagcttcgttaccaataccctttcgttcatgcgtgtgggcggcttcatcatcagccatgccggtatgatgtcggttgtgctcaccctcactgagatgttcaccggagccggcagcatcatcgtgctgatcttcggcaacatcttcgttatggcactggaaggcttcatcgtaggcattcagtcgctgcgtctggagttctatgaactgttcagccgctactttgacggtcagggcgttccctatgcccccgtttccatggacgctcaggcagccggcgaataaccccctgccctgaacatagatacaatctttcttgaatctactttttggaggaattacttatgtctattctcacactgatcgttcccgctatcgccgttctgctcatcgctgctcccctggtaagtgttgctcagggtaaggtaaccggcaagtccgctatccgcaaccgtttcgccctgcacttcggtgccttcgctctggcctgcatctgcgctgtggctgttcccgcttcgggtgttgccttcgctgaaactgccggcactgttgcctccatcatgggcaccaatgctcagggtatgggcttcctggctgccgctctggtaactggtctggctgccatcggcgccggtgttgccgttgcttccgctgctcccgctgcaatcggcgctgtttccgaggaccccaaggccttcggtaaggcaatcatcttcgttgtactcggtgaaggtatcgcgatctatggtctgctgatctccatcctgatcatcaacaagctttaatcccccttttgtcctgaaaaaagcaggtgcagagatgaaattctttgttctgagcgataagcctgatgtgtatctgggcatgcgtctggccggtatggacggcgctgtggtcgagaaccgcaccgaggctttggacaagatccgggaaatcgtcgccgcaaaagaggtgggaatcctgctcatcaccggtgaactgatggaccagtgtgagccggaactcaccgccatccggcgggataaccgcctgccggtcatgacccgaatttccgaccgcagcggcgaaagtgccaccaagggactggaacggtatgtccatgagtccctgggcatcaacttgtgaggtgaaatctatggcagaagacaagaacctgcagaaaaagctggcaaagttcgcagaagagatcatgaacattgccagaagcgaatgcagcaccattgaagaggagacccagagcgatctggaaacacagcgggccagcctgaaagctgctgccgatgccgaagccgccaagtatttcgaggcagagctccgggaaatcgacggacagtcccgggctgcagccttcagtgaaaaggatcgcctgagaaaagaactgttttccatccgtgagaaatatatgtccaatgtatttgcacaggctgctgagcgcctttcggaatttactgccggcagtgactatgcagcattcctgaacgccaaggccgcagaagctgccgcccagggtgattttgccggcggtactctctatctgcgccaggaggatctctcctatgccgatgcgctgaccaaggtcctgcccggctgcactgccgctgcttcgcccgagatccatctgggcggcctgatcgcagtgagcgccgatggacgcacccgtctggacctgagtctggacgccgcactggaaggacagaagcagtggttcttcagcaattccaaactggacatcacactgtaaaactttacggaggtgaaatcgtttgagcagcaatctgatcaattccatcaacggaccggttgtgaccatcaagggccccaccgatctgacgatgcaggagatggtctatgtgggctccaagaagctgatcggtgaggtaatctccatcagcgcggagcgcactaccatccaggtatatgaaactaccaccggcctgcgggtcggtgaggagatcatcggtaccggcgctcccctgtccgcaaccctgggtcccggtattatctccaatattttcgacggtatcgagcgtcctctggaggacatcgaaaaaaccgacggcgcattcatcggaaccggcagcagcatcccctccctcgaccccgagcgcaagtgggatgtcaccatcaaggtatcggtgggcgatgaactgaggggcggcgatatctatgccacctgccccgaaaccccgctcatcgagcaccgctgcatggtgcccccgaatctgagcggacgggtttccgctgttatgaccaacggtcagtacaccgtcaacgactgtgttgtgaagctggtggacaaggacggcgtcgaacacgagcttaccctgtgccagaagtggccgatccgggtagagcgcccgatccggaggcggatgcccattgagcgtcctctgatcaccggtcagcgtgtcatcgacaccatgttccccatcgccaagggcggcaccgctgccatccccggcggtttcggtaccggtaagaccatgacccagcatcagctggctaagtggtgcgatgccgatattatcgtctatgtgggctgcggcgaacgcggcaacgagatgacccaggtactgaaggagttctctgagctgatcgaccccaagagcggtcagaagctcactgcccgtaccgtgctcatcgccaatacatccaacatgcccgtagctgcccgtgaggcatccatctacaccggcatcaccctggcggaatactaccgcgatatgggttaccatgtcgccatcatggcagactccacctcccgttgggccgaggctctgcgtgagatctccggccgtctggaggaaatgcccgctgaagagggcttcccggcttatctgccctcccgtatttcccagttctatgagcgtgccggctacactgtatccctgaacggcgctgagggttctgtcaccatcattggtgcggtatctccccagggttccgacttctccgagccggttacccagaacaccaagcgttttgtacgctgcttctgggctctggacaagagcctggcctatgcccgtcactatcccgccatcaactggaacaccagttacagcgaatatgtggacaccctcaaccgctggtacagcgccaatgtgggccgggaattcatggcagaccgtcagcggattgccaccctgctccatgaggaaaatgacctgatggagatcgtcaagctcatcggttccgatgtactgcctgacgaccagaagctggtcattgaaaccgccaaggtaatccgtgtgggcttcctgcagcagaacgcctaccatgccgaggatacctatgtaccgctggaaaagcagctgggcatgatgaaggtaatcctgtatctctacgaccagtgcgccgctatgatcaagaagggttatgccatttccgccattctggaaaccggcatcttcggcgaagtggttaagatcaagtacgatgtacccaacagcaagctggaaatgctggacgattactacaccaagatcgaccaggctctggctgccgtcatttaacaagggaggagcgagtaaagtatgagtctgaaaattgtgggacttagcgagatcaacggcccccttgtagcactggacggcatccatggcgccggttatgaggaaatggtggaactggaactccaggacggcaccacccgtaccggtcgtatcgtgcagatggacggtgaccgctgcatcatccaggtattcgaaggtacccgcggtctctccctgcagaacaccactaccaccattctgggacatcccgtggagatgagcctctccaaggagctgctgggccgtgttctgaacggctccggccgtcccatcgatggcctgggcgagatttactgggaaaagaaggaggacatcaacggcaagccgctgaatcctgtttcccgtacctatccccggaactacatcaacaccggtatttccgccatcgactgtctgatgaccctgatccgcggtcagaagctgcccatcttctccggttccggtatgcagcacaacaagctggctgctcagatcgtaaagcaggccaacatcgctgctgaagagggtcaggagttcggtatcgtctttgccgccatgggcgttaccaacgacgtagccgactacttccgccgcagctttgaggaaaccggcgttatggaccgggttgtcatgttcctcaacctgtccaatgaccccatcatcgagcgtatcctcacccccaagtgtgccctgaccactgccgaatatctggcctttgagaaggatatgcacattctggtaatcatgaccgacatcacttcctactgtgaagcgctgcgtgagttctcctcttccaagggcgagatccccggtcgtaagggctacccgggctatctgtattccgacctggcttcgctctatgagcgcgccggtgtcatcgataccgccaagggttcggttacccagatccccatcctgaccatgcccaacgatgatattacccacccggttccggacctcaccggttatatcaccgagggtcagatcgttctggaccgttcgctggatcagaacggcatctatccgcctatctcggtactgccctccctgtcccgtctgatgaaggacggcatcggtgaaggctatacccgtgccgaccactcggcagtatccaaccagctctttgcctcctatgccaaggtacaggatgccaaggctctggcttcggttattggtgaagaggagctgtccgcttcggataagctctacatggacttcggcaaggccttcgagcactacttcctcgaccagggctttgataccgaccgcaccatcgatgaaaccctggatctgggctgggatctgctttctatcctgccccagagcgagctggaccgtgtggacaacaaactgctggaggagaaatatcacccggaacggggcgccgcactgcttaaagagatgcggggtgaggcataatggcacagcaggtctttcctaccaaaggtaatctgatcgccaccaaaaagaccctggcgctctccaccatgggctatgacctcatggataagaagcgcaatatcctcattcgggagatgatgggtctggtggatcaggctcagaagctccgcaacgaagtggatgagatcttcgatcaggcctatgctgccctgcgcaacgccaatatcaccctgggcatgatcggtgagatcgccgaaagcgttccgctggacgacggcatcaccattggttaccgcagtgttatgggcgtggatattcccatcatcaagtatgagaagaaaccggtggtcctctcctacggcctctatgacagcaactcccagctggactatgcctttatgtgcttccagcgggtaaaggagatctccatcaccctgtcggagatcgaaaatgctgctgccgggctgtccgacgccatcgtcaagacccagcgccgggccaacgccctgaagaatgtggtgatccccaatctggagagtacggtaaagttcatttccgactcgctggatgaaaaggaccgggaagagttctcccgtctgaaggtcatcaaggcacagaaaacagccaaggccaagcgtctggctgctgcccaggctgaggctgccaaagctgaagctgtcggagaataacacaatataaaaaatcccctgtgaaaactcacaggggattttttattgtatctatttaccgtccggtattggggttggtcttattttcatcagcaggcttggaggaatcctcctcatcgcccggagtttcggtaagcagctcggtctcgagctcctcaaactcataccagatcttgtcgatggaaccgatctccagaccgttgaccttataggtcacgccattcttgcggatcttgagggtgatgtctcttcccttcagctcacgggctacgctcgcggggaagtagggcaggccggtggcggacacttcgatggtatcgccttcatcggcatctgcaatctcccgcttcacctcgctccatacttcattgccataataatcccctgctgaaccggtatctgtatcaggttcgggaacaggtacggttggtgtatagatctctgctccgccaatcttatcaggactctgctggctgacaggaacattgttcagctgcacttccgaagaaatccttgcactgccgccctgtatatcaagcagggcgctggaactggcagaagatgccatctgaaaagaagtgccggctctgatatccagactgcctgatgttattttgaagactgacgctgtctgaccggcttcctgctctatcgcacctccgccgatggaaacgccttcgccggatacttcaatctgaacatctcctgcactgtctcccaatgtcaggacctgttcaccgagatccagtgtcagatctgcctcttccagggcaagactctgagaaagggtgactggctgggtcagcacaatcttatcccccttctgcgattcctgaacagcctgctgcagctcaacttcatccgcaacctgatttacaattgaaaccgaatcatagctgatctcaaaagtatactccgggctcttttccccctgttcattgttttccttcagccactgtactttgaaagagtcaagaggacgatcacttccagcttccagccagacaataatccccttggattccagcggtcgcagcggcctgattacatcattatatttgtagtattcatatccatcgggcgccagcagaaccagtggaatccagtagcctggcacaccctctgcaccgatgatttcctttccgtcctcatccttgtcagtcagagtatactcccccagctggctgattacaggtgtgacggtataagatgttcccgaaccttccacagacagcatataactgccatcatggggaatttcatatccgcttgctgcatccagattcaagatcaatttaccataatcaccggtttcactggaagctgcaaaagcgatagcagctgacgaaactgcgatcgttacagccagcagtactgatatccattttttcatttgatatctctcctttttcttttgcagcccgcaaacagccatctgcaattttgtatagttaccgtaattatacccccccggcattttgtcaacattgcagattctgcaggatttccagacgctcctgcacggacgaagttccgttttctgattgactttccgggcaaattgcggtattatattcctgttaacgacaaaacacaatagccaggggcgctgggagatcattcccggctgtgattggcgcgaaacgcagcgccaggtcccttggtgggaaaccacctgaacctgatccggataatgccggcggaggtatgcgcttttgctcctttgggagacaaaacacaaaattctttccgctgcggcagtccgcggcggattttttatttgtcccggaactgtctgcggaatacggccatgcgtgtctgtcggacaaaaatttcaaaggagttgttttaacaatgaacgcaagtctcgcaatccagatcctccccaaggtacagggcgatgaagaagtatgccgtgttgtggatgaagtaatcgcttacatccagtccaccggcctgcactgctttgtaggcccctgtgaaaccgctgtggaaggtgatttcgacaccattatggagatcgccaagcagtgccatctggtggctatcaaggccggcgctcccagtgtcagctcgtatctgaagatcagctaccgtcctgaaggcgaggttctcaccattgacaagaagacatccaagtatcaccagtaagctggcaccggctgtcctcattgccgtattgctggcagtctggcagctctgttccgatctgggagtggtgcccaaattcatgctgccctctcccacggatgtagtaaccgcctttgtggaggatttccctgcccttatgacccatgcccgggtctcgctctctgaggccttcctgggtctgggcaccgctgtgatcctctcctttgtggtagccttcctcatggatcagttccgggtggtacgggaagccgtctatcccctgctgatcctcacccagactgtccccactgtggcaatcgcgccgctgctggtactctggctgggctatggaatcctgcccaaggtggtactcattgtcatcacctgcttcttccccatgaccatcggtctgctcagcggctttgcctccgctgaccccgactttatccacatgatgcgggctatgggcgcttcgaactggcagattttccgctatgtgaagctcccctcctccgcggaacagttcttctcgggactgcgcatctccgcctcctattcggtggtgggcgctgtcatctcggaatggctgggcggctttgaaggcctgggcgtctatatgatgcgggtgaaaaaatcctatgcctttgacaaaatgttcgctgtgatcttcctgatctcgatcatcagcctgatccttatcaaggcggtggacctgctcaagaaaaagtccatgccctggaccctgatccactccggcgaacactgatcctcacaatcaaggagatagattatcatgaaaaaaagactgcttgccctgatgctggcagctgccgcagctctgtcgctgtccggctgctcgggtcaggagaataattcctccactgctgaaaacagcggcagtgaagaactcaccaaggtgtccatcgttctggactggacccccaacaccaaccacaccggcctgtatgtggcccagaagatgggttactatgaggaagccggtctggaggtggagatcctgccggctcccgagggcggttcctcggcactggttgccgctggcggcgccgacttcggcatcgacgcacaggataccctggctcctgccttcgtaggtgaggatgccctgcctgtaaccgcggttgcagccctgatccagcacaatacctccggtatcatctcgctggcttcggacaacatccagtcccccaaggatctggaaggcaagacctatgccacctgggaaaaccctgtggaacaggctgtcatcaagagcctgatggaggctgacggcggtgacttctccaagctgaacctggttcccagcacagtttcggatgtcatcaccgcactcaacaccaacattgacaccgtgtggattttctatgcgtgggatggcgttgccactgagctcaagggctatgacaccaacttcatggactttgccaagctcaacaccacctttgactactacacccccatcatcattgccaacaatgatttcctggctgagaaccctgacacagccaaggcattcctggctgccacagccaagggctatgagtatgccatcgagaaccccgacgctgccgcagacattctgctggaagctgctccggagctcgatcctgagattgtcaaggcttcccaggagtggctggcagaccagtacattgctgacgctgaaaagtggggctatatcgatccggcccgctgggatggcttctatacctggctgaccgaaaacaacctggtggatggcgaactccctgccggcaccggttactccaatgactatctggcataaaggcggaacactcggatgaaactggaaacccgtgggatcaccaagagctttgacggcacacgcatcattgaggacatcagcatcaccctgggtgaaggggagctggtgtgtctgctgggcgtgagcggcggcggcaaaaccaccctgttcaacatcattgccggcctgtccaaaccggacagcggtcaggtgctgattgacggcgaggatgtcaccggaaagcccggtcatgtgagctatatgctccagaaggatctgctgctgcccttccgcaaggtggcggacaatgtggccctgccgctggagcttgccggtaccgaccgcaaaactgcccgggcagaagccatgcgctactttgaacagttcggccttcaggggactgaggaccgctatccggcccagctttcgggcggtatgcggcagcgggctgccctgctgcgcacctatctgttcggcaagagcgtcgccctgctggatgagcccttctctgccctggacaccattaccaaatcggcgatccaccggtggtacctggatgtgatggaacagatccatctctcgaccctcttcatcacccatgatattgatgaggcgatcctgctctcggatcggatctatagcctgtccgggcgtccgggacatatcaccgatgagatccatatcaatgtacccaa

SEQ ID NO: 3909 - DNA, 5063 bp, Unknown
  16S sequences of unknown bacteria
tatttctgaagggatgtccgctgaggtgcgcgtggtgtcataatcccgagtcacagaacgtcagaccggagctgctttattactccgacaagtgcgtatcctgtctcaggtgtctgccgctctgccggaccggggcacagaccgtgaaggacagaaggcactttctcgatcgtgagaagtgcgtcacctgctttgagtgcgtcgggaccgggtgcgacgctctcgcgcgggtcggtaaaaatatgtctgtcgatgaggtcatggatgaggtgatcaaagacaaggcgttctatgacgcgtccgggggcggaatgacactctccggcggcgagccgctgtggcagggggagtttgccgcggaactgctcggggtggcgaagagagccgggatcaataactgtgtcgagacctgcggattcgtgaagcgcggcacactgaaagatgttctgccgctcgtcgacaccttcctgttcgatatcaagctgaccgacgacgagacgcatcgaaagtatacgggcgtcccattcggtccgatacttgagaatctgcgtttcatcgacagtatgggggcggatatagttctgcgttgtccgataatccccggcgtcaacgacaatccggagcattttgagcgggttgcggagatagcggacgagacacgcggcgtcaccgggatagacatcgagccgtaccatccgctcggagcctcaaagtgcgccggtctcggaaggtcgtacgcgatgaaggacacggaattcccgacgccggaggaatccgacagatgggttgaagagatgtccggaatgtgcaggaagacggtcaggaaagcctgaaattacagacccgcggagctaatcgttccgcgggctgttttatgtcgttgttccgcttcacgcgatcctatgctgtccggtttttcacgaatgtgaaaaaaagcaattttttgccccgaaattgcgtttttatgatatacaaggttcactgaatctgatataatcttatatgtaaacagcgtgtccgacagacgcgcaaaaaaaacagatgctgaaaggaatcacaaaaatgaaaaagatcatctcggcgctcctcaccaccgcggtcgtacttgccgcggcagtacaggtatcggctataacaaagtccgacgaacccatcacgggcggaaacaccgtcttcacacagaaggaattcatgtacacgggagaacctgacgcggcgtctccgtggtcgaacgcattctgcaacgaggattggaccgggtgccgctggacggctgagacaaaggacggcgtcgactgcataaaggtcgttccggtgtccggttcgtctcagaactatatggacttcaactactatcagtggaataacgacaagtactatccgtcgctcgactgctccgagtacaggtacttcaaggtcagatatatgctgaatgacaaggccgcggaaacagcgggaaagtcgaccttctgggcttctcttgattcgccggttctttcccagacgctggcggcggggtcgcttgattacgatatgcccgaggcgaagcctggcgagtggcaggaagtcatagttgatctgtcttctctccagatgggcgattatgtctggaccgattcaaccatccgtcagttcagatactatccgttcggctcgaccccggctgaggatggcgccgagtgctgtatcgagtacatggcgttctttaagaccgagtccgaggctgaatcctacaagggtccgaacgccgtcgctgacacgattgaggctgatcccaccgcttccgccgagaccgctgatatgagcgctgtcgtagttctcgcggcgtccgcttcacttggtctcgcactcgcgctcagaaagaagcactgagcttcacataacgctttttcataaaacagcgccccgtccgtgcgagagcggacggggtgcttttcagttttcttttgatttgactatctttgagtactggtacggcgatattcccattcttcccttgaacgcgtggatgaagtgcgtctcgctcgcgaaaccgcacatataggcgacctgcgcgaccttctgtccgagcgacatcagacgtatagagttcgctatccttatgtcgagtatgtactgccgcagcgtcatgctcatcaccgatttgaagtcgttttcgagcttacgggtggacacgagaaactgcttcgcgatgctgtcagacgtgagacgctccccgaagtgatcggtgacgtagttcgcggcgtcatgaatgtagcggtacttttcatctatcgcctctgtgatcgatttgccgatgtttctcttcgtgatctcaagcaggcacgcgagcagcagtctgcgctgagtctccctctccggtgcctcgtcgaacgcgccgagtatcgagaacacctcgtcgtacagcctgtcctcaagcgggatgagcgttatatctctcaggtagaggtcgttcacgtcgacgaactgagaaaagctctccgcgaccgactttgcgaaatgaaagacgaagatgtcataattatcggtcggacgatcgatgttcacgtgacaggaatacggcttatagagcaggaggcatggtccgcggtgatctatgcgcgttccgttcgcgataagcgtcatgtcgccgctctttatcacgtcgagctcgtagtgattgtgaaagtgaaattcttttgagccttcccagtgcgttgtcctgtgaaacgcgaacatcggagcggaaaaatcgtggaatatcgtattcatgcggctgcctccgtaagacggctggtctttcagttcttctcgttatagtacgtattaacgcggttgtcgatgatctttatcacctcttcaagactcatgccctcgcggtttcggtagacgtcgagctcttccatgatgacagagatgatcttcttctcgagcggcgtcacgggtctcgcgttctgtatgtcgccgcgcagtccggcgagcttttcgtcggtcaggtgatattcgtaatatccttcgccgacatatctttccgcggtctcggggtcgagaggcttgttcgctcttgacagtccgtacttgccgtaatacagccagcgcgggaggaaagagaggtatttgtcgagcgagctcttcgtaactgtcgcggacagagagttgttcctcagaatgtatttgtcgtcgatgcgcgaccggatgaaaccgaacgccgcgtccggatcggacgagtcctttgagaccgcgataatcagcttcggcgtgagtatcgttccgccgccgtcatgtgtcgggtaaccgacggatataaggtcgtcgattccgtaattcgccgcgcacttcgcgtagatgccggcgtccggggctctggaaataagcagcgtctcgccattcgcgagcgccgcgaaaatgttgtcttctgtcatcttgtcagagtgataaccatcgccgaaccgtttatagtcctccgcgaaacggcggaacaggtcgttgccgaaatccgtctttccggtatcgtagtcgatgaactcatcgagtgaaagcgacagcatctttgaaaagctcatgaagggcataaggcactcgtcctcgccgaggttttcgagcttgtcaagcattgtcccgagagtcatttcgttcgggaagtcagcggcgcggccgtaaagggttgatgtcgcggtctcgagcggcaggtaatatatcctgtcacgaccggacatctccttcacgctgtcgaggatgtttccgctgtcgtatccgcttctctccatcagcggcgtcaggtcggtgaagaagcctttttcggagtagttcgtgatgtccgcgccggtatccgcgtctatcaggaggatatcggcgagctttccggacagggcgtcacgctcaaactccgtaaccgccgatgagaaatcggtgtcgctttcggactcataacgctttatctcaatacggatatcgtcatgcgcgcggttgaactcacagacggcataggtcgtgaagttatcggcgcggccgacgacggcgatggtcaggagcttccgctcctttatctcattcatcgggatctcatcgagacgccagagactgtacgcaaagtcgaggctgtccctgacgacggcgtaaatgtggtcatcaccgaccgccgccgagactatctgcccgggaatatccgccgagagaaggtcgcacacgacgctttcctcgtattttccgtcggcgttctttgtccagccgtggattgccgtgccggttatcccgccgaaatcgtatccggggacaggtatcacctttatgtttctgagaccggagatattgttctttttcatctctccggagacaaaatccacgtcatatacgccgtttccgtcgaaaacccggagattgccgccggtcaggatagctccggttattcggaccgatgaatcgacgcgcttaatatctctgtttctgtcgatacgcaccgctccggtgtttgagacgatatagagttcaccgtcgctctcagcagcgaagacaatcccgaaaaagccctcaccggaagcgaggctgcctgttatgccggtcacaccggcgccgaacagttcctcgcagtcgtattcggagatggtttttccttttgcgtcggttctgagcagccttactttttctaccttgtcatcagatatcaggctcccgacggtcagatatccgtcttcgagagaaaatttgcctgactcgcggtagccgtcgtcgacgcttcccatgacgccgctgtcggacagaacctcgcctgtcgcggcgtcgagagtgaggacggagtcagtataatcgtagtccccgacaaaccatccgccgacccgcaggattccgccggacagcgaaatcgggtcgtgcccgacctcgaagctgtccgggagggcgacctctgtgccgcggaagcgtccggagctttcacgctccggttccgggttctcaccccggcaggatacaagcggaaatatgaggcaggcggcgagaaacacggaagctgtgcgtttcttcatgggggcaatctcccatatctgccaacttaagaaatttgcaaaaaaataatccataagcgcaaaaat

SEQ ID NO: 3910 - DNA, 32759 bp, Unknown
  16S sequences of unknown bacteria
gcgtggcgggcttcggactgcggtagcccttcgggctgtcctcgtcctcggtgcttcgcacccttaagctggtttgcggggaagtgctgcggcacaagggttaggggcgctgcccctataaccccggcaggaggcagtgcctcctgcacctccacttttttcagcaatctgtggcgacatgtacgccgtcttttccgtgcggtatggttctatgtttccgttcggcttaccattcggtcagtacgccgaagtgatcggagatcaccgggtagaaggttccattgaaaatgacccggctgctgcggggcgcgggcatctcccggcagaacacgaagtcgatgcgcatcgcgtccaccttaccctcacgccagccgtcgatgtttccgcccacggtgatgccttcatccttggtttccgccatcacgtaagcgtcctgccagccgctgccggtaatcaggctgtagccctcgccggtcagatgagccgggctgttgaaatcgcccaccagacaaccgcgtcccgtgccctcgcagtgagcgttcagcttgttccattgtcccgcaaagggatcctcttcatccttccaccagcccatgtggacgctgcggaaccagacgggaccgtccgccagctgcacctgcaggccggggatcacccggcggcagtggcccgccggggtggaaacgcacacattatccgcctgaaggacggggaggcggctgagcaccgcctccccctcttccagatgacgataggccggatgggcaaagccccacgtccaggaaaattcgcggcccttctgcttcaatagctttgccgccgacagcgcgtagttatccgtgcggatcttcgcttcgctgtcgcagggaacgtaaccgtcggccttcagcgcgtccggctccgcatagggggcttcgacggtctgattgacctcctgcatcacgaccacatccacatcttcccggatgatcgcgtccgtcagattttccagacagaaggtattgtcccattccagaaggctgtgcgcgttcagcgtcagtaccttcagcttatcctttaacggcgccactggtcagacctcccataatctgcttttgcatgataatgtagaaaataacgatgggcaggcaggtcagcatcaggcatgcaaaggacaggttgtaatcgacgctgagctcggactggaagttattcaaatagatggtcagcgtccacagtttgctggaacggttcagggtgatcaacggcatctggaagtcgttccagatggccaggccttcgcggatcagcacagtggacagaatgggcgtcatcagcggcaggatcacgcgggtgtagacctggaaggtggaagcgccgtcgatgtaggcggcttcttcaatgctgtcgctgacggtggccagatagcccacgtacaggaacatactttcgcaggtagcgtgagcaacgtacagaagcgtaatgcccagcgggctcagcaggcccagccagcccatcagcttgaccacaggcatcatacgcacctgccagggcagaaagatgcccagcaggaagaaaaagtacaggcccttgaaaaagcggttctgcttcatgccgcgggacagcgcaaagcccatcggcggcaggatcagcatttcgccaagcagggagaccacggtaatgagaatggtgttgccgtaggcatagtacagcttttcatcctgcaaaacggtggcgtagttgcccagatacagcgatgtgggcagcgtgaagaagcttacggcgctctccgcgggggtcttgaacgttgtggtgatggtgatatacatcgggaacaggatcagcaacgcacccagcgtcaggatcaaatagaggaaaaacttgccttttttggtcgtgcgcacttaatccaccttcttcctgttggatgcctgaatctggatcgcggagatcagggcgataatcacacccgtggcaatggcctgagcaatcgaatagctgtagcggttgcgctcgaagccgttgttatagatcaaaagggcgatggtctgggtcgcggtgcccgggccgccggcagtcatggacttgacgtagtcgaacaccatcaggccctgcttgaccagcagcaccagcaccacgctcagggtggggatcaggtaggccacggtgatgtgcttgaactgctgccagccgttggcgccgtcgatagcggccgcctcatacagctccgtggggatggtctgcagaccggccaggaacagaagggtgggaagggcgacgccctgccacagatggacgaacagaacgccgtagatcgcgttctgcttgcttgccagaatgttggtggacagcgcctcgatgcccagcgccttgccgatggcgggcagcacatagaagaacacctgtttgaacaccaggctgacggtgatcatgctcagcacggcgggcaggaagtacagcgtgcggaagaaggagcggcccttgaactccttgttcaggagcagcgccagaaccacgctgatgacgacgacgccgacgatcagcatgatgctatagcggaagttgaacagaagcgcctcgccgaatttcttatcggtgaacagttttgcatagttggcaaagccgatgaagttatagctcttgctgatgccgttccagtccatgaagctgtaataaatgcccatcaggatgggaaaaatcaagaaaacgcagtacgcgataaaacccggcaggcagaaaaggccataggttgtgatgcgctcgcgggtcatggcggaatgcgtctttttctttgacttttgcgctgacatgcggtttccacctcactctttcaagtatgaaaaggggacagggctgatggcccttgcggcgcagccctgcccccgaaaaatcgtttcaggcttagttgttgtaatactcgtcgatcacttcagccgcgccctcgtagaaagcgtccacatcctgatcgatctccagctcggtggccacgttgcccagagccttgcggaatccgctgggccagatggcgttctggctcaggcagatcttgccctcggccatcgcttcgctgatgacggacagttcgggagtgctcacggtcacaccgttgatgacgctggggctgccttccttatcggcatagacctgagccacttcgggctgagccaggtactcgaagaacttcaggcattcttcgggatgcttggtggaagaagagatgcagaagttggtgtcgatggacacgaccactttgctttcctcaccggtggggttgggcatggggatcagagcgaccttgatgtcaggatcgtaatccttcagggtggccagagaccagccgccgttgatggtcatcgcggcctggccggcgatcagctgctgatagctttcggtgtactcggcgcccagagattcgggggtcatgtagttgacgatctgcagagaagcgttggcgtagttctgcagcagcttggagtccttggcttccagttcgccggcggcgatctgcttgaactcggtgtcgtcttcggacatgaagctcatcatacgttccatgcgctgatagaccatggtcttgtcaggcagagcgaagggggtgatgccggcggcagtcagcttctcgcagacgtccatcagttcgtcccaagtggtgggcagagccagaccctgttcttcgaagatatcggtgcggacatacaggccgtagcagctcagggagtagggcagacgccagttcttgccgttgtaggtggacatttccaggctggagggctccacgctgctcaggaactcctggccggtcagatccatgatgatgccgtcttcgaacatcagctcgaacatgttgccggtggtgcagccgaacatatcgggcatttcgttcagctgagcgcggctctgcagcacggtggcggtgtcagggacctgcacaaagttgaccttgatgccggggttggcggcgttgaagttgttgatgacggtctccatcgcgtcgatggcgttggcctcggtcttgtggtaaacgaactccagctccaccacgtcttcggcggcggcgaaggagcacagggacagcagcatcatagctgcgaggaccatggaaagaaccttcttcatcgaagggcacctcctgtgtttttttgtatgaatttattataatctggtaaaaaacatatagaaatagcacaaactcatatttctatgcaaaacttcagattgtgaaaatttgttttccctggcgttttttgtccatacgttgacatcctcctgaaaaaaatgatagaatttctgagatttggtgaacctgcccggacggcgcgccgtccggccgagccaacgagataatatattatcaaggaaggaaaagccattgcagcgaatcgtatcccgtctgcgaaccacctccatcaagcgaaggctgtggtcgctgatgctgctgctctccctgatggtggctatgctgggagggtttatcgtctacagttcgctcaatgcggctgccgggcagctgcgccagagcggccagcagctcctgtactccgccgtcacccagatggaggagatcgtcagcgaagcggtcagcctgactcaataccctgtcattgccagcacctatagttcgaccgagatctacaactatctggccaccagccccaagggcatctattcgccgctgtataccgcccttcaggaggagctgttcagtgaaatggtgctccattcccggttcgatctgctgggggtctccgacctgaacgggctgatgctttactgcgacaccaccggcatggcctacaaaagaaccaactgcagctttatcagcgagggttttcaggatgcgctggcaagaaagggcgcggcccgaatctttactgcggaggaggcccggggcctgtttcccggcctgtcccttccggagtcctcgctgtactgcgcccgggccatcatgcagctgtacccgctttccgccgtgggcgtgatcttctgccgggggcagctgacaaacatcaccgaagttttcgatgccaaccggctgttcgatacccagcagctttccatcctttccgacgaaggcgcgctatactacggaagcgacccggggctttccaccgaggagttgtcctccctgccggtcaatcagctgatcggccgcatggactgggcagaccaaaccgtctggcaaatttttcgactggccgacgggtatgttgcctgtctcagcaccccctttggcagtctgtaccctcatctcaagctccagatggtgctgacgatcctgctgccgctggtcatcgccgcggtgctgttctttgcgcggatggtcacgctcagcatccagcagcccatcgacaagctggcggaggtatgcggccgcattttctacgaggacttttccccggtagaggacgcgggcgcctgtgacgaaatgcaccgactgatcgaagccttcaacgtgatggccaatcacattcaaaccctgatcgaggaggtctacaagcgcaacctgacgctggcccagacggaaatgctgctggtgcgctcccagatcaacccccctttcgtgtacaacacgctggaaacgatccgcgccgaggcctacctccacgagcaatacgccatcgccgatatgacgaccctgctgggcaagaccctgcgttacggcatttcccgtcagggtgactgcgtcaccgtggaaacggagctggcccatctgcaggactatatcaccctgcagcagatgcggctgggcaagaagctgcacgtcctcatcaacgtgcccgaggagctgcacgagtgctacatgatccgtctggccctgcagccgctggtggagaacgccattcaccacggtctgcccgccggagaggaaacgggtctgatccgcgtgctgggctatcaggaggacggcgacctgttcttctccgtcagcgacaacggggacggcattgccccggaggagctggcccatctgcaggattatatcgcaggctccaacagcgactacacgtccatcggcctacggaacacccattgccgtctggaactcttttttggaaaaccctatggtctttccatacgctccgtccccggaaggggtaccagcgtgaccctgcgcatgccgttgatgcataaacccttcgcctgagaaaaggaagagagcaccatgatacccctattgatcgttgacgacgaatccatcatccgggaaaccattgccgccatgctgcggtgcaaatacccagaccagttccatattttccttgcctccaacggccaggaggccctttccctcgtagcttccgaaaacgtggagctggtgctggcggacatcaaaatgcccgtcatgaacgggctggagctgctgcatcgtctgcacgagcagcagctccaatgcgacgtgatcttcatcagcggcttcgacgattattccttcgtccgggaagccatgaagtccggtgcggtggactacctgctcaagcccattgcggaaaacgagctatacgctcagatcgacagcttcctcaagcgcgccgccctgcgggtgcccatccataccgctagggtacgcccggaggaaaacgtctatttgcagcaatatgtgctggacaagctgtttgacagcaacgggatcgttcccgacggcgtgctggcggagctgcacctgacgccctcctcccccgccgcgctgctggctgcgccggtagtttccagcgaagccgacctgcaatggttccagcaggtgcatgaagccattcagccgcttttgcagacgggctgcgccctgtttcagggccggaagcggcagatgtgcctgagcctgtgtatctttcccgatcagtcccagtatactgccatgggcggtctgctgccggggaactccgcgcaggttttttcccccatgtttcttctgccctacgcgccggagcagctttctgtatgccaaacgctgctggaacgccgcttcttcgacctgcccggtgaggacggcccggagacctatccctattccacgctgatctccgatctgacggacgcgatctgccgcctgcaggtcgaaagctaccatcagacgctgctgcttctgctgcgccgggcctgcgcccagtatcccccggtggattcccttcgtcagcttctctgcggcatgatctacgccaccctgcagggaaactcttccttcgtggcggtgttcagccagatggagctgacggcggacgacatcatccgcgccattcagcagacccattccgccgaaacgctctaccgcagcatgacccgcatcatcgacctgcagatcagccgcattcagggacagatcaccaccagcgacgagacccacgtcaagcgcgcctgcgaatacattcaggcccattttgccgaggatttcaccctgaccgatctggccgggtatctggagctccatcccaactacgtcagcaccattttccgcaaggtctgcggcacgtccttcagccgttaccgcaagcatctgcgcatggaggaagcctgccgcctgatccgggagaccaacgacaagttctacctcatcggcagcaaggtgggctacccggacgcagtcagctttgcccgggtctttaaggaagaaatgggctgcacccccagcgaataccgttccatgcacgcctccggcgaggaatcgtgagacggacgttttcgaaaacactccctattcgcaaacaagcgtccccgaagccgctcggctgggcttcgggacgcgctgtacttcagccgctgctttcgtccaaaaacgggatcaggcccttctcaatcccgaaaagcgctggttctgcatttatgatttttcaagcgaactgacagccattcccatcattcaaaacgcctctttctgcaaacaatgctttcgtgcaatgcaaagcggaaagaggcgtttgaaccatgagaggacccaaaagagcaggacgaaaaaaacggctgacggggtggctgctatgcgccttttggctgctgggcttttattctccccaggcggaagcgctgcggcatctgccggagcgtttggtcatcgcttccgggcaggaaacggcggcggagcttccctttcccctgcggctgacggcggacgagccggacgtgcaggcgctttccgccaccggcgacacgctggacggtggctcggagaccagggccaccgtcagtttgctggggcttctgcccctgcgtcaggtcacggtagagattcgggacaatctgcgcctgtacccgggcgggcaggccgtgggcgtggccttgcagacggagggtgtactggtggtgggcaccagcgacctgaccggcgctttcagcccggcgcggctggcagggctgaaagccggggacgtgatcacccaggtcaacggcaagcccctgcacagcatcgaggaactgacggcgctggtcaacgagggcggcagccgggccatgcccctcaccatccgccggggcagcggcgagcttcgtctgacgctggaaccccggcaggacggagctaccggcagctaccgtatcggcgcatgggtgcgggattctaccgccggggtcggcacgctctccttttacggacaggtcgaggaaaacggcccgctgcgctacggcgcgttggggcacgccatcaccgacgcggatacccagcagattttgaccctttcccggggcgaattgatggaagcggatgtggtggacgtgcgcaaggggcaggccggcgttccgggcgaattgaagggcagttttctccgagagcaccgggtgctgggcaatatccgcctgaacaatcagttcggcatttacggccggctggacagtgcgcccgcccatcctctctacccggatgggctccccattggccgcaaggacgccgtccacaccggccccgcctccattctctgcacggtggacggcgcctccatgcaggaatacgccattgagatcgtcgaagtggcccgccagtcctcccccgcccagcgcagtatggtgctgcgggtcacggacgagcgtctgctgcaaaagaccggcggcatcgtgcagggcatgtccggcagtcccattctgcaggacggtcggctcataggggctgtgacgcatgtattcgtcaatgaccctaccatgggctacgggctttttatcgaatggatgctgcagcaggagtaaacgagatcgaataaccacgcgaaaatgccctttcttcggagcaaagcgtttccgaagaaagggcgtttctttattccatcgtccgcccggacgaaagctttttccattcgccgggggtcatgccggtataggccttgaagcatttgatgaagtgggaaatgttgaaatatcctacccggcccgcagtttccgcaatggaaaggccttcctcccgaaggaaatcctgcgcggcggacatccgcagatgcagcagatattccttgaaagtcatgtccacctccatgcgccgcagccgggacacctgcttggtggaaatacccagcgcctccgccgtggaggacaggctgatgtccccgtccagacaatgttcccgcacataagcggcggtcttgccgccctcaggcttctcggcagacgaacgctgcgcccctttgcggcacagggcacgcaccagctgttccaacgtttcccgtacgctgtccgggtcctgccccggagacttgggcggaagggtcacgccttcccgggaggccagcgtcatcatctgctgcaccagacggttgagcatataaatgcgcatcagataggacggataacggttttccgtctgggcgatcatggtctccagcagggccagcgcctgcgatgtgcttccgctttccgtcagcgccgccatctgctccagcgcgtcttcttcctcggcttcggcgttgtccaccgccagcgccaccggcggcgtgttcagcgtttcgatggctgcggaggcgatctcgttcagctggctgcaggtgcggctccactgcacccgcaccgacaaattccggctttccagactgtcggacaaaagttccagcagctcccggcactgttcttcctcctgaaagttcatcagcacgatatactcgcggttttcctgcaattccgccgcgtacagggtgcattcctcgtcggagaaatcctcaatgctgcgcaccagtcctgttcgggcgccctcgtcgccctgcagatacaggaagcacagggcaaaatgggcgtgactcatttcgaagcccattttctggatcagttccttgaccaccgggctgtcgttgccggtgatgagcataatcaccagctgctgcttcagccacgattgctgcaagtccagctgttccatctgttcctcgatctgcttttgggaaaagctgtttcgtttcagggagttactcagcaagtcttccagcgtctgcagttcgttgctgggcttctggctgccgccgtacttggcgtacagcttgcggataggctgatagctcctccacgccgcgtacacggcgatggccgtgcccagcagcaccgccagcaccacgatccagatcatcaaccgttcgaacgaacccagccgttccagcccggcgatgctgggttcctcgatcactacccgggctttttccttcgtgccctgtccggaaagggtgcgttccgccgtcagggtggacagcaccgtctgcccttcatattccagcgcaaacccgctgtcagagggctggccggtcatttgccagatggtctgccggagctgggccagcttgaccagaaaaatcagcgtacagcggcccgtggggatccgtgccgtgccgaaataaaacggcagggcgatcatcagcgtgtccgagcgggtctcaggcacctggaacagcatttttccggcctccggcagcgcttccgtcattcgttccgccgacatgcctttcatcacccgctgaaaaaagatacgctccgaataggtgctgcgggtgccgaacaccttgccgtcgtcctgataccagaggtaatattcctcgatccacggcgaaaagccggcataccgggagaaagcgtccagcaattcaaattcgttggtcttctgccggttgagataaaagggctgaaacggcaaccgggttttcacgtccagccggatgtcttccattgtcgaaagctgccgctcgatataatcggcattctgggccagacgggcctgatagacctccgtctccgcctgccggagctggcccgaagccactcgcaccagcgcaaggcccagcgccatgcatacggccagcaccaccgaaagataggacagcacatatcgtttgaacacccggctgcggatcggcatcaggattctcccttccagtttcggcaaatgggccgtgaaaagcaaagtaaatcagaaatggaaaaaagaaacgtcccccaaaacgcccaaaagccttcagcccgaaaccgggctgaaggtgcagggaaccgttcctccgccgctttcagattatccaaaagcggcggagtttgtcaatatttatttctgagcggacaggtagttttcataagcggtggtgtagtagcccagcagttcctccacgcccatgcccttgagttcttcctggaacttggggaactcgtcggtgctgcgcgcgccggtgatgaacttcgccacttcggactcgatgtagggatccagaatggtatgcagctcgtcgatggccagcgtggtctcctcatcgtagtacacgatcatggggaaggactcggtgcggtagggctccacgttgttgcggacgttgagcaggtgcgcgccagagccgaagttgggatcgtaggcgtagggcaggatgttgtccttattgtagtagtaggagcgcatttcgggacggttggtcacgcccgcgtcaaaggcttccttgttctgcaggggatgagaacggttgccgaagccgtgagacatgttgccagcgtctccttccatgaaggcctggctgtcggtcttgttgccttccgcatccagccacacataggcgttatcctcggtgaccatgtagccgccgatcaggcccatggtgtcggagctgttggcagcggggccgcaccacaggtacatgcccagcaggtcggtgtagaacgcgtccagatacttcatgataggcacgatcttgctttcttccacatctgcctttagggacacgtgaccgtacttaaacttgttcagcgcgcccgccttggcagtgtcgttccactggctagtcaggggagaagcgtccacccacttggtgaagtcttccttctccggcagggccagatacgccagaccggcataggtgcccacggcgtcctccgccagctgggcgaaagccgtggtctggtcgatggtgaagaagtcgctggacatcagaccgtcggtgtagtactggttcatcagcttcagaaattccacgaaggtgtcgtcataggcggggatgacggccttgccttcccgcacggcgggataagcgccggtggaattgaccatggtatccggccacaaatagccgaaggcgttcagaatgtagttgcagggatcgcggtcgccggccttttcgccgttctttcgcgcggagcccagcgcataaccgtcgggatgcagttccttgaacttgtacagcatggcggtgaattcgtccagcgtcttgggcatttccagaccggcttcctccagccattccgtgttgaactgcatggcattggggccgtcgccctgaatgtaaaagtcagagtaaccgggcagggtgtagatcttgccgtcgggggtggtgcagtaggcgatggattcgggataggcttcgatccacttgcacaggttgggcatgatctccggggtgatgtagggggtcagatccagcagcatgccttcgcccatgccgtagcgaaccagctcggaggtgtccagattgatgccgaaaagcagatcgggcagatcgccggaagcaaacatcaggctcttgcgctcgttcacggcagtggacaggatctgatccacttcaaagtcgatgccggaataagtttcggaccagatccagaaccactgctggtcgggatccttaccgtactgttcgctgcgcttggtcgcaacgctgacggtcagtttttcgccgtccttgacaatgggccagtccacatagtcggtatggtcgttgtaagcggccagcgcgctgacggagctgagcaccagcaccagcgccaggaggaaagaaaccagtttcttcatggtggatatctccttttccatttttttatttttaagagaagagtcccttctcttatttcgagggtcagcccttcaccgcgcctaccatcatgccggcgacgaagtacttctgcacaaagggataggcgatcagcagcggcgcggaggaaaccacgatcagggcgtacttcatggcctcggccatataggccagccgggcggcgttcttgatggcctcggtatccatggccgaggtatcgatcttctgcatggctgtctggctgttaagcaggatggagcgcagcaccatctgcaggggcaggtagtcgttcttggtggtgtagatcagggcgttgaagtagtcgttccaccgggccacggcgaagaacaggatcatcaccgccagaatgggcttgaccagcggcagtgcaatacggaagaacgttttcagctcgctggccccgtcgatccgggcggattcgtacagttcctccggcacgttggactggaagtaggcccgggtcacgatcatgttgtacacgctggaggccgcgatgaagatcagcgaataccacgtattcaccatgccgatcttcttcatcaccagataggtggggatcaggccgccgttgaagtacatgggaatgaggaaaaacacgttgatgagccgccgccccggcaggcttttcttgctgagggcgtaggcgctggggatggtcaggatcaggctgaaaaaggtacccgtcagagtgtagaagatggtgttgcgataccccagccacacccggttttccttaaacacattcaggtaggactccgccgtgaagcccttaggccagaggaacacgttgcccttggccacctcgtaggcgtcggacacggaggcgatcagcacaaaatacagggggtaaagcgtgatgaccagcacaatggccatcaggatcacattcagggtgtcgaaaagcttgtccgcccgggtacggcgaatgatcgtgggtttcatatacgtcctccttcctttcttaccacagagacacgtcggagagacgcttgcagatggtattgacgatcagcagcatcaccacgttgaccaccgtattgaacaggccgatggcggtggagtagctgtactgtccgcccagcagacccagctcgtaagtgtaggtggaaatgacctgcgatacgtccagattcagggagttctgcagaaggtagatcttttcgaatcccacggacagaatgcggccgcagctcatgatgagcatgatgaccactgtgggcaggatgcagggaaggttcacgtgccagatgatctgcatccgattcgcgccgtccatgtaggcggcttcgtgcagctccgggctgacgctggacagagtagccagatagatgatggtgccccagcccagatcctgccacacgcccgaccacacgaaaatgtgcggaaagtactgggccgtgcccagaaagtccacccgattgcccccgagcatttcgatcacattattgataaggcccgtggactggttcatgaacagcgtaatcatagagcaaatgactacggtggagataaagtggggcgcgtaggtcaccatctgcaccgttttctggaagcgcttgccccgcagctcgttgatgagcagcgccatgatcacggaaagcgggaacgtcgccagcgtataaagggaaaggaccatcgtattgcggatgatcttccagcactgggggtgattgaaaaacttctgaaaatacttcagccccacccacgtgctgccccagatgcccttggaaacgcggtaatcccggaaggcgatctgcaggcccgccatgggccagtaataaaagatgatgaaatacacgatggcaggaagcagcagcagataaatctgccagtgatccagcatcctgcggcccagactcttatgacgcacctgcagactcggatgagcggcgctgtgtttcatgaacggttcatcctttctcgtttatatttctcatggtaaaccgctttttgtccaaagtaaatgcgcagtttgcgccctgaaataccgtttttgggaaaaaacgttcctgtccaaaagcagctatttttgtccccgccgcggcattgcattcctaaaagccgccgtatataatggatgcagctttgttcctcacaaacggaaagccccggcagctttcaaaggagcctgtgctatgaaactgtatttgcggaattcggacctcacgctacgcaagggcgttcggcagggaacgacccttctccccgaagaacacgagttattattgtcctccgccctgccagagggctggcagcgacaggagaccgccgtcgtgaccctgcaggcggaggccgaccaccaaatcgaaatccatctggaattttgcgtttccgaagaagacgagccgcttctgtcccttcactatcgcattctgcccggatgcagggtgcaggttcccttccccgtggataagcgggcgctgggggcggatatggcgttcctgccgccgtggccgggcgtgttcaagggcgggctgaacggccgtcccattcaggccggagaagtgaagttcttccggctgtttctgcgggagccgtccctgcgttccgccgcacttacgtccgtagaatttgtgtccggctggcagccgcaggacgtagaaggccgtccgctggtggacgcgctggggcagcgggccgagggcgcctggcccggaaagacgggcagtctggaagaactggacgcttatctgaaaaaagaactggaatgggccaagacccacaaccattatcccgaaggctggtcccggtacggcggctggctgaacaagtgctttgaccagaccggctggttccacaccgtccatgacgggcggcgctggtggctggttgacccggacgggtatgccttcttctctaatggcatgtgctacggcaaccgtaccggcatttacggcatggccgaccatctggacagtctgcaccagtggctgccgcccaaggaagggcttttcgcccgggcgtggaccaccggcgatcagattccccagtacgtggtccgcaacggccttgagaacgccaaaacccgggaactggtcaactttccccgggccaatatgatgcgggtcttcggcgaaggctggctggacgcgtggatcaccctcaacaccgcccggatgcgctcctggggcgtaaatacgctgggcgtgggcgtaaacgactacggcgacgaacccacggcggaattcctccgcaaggcccaaatgccctacgtcatcaccttcaaattttttccgctgacggacgagcgcatcttccgggatttccccgacgtgttcagcccggactacgagcgactcaccgccgagatggcccggcgggaactgcgcgcctatcgggacgatccgctgctgatcggctacttcgtcaccaacgagccggaatggctgatgcacgacaacgtcaatctggcggagcggctgctggctgcggacggctgccgcgcctccaagcaggcctttgccgaccatctgaaaaaacgctacggcacggtagaagccctgaacgtcgcttgggagacagacttgtcctcctttgacgatctgctttcgcccctccgccgggacagctggtcggaagccgcccaaaaggacttcgaagttttccacaatgtactggtggaacgctatggccgcgtcatcagcgacgcgctgcggtcggaggatcctcatcatctgaatctgggaatgcgttacagccacgcctccgaaaagaccctctgcggcccgctgaactacttcgatgtgttttccttcaactgctacggttccgaacccgccaccgccgccgcgcaaatggccaaaggcgcgaacctgcccatggtcgtgggcgaatggcatatcggcgccaaagaaagcggactggattcctggggtctgtaccatacgggcacgcagtcccagcgggccgaggcgctgcggtattatctggagcagagcacgcaggaaccccacctgaccggcgttcactatttcgaatacagcgaccagccctatctgggccgcttcgacggcgaatgctaccagatcggcctgatcgacgtatgcaaccgtccctatccgttggcggcggaggctttccggcgctttgcggaacggatgtacccgctgctggacgggcaggagcagcccgaagcccggccggttcccctgcaaaacctgtggcagaccgtcaattaaaagaagaacgtttctcttgagcgaatgaaaacttcacaaggagggttcccccatgcgtattcactttgacgaagctcaccggctctttcaccttcggacttctgaaatgtcctacgccttcggtattgctgccgatggacggctgcgccacctgtactgggggccgtcactgagcagcgatgattctctgctgccgctggccgagacaatgctggcggcctacgagccctccaagggcgtggacgcgcgcaaagacggcgtggccgagctgcccaccatggagcccagcgattacggcgacccggtgctgtgggcgcgccacccggacggcacccggggtctgcggcttttgtacgacagccatttgatcgacggcgaccacctgaccgtcgtcgcccgggacgcggcctatgccgtcacggtggagctgcattaccggggctgggccgatctgccgctgctgaccaaatggctggtcatccgcaacggcgaggagggcgcgctggagctggaacagatgaagagcgccgcgtggcagctgccctttggttgggactatcggctgacccatctgagcggcaactggggctgcgagtacaccaaaaatcagctgatgctgacccaggcccgcaccgtgctgcaaaacaaccgcatcacctgcgccgccgctcagcagatccccttctttgcgctggatcaggacggcgcggccaccgaaacaacggggcaggtgttcttcggcgtgctccattggagcggcaatttcgatatcaccgtggagcggcagttcggcaaaatggtcactgtcaccggcggcgtgaacagtttcgacaccaagtaccttttgaagccgggtgagtgctttgaaacgccccagttcaccggaggcttctcgaaccggggcttcgagcgcatgagcgaggtcttctacgactggcagttcgaccacctgatgccccggggcaataagaccgacaaggcccacgccgtgcggcccgtcatctacaattcgtggtatccctatgcctttgacgtgcgggaggacaactgtctggcgctgatcgacaagtgtgcgccgctgggcgtggagctgttcgtcatcgacgacggctggatgcccaagcgtaccgacgacaaggccggtctgggcgactggtttgccgacccggagcgttttccccacgggctgcaggctatctccaaggcctgtcacgacaaggggatgctcttcggactgtgggtggagccggaaatggtcaacccggacagcgacctgtatcgggcgcaccccgactgggtcattcacgaccctgcccggccccgcatccagcagcgacatcagctggtgctgaatctggcccgggacgagattcgggactgggccattgcatggctggatgatctgatcgacacctgccagctggactacctcaagtgggacatgaaccgctacgtcaccgagaccggctggccggacgcaccctacgaggagcagcaaagcctgtccgtccgctacacgaaaaacctgctggccatctggcagcacctggacgaaaagcaccccgatgtgctgtttgaaaactgcgccagcggcggcgggcgttccgatttcggcatggtgccctacgccgaccgcatcaaccgcagcgacaatgccgacccggtggacgtaatggtactgcacgagggtttctccatgctgttcgtgcccaaaaccgccggcggcgcgggcaacattgccccggcccggcaccacatccacgagcgccccacgccgctttccttccgcattcactggggcatgaccggctccatgagcatcggcatcaacctgctgaccgccccgcaggaggaactgaacgagctgaaaaaagccatcgccgagttcaagcgtctccggggcgacctgcaggacgcttacgtgtaccgcattgcctcggccacgcagcatccctacgccctgttccagtatgtgcgccgggatcggaaggccttcaccctgttctccttcgcccacggaatgcgctgctgggatctgcccatgccccggttccgtatgcggggcctgctccccgacgcggtctacgtctgcgaggatggccgccgcatgaccggcgaggcgctgatgaacatcggcgtggaggtatcgctgaaaggcgactgcgacagccggatggatgtgtggagaatggagccgcaggactaaaggacaaaatcaaaaagctgccgcactttgctttttccagcagagcgcggcaattttcatttgcggagaatgtaaaacggccgttgacccaaaggtcaacggccagaatagagctttcgatttttttcgcgggtcgtcagctgttccagcgatcataggccgcctgacggacttccaccagcgtgtccagatccatcatgttcagctgctccagatagctgttccaggtctcatcggtgatttccacttcgccggtgatgaagcgggccaccatctgatccacatagctgtccatcagcacgtagggagccagaatgtcctgttcatcctcggtaaaggtcgccatctggggatagcccatacggcgggcagccagcataccgctctcgttcacgatttccgtcaaatggttgttatctgcggagccgccgatgataacggcagcatgagcgccggtgtagaagaagggcatgttcatcaggccgttcttgacgcggaactgatagtagctgtcctgatacttctcatggtcgtagatcagctcgtaagaaacggtgccgtcttcattctcgtgacggacgtagccgccgtcgatcatgtcgccccaagcaccgtattccgggccgcacttgatgaggaaggtgccttcctggctgtagaagtagtccagcagcttgatggcggcaatggccttttcctcgctgcacttatcggtgatgaccataccgaacttgtccacttcctgcgcacggccgggatggacgggcgtttcgttgtattcgctggtcatgggcttcagggacgtggtcttgaggtattcgtccagaccgatgatcgccgcgccggagttgggcatcacgccgatcacgccggtggacatcttggcattgtattcttcggtggtctgggtgaaaatcttcgaatccagcaggccctcggtgtagagcttatgcatgaactccagatagtgacggaaattctcctgagcgggaacgtagacgtactgaccgtcgatcacgtcgtgccgcaggttgacgaagccaaacgcgcctaggggcatgttgtagccgtctccgtcataaacgaagctgtaggggatctcgtccgcttctccattgccgttggcgtcgccgtcccggaaggagaccagcatgtcatagaaaccgtccagcgtgctgggggtctcggtcagaccagccttagccagccagtcgccgttgacttcctgattgtaagtgccgttcatcagcatgtcgcggggcgttccgtcgtaggcggccatcatgtagatgtgtccgtcggaggcggtgacgttgcggcgggtttcaggcagcaagttcagaatctccacggcgttgggggcgtactgctccagcaggtcctccagcgggcgcagcatcccggcctgaccgtacacagccgcgtcgttgaaggaaacgccgttgagatagatctcgctgtagtcgccggagacaaagtccaacgccagcttttcatcccagccgttggcgtcgatgccctgaacgtccagcttgatattggtcagcttttcgacggctttcagatagaagcagttgtcaaaatcaccatggttcgaggtcttggggtacttgacggtgatggtcatgggttcatccaccagcgggagctccggcgtaggcagcacgacgttggctaccatttcagccagcttttcggcctcggtcatttcggcggcggccatgccgggcaggcacagcgccagcgcaagaataacggccagcacacgagacagttttttcattgggaaacctccttttttatttgattaggaagggatttcttcctaatttaccgtagtcagggagcctgtcagcccttgatcgcgccgatcatcatgcccttgacgaagtacttctgcaggaagggataaatgaccagcaccgggagagaagaaagaaccacaatgccgtacttcatgctttccttgagctgcagccgccgcatcaatgcctgcagcgcttcgctgtcgccctccatcatttcggtcatctgatccatcagcagaatattgcgcaggaacagctgaaggggatagagcttttcgttggaaagatagatcacagcattaaagtaggcgttccagtggcctaccagataatacagggcgatcaccgccacaatgggcatcgacaggggcagcacgatcttcaaaaacaggccggtattggaacagccgtcgatggtcgcggcctcctgcaattcccatggaatgctggtggcaaaataggtacgggcgatgatcaggttggtcacgttcaccgcgcccgggaggatgaccgcgaaggggctgttcaaaagtccgaagctcttcatggccagataggtggggatcatgccgccggagaagaacatggtgaaggtaaacagcagcataatgcccttacggccgcggaaatcccggcgggacagggaatacgcgcagggcagagtcaaaagcaggttgaacgccgtgccgaagacggtgtagaagatggtgttgcggtagccgatccagatggggtcgtaatccaggatcatctcatagccgtccaacgtcacgtttttgggcagcagccagatattgccgttgatgacctcgctgggttcgctgaaggacgcgctgaccacgtaaatcagcgggtacagcgtggcgatgagcaccagcgaacaaaggaagtacgctacaaagttgataatataatcatcccggctgcgcatagcgcggggtctttccgtatgctccattcgtcttcctcctttcttaccacaggctggtttcgctcagacggccggcaatggtgttgacgctgacaagcaggatcatgttgatgaccgagttgaacaggccgatggccgtggagtaactgtactggcggtaattcagacccatcttatatacgaaggtcgaaatgatctcgctggtttccagattcaggggattctgcatcaggaaggctttttcaaagccaacggtcatcagattgcccacctgcagaatcagcataatggtgatggtgggcagaatgccggtcaggttgatgtgccagatgcgctgcaggcgggacgcgccgtcgatcatcgcggcctcgtgcaggccggtgtcgatgccggaaagggccgacaggtagataacggatgaccagcccagactctgccatacgccgctgagcacgtataccgtcggaaacaggttggccttggacatgtaatccaccctgggcccgcccagcgtttccacgatcttgttgaagataccgttatccgcgttcaggaacatggtcagcatactgaccatgaccacggtggaaatgaagtgcggcgcataggataccgtctgtaccagcttcttgtagcggcccggagccacctcgttcagcgtcagggcgaagatgatgggcagcggaaagcctacgaccagagaataaaggctgatgaccagcgtgtttttgatcagcgcccggcaggaggggttggagaaaaactttcggaagtgttccagtcccacccattcgcttccggtgatccctttggtgacgcggaagtttttgaaggcgatctgtacgccgtacatgggataatagcaatagagcagcaggtagatcagcgctggaacgacgaacaggtacagttcccagttgcgcttcagatacgcgccccatccggcgcggttggcaatttgtgctttgcgcggcataggcggaacctccatttacagattttcaaggggaatactgaaaagggctgcgtgccggacgacggtgtcggcggaagacgtgcaggaaatatgaagcattttcccgtcgatacaggcgcagggataatgccagtaagggcctgcgttcagcgcctcgctggggccgtctgccaggatcaacgcacgatcaaagggcgcgtctccgccgcggctcagggccagcaccagccgggaacggtctttgcgctccgtctgctcgttgtagatcaggtattgacggccatccggcagcgaaccgccgtacatttttgcgggggcaatgggcatctgcgcatcggacgcttttccccaggtcttgccgccgtccgtgctgtggaaggcctgtgcggggccggcatcgttgcggacgatggcgtccacccggtctttctcgaccagaacggcggtctccgggtattccagcggatagactccctcgttccacggtcccggcagagccgcgaccttccatggtgcgggcgactgctttggggcgcgcaccaccacagggatcagaggaagctcgcccggcttcgccgccattcggcctccggcgatccactcgccgtccgtttcctgcggcagcgtattgatgagcaccagttcttcgcgttcctgccgcagcttccattggccgtgatcgtactgcacacagacatagcccgtgggccggtcgtgggaggacatccgggtcacataagcccaaatttcgccgttttcctcggtaaacgtcaccggcaccatatggtgttcagggcgaacatcctcgcagatgatctccggctccgaccacgtctggccgtgatccgccgaccagcgtccgcggatgatcgtccggccgacgatctcattttcggaacagttgtaccaggccatcagcagacggccgcccagcggcacgatcatcgtatcatgcaggaagggaaactcctgatccgcacggtgaacgatctgcgcgcgaagtcctttgacgtgctccttcgccgcaggggctgaaaaagttgccattgatgatcctctcctttccgatctccgttttgcttatttttcttcaatgccgcaaagcctgcgggcgactttttccacaatttccgcctgccgcagtgtttcctgctgggcatatccgaaccgggcggcgggctgattgcgggcgatcagcgtcatttccacgcccacgtcctccatgtgacgcttggcgcagatgggatatccctgcccctccagactgctgagcagcgtcagcagcgcctgaagctcctccgccttttccggctgttcccgccagttttgatccagccagacgtacagctccgggtgaaggttgcccatgacgccgctgaagccggacgcgccgtcccgcagggtttccagcagggtcatggtgttggcgttatagagtcccagcggctccaccccggccgcggcggcctcccggcggatcacctgaatccgctcccggatcatccgcgcgtcgcagcaggtatctttgaggaaagcgaaccgtccgctgcgggcgcaccagccaagggtgcgttcggtcatcagccgcttgtagggatacgggcattcatatacgccgaaggtcacgccgggcagtgcgtccaggatccgctgggcgttgcggatccacacttcgtcgtcctcgtcctcccgggccagccggttggacaccatgaccacggcctttacgccggtttcagcgatcgcgcccaattcctccacctgcgcctgcgggtcgtccgaaatatggccggaggcaatcacttccaggcggccctgcgccgcctccacgaccgtccgggccaatgcgacccgttcttccagcgacaggttgaacatctcgctggactggcacaccgcgaaaatgccgtcgcagttccggcgggcgtaccagtccacgatccgctttgcggcgttcaggtccacccttccctcccgatcataaggggtaatcatcgtaggccagattccctttttgattccgttcatgctcgtttctctccgatcttctgttctttatttcagaacacagttctgttaattttggaaagaaaaatatttcttttccaatctttattctgaataaaagaacaacattctgatgtcctatcaaaaaatatcagaagtagatactgatattttcggtaatttgctgaaggcaagcggcgtattcctttaccttctcatcgtccatccgcagggagggacaggaaatgctgatacccgctaccgcccggccggaaccattcagtaccggcacgcccacgcagcgaatgccatattcatgctccatattgtccaccgcgtatttccgttcccgggcgaccagaaggtcctgacgcagcttttcgggatccgtcagggtcgagttggtatagggcttgagcttctgggaaaacagcgaagcccacgtggcctcgtccagctggctgagaatggccttgccgattcccgtgcagtacatgggagcccggtcgcccagcatggcgcgggtcatgtattcatggccgggataggccgcgtccagataaagcacgtccagcccgtcggggacgcccagatagaccgtctcccccaccttgtcggccaactgcttcatgtggggataaatggtcttgcggaaacccatggaggtagtgaaggcatgagacagttccagaatccgataacccaaatgatacttgcccgtgcgttcgctctgatctacatagcccagcgactggaaggtggtgaggatgtcgcagacattgctcttgtacagtcccagtcgttcgctgatctccgtcacgcccagctctggttcctgaatgaagcaattcagcacattcagcgcctttgccagagacttgaccttcacattgggctcgtccaaagctgttctctccctcagaacttaattctgtaatttattataatcacataacttcccgccgtcaagccctaaaatgtactttttttcatcattttggccgaatcaataaagaccaaataagcccgacgttgatcatcgcaagcaaaagccgcgttccgaagctttcagaacgcggcatgatttttattttcccagcacataagcccttaccagcgctgccccgaacatccctgcgacccagagaatcgccgcagcccacttgagcatggtgcaggcagacgcggccttcgccgtgccggtcaaccggcgggagggataagcggtgcagacccgcagcagcagcccgttttccaaaaagtccaacagagagcgcaggactgccagcccatacatggcccagcgcagccagcggaaagccgccagattgtggctgaccactgccagcaccagtaccaggaacagagcaagcgcgctgtccagcccccaaaggcgatggagacgctgccttcctcccgttcccagtttttccaaacaggcaaacaattcctccggcgtatagcgaaagcgcatgtccggcatttcgaactggctgtccacggccttcaaagcgggatagccccgcttcttatccccgtaaataccgtaaaggcaggctgcggaacccagcgcgcctacgatggtcaaaatcagccacgccgtgctgctcattccttttccccctgccgcagggtcagccgggtgcagggcacgtgaccagacagaaggtcatccagacggcactgggcgtggccgatcatcacattggtgccgtgctccactgcccgcagggcaaaggccagcttggcctttgcgccgttggcgcccgcccggctggctccctcgcagtggcccatcagctcggccaccttctgccgcatttcttcaatattgtccgcttccacctgctctaccagtgtggaggggtcgtccttgttcaggtaaatgccatgggtgcccgtcagcaggatcagatttttggcgtgaaccagccgcgccaccacggcggcggtctcgtcgttatccacgcattccaccacttccatgccctcggcccggcggctggccagctccagcttgctaacttcctcgtcgttcaccgggtcgttgtagttgatgatgggaatggcgttctgctccgccgcccggtacagcatctgccggatgtgctcccgccgctggggatcgttgaaatgggtgtgctccaccaacacctgccgcacgccgtactccggacggatgaaggtacggtaattgttcatcaggatggactggccctgtgccgaatagtccaccttgatctgctccttttcaccggtcagctcgtggccggtgcgctgaatgtagtccagacggccgatctccgtcgcgccgctggagaccaggatcatgccgggccgcagcgccatggccaggcgctgaaatacattatagtcaatgacgctgtcttccttctggatcagcgccatactgccgatcttcacgaccagatcaatgttttgcatcttatgcgttctcctttgcttctgtcagaacatgcatccatttgcggctcttgagtcggggaatgccgatcgccattttgacgacttcctccacgatggtgcacaggtaaacggcctccagcggccagtgccagcacagggcggccagcccggtcaggggcacgccgacgatccacaaagtccccgcctccagagcaaggctgaacaccgtatcgccgccgctgcgcagcacgcctaccacgttgaccgtattcagcgcccggaaccagattgccgcgccgccgatggtcaaaatcagctgggccttctgccgcacactttcgctcaggccggagaacaggttcaccatgggccagcgcagcagatagaccgccacgcccagcagaagccccgccagcacagccccggagatcagccgtttgccgtacagataggcccgttccttatcgccgctgcccagcgtcttgcccaccagaatggcacaggcgttcatcagggcgaaaatcgccacccaaaccagatcgttgatggtgttgcacacgcccatggtggctaccgccgcgtcgcccatgcggccatagaatacgctgaacatggtggtgcccagtccccacaggccttcgttgaacaccaccggcagcgccgttttcacaaagcgggaagaaaagcccggctccttgcagaaccactccgacggcttcgcaccggcgggcagacgcttcccgtaggcgaacgcgatgttggtcagcatcgtcacgcaggcggaaagggtcgtggcaagggccgcgccctccacgcccatggccggaaaggggccgtggccgaaaatcatcatataattgaagatcgtattgcagacaatgcctcccatgcccgccagcatgggcaggtaggtcttttcagcgctcttaatggcggtggcgtacacgccgttgatcgcggagaacagatatcccggagccacgatgcgcagatatttgaccgccagctcaaagctttcgccgggggtcaggaaacaggccaccacctgacggggaaacagcatccccaccgcggcgaacaccgccgcgatgatcagcgcaaagcgcatggccaatcccatggaccaccgcagacgcttgatgtcccgcgcgccccagtattggctcatgaaaatggcgcttcccgagcaggtgccgaagctgaacagattgaacacaaaggtgaatcggttggcctgtgtcacggcagaataggccgcgtcgcccagcgcggacaccatcaacccatccacgatgtgcagcgagctttccaccagcgactgcagcaccatgggcagcgccaccagaaaaacattgcgggtaaaggctttatcccagcacaggcattcccggagaaattgccccagccgggcagcgggggatcgtttggcttgcataagggctcctttccaaaacggcgtcctgatctcattccaaaataaggcagaaaaaaagcgcggcacagggttcgttcccgccgatttttcctaaggcaacaccgcataaatggcaggattcacataggcggacatgcattttgtgaaaatcaacaggatgccctatgcatttgctcgcaggggcgcactgattcaagctgccaggcagggtctgtcagccagaatcagattcgctaacgcgaacatgatattgaatttggctctttgcttttcgagccctcggtatcgtgtttttcggaaacgcagctgtttcttgactacgccgaatacgtgctccactttcgcacgaacagaggacttagcgtgttctgctttctttgcggcatactggccgcttttgctcagcttcttaacttgggatggacggcgattgatcctgtatttgattttgtgtccagcctcgttgcgaatgatcgcatcatcacgtttctccgcaccgagataaccgctgtcaccgtaaacagcctcttcttctccggttaacagctttgatgtttccgcaacatcatgaacattggctgatgtagcctccacggtatgaaccagtccgctgtccttgtcaacgccgatatgcgctttataaccgaaatgccatgtattcccctttttcacctgatgcgcatccggatcccgcttcttttccttgtttttcgtggaagacggagcggaaatgatggtagaatccacgatcgttccttttttcagaatgagacctcgttccataagcgcaacaactacctgcgcgaacagcttctcctgcagtccgttcttgatcagcagattgcgaaaacggccgagcgtatcgccatccggaacctgattgctggaatctatcccgcagaaatccgaaaacgcacggctgtcgatcgcttccgctacggttgcctcgtcactcaggtcgtacaggttttgcagcagataaagccgcaccatcgtctccagcggatagggcttgttgccgcgctctcctttgtaatagcacggctgaatcatggcaatccattccttccacgggactattcgttcgatctgagccagaaactcttttttcttcgtccgcacctgcgccagctcatcgctgaatgcggaaatcgtcatctgtttatccatacgtccattatatcatatttggctgcgttttgctttttctatgcggtattgccctagataacgcatggagaacacctgtttcacgttctagcgtttctttcgtattcattatcagaaggcgatagcctttttcagccacgatttgttctacttcctcaatcaacgtggcaaaaaaagcgttagcaatatctggcacgacaaatgcaatcagattgcaacgaccgatttttaaactgcgtgccatgacatccggacgataattcagcgcttccacgctagacaatacaagttcccgtgtcgcactactgacattgcaggtgtgattaaccacgtgactaaccgttgcaacggatacgccagcgtgacgcgcaacatcttttagagtgggctttttgttcatagacttcctttcaatgcaaaaaggtatgaaggcaactattgcattataaaggcattgatcagatatgtcaagaaatagagcagcatccaactcggctacatgtagcgctataatgcgccttggacaatatcccccaaaaagtaagacttgagatgtcatccgttattgtttagctgtaggatttgcctttaccaaagggatatgttcctgatttcataccgattgatcgccatcctccataccttttgttgacgcgctaatcagaacttgtcaaaacagaaagttctaattctttaagctttaatattcagcattcttctattaaatatataatattaccatggggcgtggcattgggtgaaaattcaggtttttcacattattatttcacactttttatcgttttccgcttcattcaaaatgttcaattcctatagtatttgagaaaactcgatttgctcgcagtttggtcctactattgtaaaaaaacggataccgtgttcaaagaaaggcagaaaccgtacttgctcatccacgcaccgcaggctcaacgcctgaacctgctgccacgcagcatcgatatctcgaacatctaaagcaatgtgatttatcgccccgcttttgtgttccgtatttttagtttcatagacttcaatcgtgatttttcccatacgcagaaaagcaacgcgaaaattgctctcggaaatcctcgcattataataaggttcaaagcctaagcttttataaaaatcgaccgtttcctcgaatacctgcgtaggaataccaatatgctgtaacccaagaacgtttagctgaaaattcatctgcacagcagttcctctcctttgaaaattcatctgactaacttttaaaaaatcacccggaaagctcattccagcattccgggtgatcatatgttctcttacttgatcaagcggtcactgatatttgcttccagtatttccagtgtcccgtccgttacatacatgctaattccatgaccagattgattttcgttgtacattcttacattcagcgccactccatcaatgtaaatggtcgcaatatcatcatccacaatgatctgaattaagtattccttgcccgccttcagctgaatcggacgctctagccctttgttattgacgtcagaaggaatgcatggaatccggtcaaaataaaggcggttttctcccactagcaagcgaaaatcataagattctccagtagtttcattctgcttgacacgcacgccgaaggaacgcgtaccctcagaaaactttacgcgagcctcaaacttgcaaaacttatcccgaatctgtgccaatggcaattcttcactgctatctacagtatgcagcgtgtgatccttcgcaagtacccgtggtgtctcaaaggcctccaaaacactatcgggaattttcgcccccagagaaccatcctcccgctgatagatttcgtgaggcacaaaggttccgccccaagtccagtgcgcatcatccttccatgtatcccgcgtattgacccagccaaacagcacgcgtcgtttcccatcaaaagccgtgcgccctgcataatagcaacgtccatcaaatgcgtcgtctataggtgcagtccaaggaccgtccaagcttttgctgcggcgataaactattttgttcttttcactgtattcgctgatgatcagataccaccagtcacccattttaaacagatcaggcatttcatgcatgctgtaaatattgggggcccaaaaatccccctgaaatttccaatcatgcagattcttggatgtaaagcagaccgtacagccgcggttgatatgcgggctcttttttcgagcgcccaagatcattaggtattcctgtttttcttcattccacatgacgaacggatctctccagtcctctggatcgtatccgggctgcggcgcaaccagcttctcatcgtttttttcccaatgatacaaatccttgcttgtagctttcatcagca

SEQ ID NO: 3911 - DNA, 13822 bp, Unknown
  16S sequences of unknown bacteria
agcgccgcgggcgggcgcgcgttcccgcgctggcgcaaaacaaattttcgctttgcccgcgaaattggggtggcgcggggcggaaaaatatgctataatgagaatgggaagcgcgctggggcggcgcggcggacaggcggcgcgccgcgcggattcagcgccgcaatggacggtttggagcgggaaaatgtatcttgcggcgcgaaacgcttttttcgccggacgggatatgctatactgaaaccacgatttgaggatggaggcgtgtacgatggatattctctcacaaattatcgtggacaatcttttgtcggtgatcctgctggtggtggggtttgtgctgctggtcatcgagatgtatgtgccgggttttggcgcgttcggcatttccggctgtgtgctgctcatcggcggcatcatcgcggcgcgccccacgcccttgcaggcgttgatcatggtggtgatcattctggcgcttttgtgcatcgtgctttcggtgtccatccattccgcctccaaggggcggctgtccaaatccaaactggtgctcaacgacgtgagcatcgagcacgcggaggcggacgatttggcctattttgtggacaagaagggcgtggcggtcacggtgctgcggcccgccggcatggcggagtttgacggcgtgaagctcaatgtggtttcggacggggaattcatccccgaaggcgagcgcgtgcgcgtttcgcgcgtggaaggcaaccggattgtggttgtgaaggcggaagcgtagcgcgccgggaattttgcttttccccgccgcgcaggggcggcggttggaacaataatggattaaggagaggatactatgcccgatggaattattctggttctggtcatcgcagttttgatcatcattttcctcgcagtgtttttgacgtttgtgccgctcggcctgtggattacggccatcgcctctggcgcgcatgtgcgcatttccaccttgatcggcatgcggctgcgccacatttcccctgcgcgcattgtgaggccgtatattcaggcgaccaaggccggactggacgtttccatgtccgaaatggaaacgctgctgttggccggcggcaatgtggaccgcgtgatcaacgcgctgatcgccgcgcaggccgcgcagattccgctggaattcgtttccagccgcgccatcgacctggcggggcgcgacgtgctgcaggccgtgcagatgagcgtgaaccccaaggtgattgaaacgccggtggtggccgccatcgccaaggatggcatcgaactgcgcgccaaggcccgcgtgaccgtgcgggcgaacatcgagcgcctggtgggcggcgcgggcgaagagacgatcatcgcgcgcgtgggcgagggcattgtgaccaccgtcggttccgccaccacgcacaaggaagtgctggaaaacccggaccgcatcagccgcaccgtgctgagcaaggggctggacgcgggcacggcctatgagattctttccatcgacatcgcggatgtggatgtgggccgcaacgtgggcgcgcagctgcagatcgaccaggccgaggccgatcgccgcatcgcccaggccaaggcggaagagcgccgcgcaatggccgtggccaaggagcaggaaatgatcgcggccgtgcaggaaatgcgcgcgaaggtcgtgcaggcggaggcggaagtgcccctggccatggccgccgcgctgcgcgaaggcaagctgggcgtgatggactattaccagatgcagaacgtgatttcggacacccgcatgcgcgaatccatcgcgggcgacgcgcatccctccagcgcgaacgatccggatcagccccataagaaataaaaagccgctatgcgcttcccgccgttcgcgcggcggggagcgcgaggcgtaaggaggcggttgcatggaaggaattatcattctcttcgccatcatcgcgctgattgtcaacgccgccaagaagggaaaaaaggtttcgcagaaccggcccggcccggaaaagtcgccggaggaacgcaaggcagaattgcgccgcaaactcgaggcccggaaacgcgagcgtgaagcggcggagccggcgaacccatccgagaccatcaagcgcgcggtggatacggtgcgcacatccgacgccatgaagcgcgcgcgggaatgggtggataccgtgatggaggaactggatctcgacgtggaggacggcgagggccagcaagctgggcacgacccggcggcgcgtccccaagcgccgccgaaggcgggcgagggcacaaagagcacggagggcaagccgctcctgccgcgcgagggcgcgagcgccccgcggcaaatcgctatgcagctttccggagagggcaagcccggcgcgctccacgcggcccatgcgcgcgtgcgcgaggacgaaaagcccacggtggcgccccatgtggaggcggccgcgccgcacctcgtcgccaggagcgcggcgcgcgccagcggcccggcggtgcaggtggcggacttgcgcctttcgcgggagcaattgcgcgcggcagtggtgatgagcgaaattttggccaagcccgtcgccctgcgcggcagaaaacgagtgtattgagggaaaaacgttggagaagattcggatcgcaatcgcagacgatgacgctggtatgcgcatggttgtccgcaagctgatcgagcgtgcggacgattatgcgcttgtgggcgaggcggagaacggcgaggaactgctggcgctgttcgaaaaggcgcggcccgaggtcgtgttcatggatgtggagatgcccggcatgagcggcgtggaatgcgcccggctgattcaggacaagaatcccaagaccatcatggtctttgtgacggcgcatgaggaatatatggcggacgcgtttgaggtgtacgcctttgattatttgctcaagccgtttcgcctggagcgcgccatgcacacgctggatttgattcgccagcgcttgcgggaaagcgcgggcgcgcaggacgcgccgcaaaagcccgtgcgcttcaatgcccccgcgcgcattatgctgcggcaccgcgagggcgtgagctttgtggatttgaacgacattctcctggtgcagcgcgaggagcgggccaccgtggtgtacgtggcggatggcgggcgctttgtcactggcgacacgctgggggagatggaagagcggctgcctgagggaatgtttttccgtacgcacaaatcctatatcgtgaacatcaaccacattgaatccatttcgccgtatggccggtggacgtatattgtgaaattgcgcggcacaaaacaggatgcgttgatcacgcatgagcgctttgaggaattgcaaacgcggttcgcctgagcgcagaacttcgcgcgcagagggatggaggtagactatggcgtcaaaagtggcactggaacgggcgctgagcgtagcgctgacgacgggcggcgattttgccgagattttttgggaagacacgcgcaaatcccacatgaacctgatcgatggcaagattgagaattgcgtggccgggcgcgagcacggcgcgggcgtgcgggtataccgggaactggaaagcgcctatgtgtatacgaacgacacttcggaggccgggctttgcgcggcggcgcgcgcggcggcggacgccattggcgcgcagaagggcgcgcagcggccggtttcgctcgtgcgcggcgtggccacgaacgtacacgcgattcgcgaaatgcccatggacgtgccgggcagcgcgaaggccaagctgctgcacgaggcgtatgccgcggccaagagcgcaagcccgctcatcgcgcaggtgagcgcgcaggtgatggaccgcgagaccgacgtgatcatcgccaacagcgaagggctgatggtggcggacaagcgcgtgtattcccgcatgggcatcaacgccgtggccagcgaaaatggcgaaaaccaaacgggctttatcggcccgggcgcgcagcgcggattcgaatttttccgcgaaggcatcgatgtggaggccgcggcgcgcagcgcggcgcaaacggcgctgaccatgctgcgcgcggagcattgtccggcgggcaccatgcccgtgatcatcgacggcggcttcggcggcgtgatcttccacgaagcctgcgggcattcgctggaagccaccagcgtggcctttggcaattcggaattcagcggcaagctgggcgagaagatcgccagcgattgcgtgacggccatcgacgacggcacgattcccggcgagtggggctccatcaacatcgacgatgagggcacgcccagcacgcggctggtgctgattgaaaacggcgtgctcaagaattatatgatcgaccggctgaacagccgccgcatgcacatgcccattaccggcagcgcccgccgcgagagctattgctacgcgcccacctcgcgcatgcgcaacaccttcatcgcccccggcaacgacgacgaggcggaaatcatccgcaccgcgggcgacgcgctctacgccaagcagatgggcggcggctcggtgaaccccgccaccggggaattcaatttctccgtggcggaagggtatctgatccgcgatggcaagatcgaccgcccggtgcgcggcgcgaccttgatcggcaagggcggcgaagtgctcaagcgcatcgaccgcgtgggccggaagatgtggatggcgcagggcatgtgcggctcgcagagcggctcggtgtgcgtgaacgtcggccagccgatgatccgcgtgaccagcattacggtgggaggccggtaagagatggataggcaggcatttatcgataagctgttcgcccgcgcgcagagcgaagggtttgaggcgtacgaagcgtattatgtgaagggcaattcctttgaggtgagcgtgttcggcggggaaatcgtcgattacacggtgtccgaatccctgggcttgggctttcgcgcgctgaccggcggcaagatgggctatgcttccacgcaggcgctcgacgatgacgccgtggaattcttgatcgccagcgtgaaggacagcgccgcgctcatcgaaaacgacgacccgcagtttatctttggcggcggcgaggcgtacgcccaggtggacaactattcccaggcgctggacgccgtcacgcccgcgcagaagatcgccttcgcgcgcgaattggaaaaggccgcgctggcgcaggatccgcgcatccagcgggtggacggctgcagcgtgatgacggaatccagcgagcgcgcgattcgcaattcgaaagggctcaatttggccagccgccagaacgtggccgtggcctatgtggccccgatcgcggaggaaaatgggcgcgtgaacaccggcatgaagttccaaatggaacaggagttctccgcgctcgacgcgcaggccatcgccaaggcggccgtggaacgggcgctgaccggcctgacggcgcaacaaccggcttcggcgacgtgcgcaatcgccttcgagaaccgggcggcggcgagcctgcttggcgtgttctcctccatcttttcggcggaagcggcgcaaaagggcctttccctgctgaaggggcgcgagggcgaggccatcgccagcgaggccgttaccatcgtggacgacccgcaccgcccgcacagcgcggcttcccagccgtttgatggcgagggcgtgcccacgcggaaaaagaacgtggtggaaaagggcgttttgcaaacgcttttgcacaatttgacgacggcggccaagcaaggcgtgaccaccacgggcaacgcggcgcgcggatacgcgtccgccgtcggcgtggcgccctcgaacttctatatcgcgccttcgcaggaatccgtggaagccatgctcgcgcgcatgggcgagggcttcctcatcaccgaagtgagcggcttgcacgcgggcgcgaaccagatcagcggcgatttttcgctgctggccaagggcttcgcggtgcgcggcggccaaaaggccgagcccgtggagcagatcaccgtggcgggcaatttcttcgcggtgctcaaggacgtcgtggccgtggcggacgatttggccttcggcctgcccggcggcagcctggtgggcagccccaccatttgggtgaaggcgctgtccgtggcgggaaagtaggccgctatggaactgaatttgagcgcggagcagcgcaaaaggctcgccgctttcctggagagcgacgaggattgcgagcgcttgccgggaaatgagttcgtggcggatttgtacgaggcgcaaccgcctctcacactcaatttgttcgtcgacggcgagaaggtggaacttctcgccgccgcgcagttgctttatgatccggaattggacgcgtactatatgggcgatcccgtggaggatacgaacgcggtggtacgcgcgcttttgcgcgcaatggaaggggattgaggaaatgcacgaaaaatttcattacaaatcgctggaggaaattcgccagcgcgcggcggaactgggggaatggctgcccctggaagaagacgtttcgattttgacctcgcccatgcgcctgggcgattggacgctgcccaaccgcatcgccttgcagcccatggagggcacggacggcactgaggacggcgcgcccggcccgctgaccatccgccgctaccaccgctttgccaagggcggcgcggcgctcatttggtttgaggccgtggccaccgcgccggaagtgcgcgccagcgcgcatcaactctatctcacgccggacaatctggacgattttaagcgcttggtgggcgaaatcaaggaaattggcctcaaggaaaatggcttcgcgcccatcgtgatcatgcaggccaccaattcgggccgctattccaagccgcacggctatccggagcccatcatcgcttacaacaatcccattttcgagggcgattcgcccattcccgccgagcggattgtgacggacgatcaactgcggcggtatgaagaaaaatacacgctcacggcgcgcctcgcgcagcaggcggggtttgacggcatcgatatcaagtgctgccaccgctatctggcgtgcgaactgctttccgcgtatacccggccgggcgaatacggcggcagctttgaaaaccgcacgcgctttttgcgcaattgctaccgcgccgccatggcgggcgtcacgggcaaatacgtattctcttcccgcctcaacgcctacgacggcttcccgtatccgtacggcttcggcgtggaagagggcggcggcctcgtgccgaaaatcgatgaggcggtggaattggtgggcctgctgcaaaaggaatttggcattccgttcatcgatatcaccatcggcaacccctacaagaacccgcatgtcaatcgcccctacgacgtgggcaattatgtgccggacgagcatcccttcacgggcctttcgcgcatgatgcgctgcgtttccaccatccagaaggcgcatccggatctgccggtgatcggctcggccttctcgtatctgcggcagtattccgccaacctggcggcgggcatgctcgcgggcgggcacgccgccatggcgggctttggccgcatggccttcgccaacccggatttccccaaccaactcaaggaacatggcgcgatcgacgccgccaaggtttgcatcacttgcggcaattgcgcccagcttctgcgcgcgggcattccggcgggctgcgtgatccgcgaccgggagagctacagcatggaggcgttgaagaaatgaaacagggcgtgatcgtaacgggcgcgagcagcggcatcggcctggccaccgtgcggctgctggcggaaaagggctatggcgtggtcggcatggcgcgctccaaaaagcccgaagtgctggaaaaatacgcgcagtggggcgcggtgtattcgcagggcgatgtgatctgcgcggaagaccgcgccagggcgctcaagaccgcgcaggaagccttcggcaacgtgtacgcgctggtgaatgtcgcgggcgtggcccccaaagtgcgcgccgatattttggaaatgaccgaggaaagctacgacacggtgatgaacatcaacaccaagggcatgatgttcatgacccagcttgtggcgcgcgccatgctcgcccagccccgcggcgagggcctgcgcggcgcgattgtgaacatttccagcatgtcggcctatacttcctcgatttcgcgcggggaatattgcatctccaaggcgggggcctccatgatcaccaagctctttgccgaccggctggccggcgagggcattatcgtgaacgaagtgcgcccgggcatcatccgcacggagatgaccgccaccgtcacggggaagtacgacgccttgatcgccggcgggctcttgcccattgcgcgctggggcgagccggaggacattgccaaggcggtgctcttgctgatcgatgggcaactcgcgtacaccacggggcagtccatcgacgtggacggcggattccacattcgcaggctgtgaaaagaggcaaagggtatggatacgaagattcttttggtcggttccggcggggatggcgcggtatacgcgcggcaactgtatggcgcggcgcacgcgcgcgaaaacgttcgcgtggcgggcgtggtcgatccttatgcggcgaaagggccgctgtatgaggcgatttgcgcggcgggcacgcccatttacaacacggtgcaggaattctacgcgcaggatcgggcggatctggccgtgatcgccacgcccattccgctgcaccgggagcaggcgtccgcctgtttgcgggcgggcagccatgtgctgttggaaaagcccatttgcgccgagatggaacaggccaaggccattgccgccgcgcgggatgccagcggcaagcaactggccattggcttccagtggtgctgggatggcgcgatgcagcgcctgcgggaactcgcgcgctccggcaagctgggcgcgcccgtgcgcctgcgggctttggtgatctggccgcgcgatttcgcgtattatggccgcggctcgggctgggccggcaaggaatacgacgccaagggcaacccgatctttgatagcgtcgcttccaacgccacggcgcactatctgttcaatatgttctgggtcacggggcgcgcgccggtcgcctgcagcgcgcaaacctatcgggccaacgaaatcgaaacctacgatacggccttcttccgctatgcgctgcagggcggcggggaggcgctgttcatcgccacgcacgctgcggaaaacgagcggactgtcaacccccgctttgtgtatgaattcgagcgcgggcgcgcggtcttcggcgaggaggacaaccatatccgcgtgttcgcggagggggaaaccatcgatttgggcgagtccagccgcgacaattgcctcaagctttggcaaatggtggatgtggcgcgcggcgaggagagcattccctgcaccgcggaagaagccatgatgcatttgcaggccatagaaatggcccgcgccgcgcagccgcacgccagatgcttcgcgcacatcgaaaaggatgaaaagcgcgcgtgggcgcccggcctctacgacgccgccatgcgctgctatgcttccttccagctgccccaggaggcgggactggcgctgtgacgatggcgcgctggcaatctcggtcggcttcgtggcagcgtggtgaggcaacccttcagtcggctccgccgccagctcccctttgaaaaggggagccttttgggcgctgctgccattgattgacgaacgagccaaaacgaacgccgcgcggaaaacaatccgcgcggcgtcaaactatcgaaaaaccaaagggaggggcaaagccctttcgcagcacaatcgtccccgacggcgcagcgtttttaccctccgatgagcatattgtccgtgagcaatcccgtgagggtgagcagggaaacttccggcgtgttgaacaggcggaaggggaatttgaccgcgtcggtcgcgccgagcccgccggtgacatacatcacggtgttgccgacggtgatctgcccgcgcacgcgggattgatctgggaaccagccgtggtaggaaccctgcaaagcgtcgggcacatagagcgcgccatagccgggcacgcgcaccacgccgccgcaatagtgccccgccagcacgagatccggcgcgtagaggtattcgttgggcgtggcggaatggtcgtcctgcacgatggacagcagcgaatccatgggcggcacgtgcgaaagcgagatgtgcacatcgtccgcgcccatctggctgatggcggaaagcagatcctgcgcctggcggtagcggtaatcggtgaagggatattggatataatccgtgccgatgccgctcaggtagccgatgcgctcggtttccagctggtcttcgtacatatcgacagcgtccttggcgctgacgcccagttgcgagaagggggagagccagagcgtggctgagtcggtggtgcccacggtaagggaaaccggcgcgtccagatacgtggcgcccagatcaatggcttccagcacccagtcttccagcacgcgttgatcgagcgtgccctcctcctcgcgaatttgggagagcagcggcccgggatcggaatcgcccgcaatgaaatacacgttccggcacgtgctgagcccgcgcaaaaagttgaggaagggctccgcgttcccgctggcgcccaccatgtcgcccgtgatgagcataatatcgtaatccaggttgttcaccgtgcgcagcagcgtggattgctcggtgccgaattccgcggcgtgcaaatccgaaatgtgcaaaatgcggtagttctccagcgccgaaggcaggccggcaatggcgatggtctcttcatccacgctgatgctctggttgtttagcgccagcagcatcagaaaaatgatgatgaaactggcaaggatgaaaaagcggaaggtcagcggaatgcgaaaaacgcgccgcttgccatcgccttgcgagtaggaaaaggcgttgaaccgcttcatgcccgccatcgtcgccttgccaacgcggcgggccacctggcggctggcgttttcttttcccgcggatttggcgccggttttggctttggcaggccgcggggaaagcggcgcgtcgtcgtcatacacggcgcggtgctttctgggcgctttggctttgccggctttttcccccgcgtccttgtgcgcgcggggcttttgggccgcgcttgccgccgcttttttgctcgccgccttttcggaagcgggcgctttttcttccggcgcgcgcgcgaaagaggatgtatgggcatcgcgcgcgcgttcggcggaaagccgcgcctcgcgccgcgataaaggctttttggtttcttcgggcatggtcgtgtcctttcgggtatttccacaaaaattcatccaccataaattataaacgcatattgccaataaggcaaggcgtggtataatatttcatggtaactttttcagcacttttcgtgggagacgggggagatttgcgtggcgaaggtgaaaacgtcgttcgtgtgcggcgagtgcggctatgaaagcgcccgctggtatggcaagtgcccgcagtgcggcagttggaacgccatgagcgaggtggaaattgcgccccggcaggaagaggccaagcgcaaccggcacgcgggggacggcgcggcgcaggcctatctcatcggcgatattcccgaagaagcggcgcagcgcctttccagcggcattggcgaactggaccgcgtgctggggggcggcgcggtggaaggcgcggtgatgctggtgggcggcgacccgggcatcggcaaatccacgctgctcacgcaggcttcggccaatatggcgcgcgcggggatcccggtgctgtacgcttcgggcgaggaatccgcgcggcagatcaaattgcgcgcgcggcggctgggcgcggaggccgccgggttttacgtgctggcggaaaacgatatggaagccgtgctgcacgcggcgcaaaagctgggcgcgcgcatgctggtgatcgattccatccagacgatgctgctgccgggcatcgccagcacgccgggcagcgtgacccaggtgcgcgaaacggccacggccctgattcgctatgccaagcagaacggctgcggcgcgtttttggtggggcacgtcaccaaggaaggttcgttggccgggccccgcgtgctcgagcacatggtggatgtggtgctctattttgagggcgaccgccagcaccagtaccgcatgctgcgcgcggtgaaaaaccgctatggatccagcaacgagttgggcatgttcgaaatggcgggcgacggcatgcgcgaggtgaagaacgcctcggaaatgctcctctccgagcgcgcggcggacgcgagcggctccgtcgtgatgtgcgccatggagggcacccggcccatgctcacggacgtgcaggcgctcgtgaccaccacggtgtttggcaatccgcggcgcatggccagcggcgtggaccaggggcggctggcgctgttgctcgcggtgctggaaaagcgcgcgggcttccggctttacgaccaggatgtgtacatcaacatcgccggcggcatgacgctcaccgagccggcggcggacctggcgctggtgctggcggtggcttcctcccgctggaacgtgagcccgggaacggattttgccgccatgggcgaggtgggattggcgggcgaggtgcgcgccatcgcgcacgcgcagcgccgggtggacgaatgcgtgcggctgggcttccggcgcatcgtgctgccgcgcgccaatttgcgccagatccaggcgccggaaggcgcgcagattgtgggcgtaagcacggtgctggaagcgaccgcgctgctcaagcggacgaatcgggccaatgcccaggaaggggaatgacggaatatgccaaacgaaactttgcgtcaactggacgcgcgcaaatccgtgcgcgcctttgaggaacgggagatttccgcgcaggacaaagcggcgattttgcgcgccgccgccatggcgcccacggcgggcaatcagcaactgtatacgattttggacatcacggaccccgccctgcgcgcgcgcctggccgaaacctgcgaccaccagccctttatcgccagcgcgaagatggcgctcattttctgcgccgattgccagaaatggtacgacgcgtttgccgacgcgcactgcgcgccgcgcaagccgggcgcgggcgatttgctgctcgccgtggacgacgcgctgattgccgcgcaaaacgccgtggtcgccgcgcagagcctgggcataggctcttgctacatcggcgatattatggaaaattgcgaaacgcaccgcgcgctgttgcacctgccggaatacgtgttcccggccgccatgctggtctttggctatcccaccgcgcagcagcgcgagcggcaaaagcccgagcgcgtggcgctcaaacacattgtgcacgagaatggctatcgccatatggacgcggaagaattgcgggaaatgttcgcgcccaaggccgcggcgcgcggctatgaggagtggatgcgcgcgttttgcgagcggaaatacaactccgccttttcccgggaaatgtcgcgctctgtggcccggtatttggaaaacttcatggaatgcgccgaaaggaaggagaatgagtaaaatagcccgccgcccgatcttgggcggcgggcttagagtattgacaaagtatcgaaagaacgaagctttcatcagaaatgacggcgtgtacgtcatttctggtatttttcgggagcaaatgcttgcatttgcggagaaaaatacattcccg

SEQ ID NO: 3912 - DNA, 28148 bp, Unknown
  16S sequences of unknown bacteria
cgatcttttaattaatgtaaagggttataggaaaatagttatgaaaaaattaaaaaacaactcgcttataagtttatttatcgttttttgcacgataacggtttttaatgctcctacgcttgccgctttaaccgatcttgatataaataataaagcaggctctccgactctcataaaagacgaacagcgtaaatcgaaaatcactcaatctttttccgcggtcgccgctcccacatcttccgggctttccgatagttttgcctttcaatatttttttcatttaggaactaacacgccttataaccgattcggctcttgcgggtatgtcgcactttcctgcctgttgtccttttacgatacctattggaatgataatattattcccgaacaatacgaccaaaattccgcgaatattaatatttctcccggagttaaaaacaaatcgacgttaaacgccttgactgccgaggaatattataatgctatcatttctaataactacaacaatgtttacgtaaataattacttccaatttctattatttagtttagcaaaacaaaaaaataattcttatatttcgctgaatactgataataagggagaaaaacaacttgcttgcggcgtcaatttttctaaaatggtgactattataaacacctatttatatgaatatttaaattttactaccgacgaatgcgaattaattacaattgaaaagtcggattccgactctctcggaaatggggtaaaagaatttacaattaactatcttaaacaaggatatcccgttatcgtaggaattcccgaacacgtcaccgtcgcctacgattactacgaaccttcggatacggtatacggttattggggatatggcgaaatcgataatcacaaagcttatactcaattcagcgatgcctatgttattgcgttgaaaacaggttatattcattccaataattacgatttaaatggtactcctacctgctcatgtaaattaagcactcatcagcacgactatacttacaattataaaaaaagcacttctcaacaccataaagcaacttgctactgcggtgcaagcgaacttcagccgcatctttataaatcggaaaatgttgtaactattaaaggacatatctatgcaacctgctctgaatgccgagctactatttgtatagacgatacctatatcccagggattatcactcgaattcccgcggcagcagaagaactcgccgaatatgccgaaaaccaaaaattttgacaattaaggcaactttttaaattttttttcgtctataattatgaaacgttatttccttgacaagaggtaaaaacatgaaaaaaattctttgcgtctttttggcgtccgcactttgcggctctgcccttgcgggatgcgataaaacgtcctccgcccgctatacaggcgagcctgtcaccgacagagaactgcttgccgcactcaattcttttgaagcgggttcgttcggcagccgtttttattatcccaatatgcttaatgattttatcgattcttcctttgtctatcgttacagggcggaaaacggagtcaaagattgggtttactgcgcctatatgaaatccgaagactatgacggcgtcgatgtttccgaagcggcaaaggatacgacccgattttattatcaaaacgggaacgattacgtagacggcaaacacatcggttattatcaaagcgattccgtaaacgttgcggatacggtgaagtggtttaaaatccaaagtttggaacaggtttttgaaacctgcacattggaaggcgtcgaatataagctggatttggtgatggcggaaaaaacgtacttctatctttacgattgtaccgccggcgaggaaacagacaaacaggttgcctgtttcatccgtcagccctgcaaactggaaaacggagttctttcccccgtttcaaacgtgcgcgaatacgaccaggacggctattggcaagatcaatatttccgcgaacagtcgggcgaatatctcacttgcgtcaagcaaaaacaactcggtaaatacggcgttctcaatcgattggtagacgacaaacaccgctacgcgctcgccgaaatagagggtaaaaaatatatttatttccctcccgcaaacgattgcacaaaagaagaatttttactgtttgtttgcaaggaggacgatgcccgcaaagaagaatattcccttgcttttctttctcgcgaaaacaaaacttatctggacttcgaaatcttgcctcccctcttcaaagagcaagactgatccctgcaatcaaacgatcttttttatctctcgccgcgcatatgcgggcgcgcgcatattttcaaaattgttttctaaaagggaccgttaaaaagcggtcccttttcgttctatgtttttttgaaacgacgcattcgcaactttcacagtaataagcgggagcataattgaaaccgcgcggagtacacggagtcagagtcctttgtcttttttccgaactctcctttaaacatccaaagcgacggcgaaccgtgtattttctcgctgaatcccacttttatatccttggagatatccaaaccgcatttcttttccgtaaaacggacatttcattcacctttcctcctttgcggataaactatatcctatttatttcaatttgtcaatatccttttcacgtttttataggcgagcttttccgtgacgcggaaacaaaagcccgcttttttcatatcttcgaaaaatcccggcatctcgtccgcgccggcgtacaaaggattttccgtaccgtcaaagtccgttcctatcgccaaaacgtcttccccgcctattcttgcaatatgccgtatatgcgcaaaaatcccctttttcccgataaattcccgcacgaaattgactccgacgagcccgcccgagtcggcaatcgccctgatttgcccgtccgttaaattgcgcttgtgagcgcagaccgcgcgggaaagggaatgactggcgatcagcggtatccgatagccttcggcgattcttcgcaagtcctcgaaaccgtcgtcccccaaatgagaaacgtccgcgtaaatgccgcgcgaaaaaagctcctctgccgtccgttttccgaaaggctttaagccgcccttttccccgcaggggaatcccagacaattttcgtcgttccaggtgaatccgaatatttttacgcccgccctttccgcctcgtccagccgcgaaagatccccctctaaaatcccgccgttttcgatcgtcagaacgggtcggacacccgccgccgtcagttcttcttttgccgccgcgaaatcggaaaaatatttttccgcacggcgccacggctcgggacaatccgagggcgtaaacagcgcgaaacactgcaaaaaacaacctcccccgagcaatttttcgagggagatctgcgaagttgtcctatgtagaaacgtcgtgccgccctccgcttcccgcgtgagcgtatcgcaatgtaaatcgccgtaacgcagaagaaaacgctcctttgtcacgatttggctttgcccttaaacaggcgcagaatcatccgaatcaccttcggcggcttcaaacaaatgatttttgacatctctctcctcgttgaccgcggcgagcagcaccccgccgtcgcagtcgatttcggcgttttcgctcacgcccacattggaaatgccgcggcagctgccgtaaacaagcgtcagatcctcggtgggatagaacagccctctattagtcagtatatgcgcgtcgccgccgaaaggcaacagggaaacggtctttccctgcacattttttaagataaatttccccctgtgcatggaaagaagggcgtggttcgtcgccatgacgcacccgacgcccgcaagacaagcgcggtagagaagatgcagattgccgataaaatggtcctctctgcctccgcccccgccgtagatctcgatcccgtcgatcttcccttccgcggcaaacgaaagcattttttccaaagcgatctccccgtccgtaaaatttttctcggcggggaaaacttttgcaggataaggcgcgggaatctctgccgcggaatcgaaatcgccgagattttcatcgatccgcactttccccttcgcccaattatacgccccgtccgcgcagatgacgaacgccaacgaatcgtctattttctttttgtacggttccccgtttaagagaatgatgcccttcataaattccgtttccgataaatgattttcgtcctttccctcgcggcgctttcgctttttcaaactccgaacaatcaaacaatccgcgcaggcaaaagcgcttcgccgtcttccctatgtaagccgcgccctcgggtccctcttgaagggggtctgaacccgtcaattgtttctgagcgcccgtatggcggcgcgcctgtccgcggctttgaacaccgaactgcccgccacgatgacgttcgcgcccgcgcgtttgatttcaccgacgttttcgctcgtcacgccgccgtctatctctatctccaaatcccatttattaagatccgcaagggcgcggatcgctttgattttttcgagtacttcgggcatgaacttctgcccgccgaagccgggaaatacgctcattaccaaaaccatatcgcaaaaaggaaggactccctcgattgcggaaacgggcgtatcgggattgatgacggcgccgcatttcgcgcccgcggctcttatcagggcaagcgtgtcttttaaagtttctctgcacgtttcggcgtgtacggtgacgatgtccgcgcccgcctttacgaatcgttcgacgtatttctcggggtgtacgatcatcagatgacaatcgagcggcaaagaggtacgcttccggaggtcctccaccattttgataccgaaggtgatattgttgacgaaaacaccgtccatgacgtcgcagtgcacgacgtccgcgccgtttgcttcgaggtcctttacttcctcgcccatttttgaaaagtccgccgacagaatggacggcgcgattttgattcttcgcatgctgtattctcctgattttcttttgtttttccgcataaaagaggaacgggacaaacgccttttccgagtctatccgttctttttatcttccagataactcgcccgaagctgaccgcaggcgcctcctatgtccgagcctatctgccgccgaagcgtcgcgctcaggcctcccttttcgaggattcccaaaaagcggtaagcgtccttttcgcccgtggatttcaagttcctctccttaacctcgttgagccgaatgagattgacgtgacaaggctttccctttaacagggaaagcagcgcgcgggcgtgttcctcgtcgcagttctcgccctctatcagcgtatactcgaaataataccgtctgcccgttttttcaaaataataagcgcaggctttcaggatttcctctattttataagcctttgcgacgggcatcaccctcgccctgtcctcgtccgaggtggcgtgcagagaaacggtgaggttcaagggaatcccctcgtttgccagcgcgtacattttcggcacgagtccgcaggtggagagagaaatattgcgggcgctgatattcagcccctccgcggcagtcgcatttctcaaaaatttaaccgtttcgtcgtagttgtccaaaggctctccgctgcccatcaaaacgacattcgtgacggcgcgcgcctctttgccccgtcctttggcttcaaaatcctctccgtgcagagcgttgacgacgaggatctgcgacaaaatctcgcccgcagagagattgcggacgagtccgttcaaggtggacgcgcagaatttgcaacccatacggcacccaacctgcgtggacacgcattgggtatacccgtacttgtacttcatcaaaacgccctcgatcagatttccgtccgcgagggaaaagagatatttttccgtgccgtccgaggaataaaagatttccttgattccgacaggctcgttttcgtatacgcttaaaagccgttccttaaagcctttggaaagggaggtgacgtcggagatttttttgccctgcgtcaagccctcgaaaagttgcttcgcgcggaatttcttttcccccattccgagaacgagcgcctcgacctccgaaaaattcagatcctgcaaaacttttttcaacgcgccctcctttctcccgtatgcgctttcccgcaaatgcggcttcgcgcactttcccgttctctgcgcggctcggatagaactacaatccttgcattgtcttactttttttatttcttcttcattttcgccacgtaaaagcccgcgccgaacgccgcatcgggcaaaaattgcagtccgtacctttttctttcgtgcacgagcgggcttgagagctcctcgatttcaaaatcgggaaaggctttcaaaaaggcgtccacgattccgtcgttttcctcccggaacaccgaacaggtggaataatacaacgcgccgcctttcttcacgtatcgggaacagacggaaagaatgctttcctgcgcctttttcagggaagcgaaatcctcttcctttctgaaaagcttgatgtcgggattttcgctgaccgtaccgaagcccgaacagggtacgtcgcataaaacgccgtcgaatttttcctcataagcgggatcgaaaacggagctgtccttttgaaactcgaagacgttttccgcgcccatacgcgccttgtactgccgtatcagctccactcggtggagatgcagctcgaaagccgtcacgcggtcgcatttcttagagagcagcacggattttccgcccggagcggcgcaggcgtccaaaaattcgccgcacggctctactacgccgcagatcgccgcgctgcccaccgactgaaaggtgtaatcgcctttctcgaagccctcgtcccgaacgaaattttcaaagacgaacagttgagggaagggcgttgcgacgtgctttttggacagatatttttcctcgccgcgctcgaaccgcacgcacacgcccgcgctttttgccgccgcaatcgccgccgcgcgttccccgtattcctctttcagcttccgataggcatataacggatacgaaagccgaatacagacgccctcgtcgccggaagggatcgcctcgtctgccgccgcgcggtcgaatcgccgcaaaaaggcgttgacgaagcccgccaccccctgcttgccgagctttttgcaaagctccaccgcgcaatccgtcaccatgtaacgatttttatccatataaaggagcatataaagagaaattttcaaaatcgtccgcacggcaagcttgggcgccttgggcgcaaaacgacggatacaaaagctcagatacccgtcgttttcgaggactccgtatacgattttcaccgtccgcgcgcgggaaagctcctcgatacaggtatcggcgatcgcctgtttcacgtgcgcgccgtccgaataaattttcgtcagaatttgaaagggatcgtacacgggattgctcagcatgaaaatacctgtccctttctcaccttgcgcccgttgaggaaatcgcttcctttcatgcgcttgcctcccgccgcctgcacctcggcaagcttcaccgcgccgtccccgcatttgaccaaaaagccctgtttaggggtatcggaaagaatctcccccgccgccgcgccttcgcttccttcgggacagaccgccctttcggcgcaaaatacgttcagccgcgccccttctatctccgcgaacgccgtcggctcgggattcatgccccgcaccaaattcacgattttttcggcgggcagagaaaaatctattttcgcgctttcttttgcgattttccgcgtcagaacggcgtcctcgtccctctgtttaacgagcgcgaaattccctttttcgatcgattggagggcctttaaaagggcttccgcgccgagaagggagaggcggtcggaaagttctccgaacgtttccttttctccgatttcggtctttaaggaaaggagtatatcccccgtgtcgagtccgagcgccgtcttcatgacggtgacgcccgtttccctttcgccgttcagcacggcggactgaatgggagatgcgccgcggtatttgggaagcaggctggcgtggatattccatacccccaaaggaaagagatcgagtacttcctgcgtgagaatctgcccgtaggcgcaagtgatcaggatatccccgccgagcgccttcaaagcgtccgtttccgcgcgtattttttgaggctgaaagaccgtcaagcccctttcgagcgcgaacgctttgacgggcgggggcgcgaggattcccttccgtccctgcggcttgtccggctgaacgacgacgcccgcgacgccgtatccctccccgattatttttttcaaaggcgccaccgcaaacctcggcgtgccggcatagacgattttcataaatatcctctcctttcgcccgcggtccgcggccggaaaaaacgcgcggcggaaacggtggaaacgttccctttcacgccctttctctatcgcccgaaacgggattttctattccgcttcgacgtgctgcgcgaggtcgatatacagcactccgtccagatggtccagctcgtggcagacggcgcgcgcgaaaaagccctttgcctgcaaaatcctgtgttcgccgtgccgatcctgataggagagtttcaccttcatgggtctggaaacgacgccgcgcttgccgcgcacggaaagacagccctcccagccgcactgttctcccttttcggagatgattttcggattgacgaattcgaagaatccttcctcgacgtccacgacgacggcgcgccgcaaaacgcccacctgcggcgccgcgagtcccgcgccctcctcctttcggagggtttccttcatatcgtccaaaagcgtccaaaggctctcgtcgaaattctcgacgggaaagctctttttgcggagcgtttcgtcccctatctgcactacgtttctgattgccatataaactccttttcgtttcggcgacaggcggtttttttcccgcgatcgcccgatccgtccttcgaaatttttttaactctgtcttcccgccctcttttcgctttgccgcgcgtccgcgcaactcccccggcttaaaaggcgggcgtcagctcaaattggtcgggttttcctccacggacaccaatacgtcccgcgtccgcgcttccacgcacgcgtcgtagatattcggcaaaatcgacgtgtccgacagccgcatcagcacctgatagcgaaatttattctggatgcgcttgatgggcgcgtgcattttatggaagaacaggaatttatccgcgttctccgtatacagtctttccagcgagaaatacacgccgcgcagagcctctatcgtctttttgtcgtcctcgcccgtcaccagaacgcgcacgatcttggaaaagggcggaaacgccgtcgccgcgcgcagggagatctcgttttgataaaacccctcgtaatcgtacgccacggcgtagcgcagaacgtcgttttcggggctgaacgtctgcaaaaccaccctgcctttttcctccgccctgccgcttcgccccgccacctgcgtgatgagctgaaaggtgcgctcgccgctcctgtaatcggcgaaatgcagactcatgtccgcgtcgagaatccccaccagcgtcacggagggaaaatcgtgccccttggcgatcatctgcgtgcccacgagaatatccgccttcttttccccgaacgcctttaaaattttgtagtgcccctccttgccgctcgtcgtgtcgttgtccatgcgcagaatacgcgccgagggatagagtttttcaagctccgccacaatccgctgcgtacccgtgcccgcatatgagagcttatgccccccgcagtcgggacaaaccgcgggcacccggtatttggcgccgcagtaatggcattttaaacagtcctcgtccctgtgataggtgagcgccacgtcgcaggcttcgcatttggcgacatagccgcattccttacagatgaccgtctgagaatagccgcggcggtttaaaaacaagatcgcctgattgccgcccgcaaggcatttttccagttcctctttgagcgccgcggaaaacgcggagttgtttccgcgccgcacctcccgccgcatatccgcaatgacgatttcgggcagcggcttttgattgatgcggtttttcagccgtattaagccgaactccccgtctatcgcccgtttataggtgtccacggcgggcgtggcgctgcccaggaccagcttgcagccgttgtgcttcgcgcgcagatacgccacgtcgaaagtgttgtagcggggggcggtttcgctcgaatagctcgaatcgtgttcctcgtcgagaatgatgacgccgagattttcaagcggcgcgaacaccgcgctgcgcgcgccgatagcgattttcgcctcgcccgatctcagccgccaccattcgtcgaatttctcccccgcggatagcccgctgtgcatgatcgccgcattgcgcccgaaacgggaacggagctgagaaagcatctgcggcgtgagggaaatttcgggcactaaaaagatagagctttttccctctttgaggcatttggcgatcagcgtcagatagatttccgtcttgccgctgcccgtcacgccgtgcaggagctgcaccgtccgcccgtccctttctatccgctccaccgccgagcgctgttcgtttgtcagaacgcggtcgggatgttcctcttcgagtcccttgtacggatcgcgcaggagctgttccttcgtcacttcgacgtagcctttcttttcgagcgcggcgacgccgcccggaaaaagaccgttcaaaaatccgcagtccgtcttgccgtgttccgcgagatattccgcggcgccgagctgatttttcgccgtcttggaaagcttgatttcggaaaaaggcgccttcaaagccgcgtagttgcgcctaagttcccgcacctttcccgtacgcatttccgagggcagaaagagccgcaaagcgagggctttgggcacgcggtagcgggcggtgagcttttccgcgagagcgaggcactcgccgtttaaagcgggaagctcgtcggggcagggaaaaacgcgcttcaatctttcgggcggacagtcggaagcgtctttgaggcgcatgacgaagccggcgaccaccttgcctccaaagggcgcgcggacgcggctgcccgccttcgtgccctcgtcgcagagataatcgtatattctgtccgtttcgccggaggcgatgtccactattacttccgctatcataaatcctcgacacctgtctttgtccgccggaaatcttccgcccgcattcctttccgcacacgaaattttcccgcatctttgcggcggtttctttccaatcccgtaaggggcttccccaaaaaggaatacgcaggggaaattttcggccgccgcagagaacgtttcccgaagaattcgccgcgaacaccgaagaagtttctccgtgttcctccgccgcttaaaaaacgattgccccgaaaaattcgaggcaacgcacaaaaaacgcaagggaatgaaaaattcagtccttggcgatgatgacctgaccgtccgcgatgtccctgcaagccgtcaggatctccttgtccctgcccgtaaaatcgtgaatgccgcggtttctttccgcctcgatgatctggcgggcgcgcttggacgccacgacgcaaagcgcataacggctgacggggttttcctccgcgcccaattttcggatcaatacgtccactgccggttcgtttatcatacttgtcacactccttaactgttatttgattccgcccaatcgccaaagttcttttttcaaaatattccgggcggatgtttcatgcaaatttctataaagcgccgcggaaaaacgcgcgccgttcccatcgccgtatcgcggcatttctcccctcttttcccgttgcgggatctttccaagcccgcgcttcgcttcccgaacgccccgactccccgcgtcagggctgcgtttttcctcattgataaacgccttctcccgtccgcaaaacgccttgtttttcgaagcgttttaaaaagcccgcgcgtcgtctacttgttcttttcgtcgtcgatgatctcttcgagtcgggaaagggcgttttccagcgtatcgttcaccactacgtaatcgtaaagttcctttttggaaagttcgtactcgatgcgggcaagacggtttctaatctgttcttccgtttccgaccgccgtcctttgagccgttttttcagttcctcttccgaaggggggacgatcataatgaggaggcactcgggaaaaaatttctttgcgttgagcgcgccgaccacgtcgatttcgagaatgacggatttttctttgagcgcttcgcggacaaaggatttgggcgtgccgtagaagttgccgaaatgctcgtcgtattcgaggaactcgccccgatcggcgcggcgcaaaaattcttccctcgtcaaaaagaaatattctcttccgtcccgttccccctcgcgcggcgcgcgggtggtgcaggaaacggacgccgcgacgtcccgccgcttttttaaaagttccttcacgagagttccctttccgacccccgaaggtcccgatatcgccatcaaaatgtttttcataagctttcggtaaaaaccctccgcgccctttccgacgcccgactttcgtaaaattccgcaattccgccgccttcgcctttcgcgcggtccttcaaagcgcttgccgttttcccgttcccgcggctttgctcattcgagattctgcacttgttcccggatcttttctatttcgtttttaagcgcaagtcccagacgggtgatctcgatgtcgttgctcttggaacaggtggtattggcttcgcggttgaattcctgaacgaggaaatcgagttttctgcccacgatcccctcctgagaaatgctgcggaactgcgcgatgtgggaaaagagcctcgtaagttcctcgtcgatattgctgcgatcggcaaatgccgccacttcggtgagcagtctgccctcgtctatattcacgccttcgagatattcccgtaccctcgcctccaatttttcgcggtaagcttgcgaaactttgggagcgagcgcggcgatgtcccgcaccaggttttcgatggtttccatgcggaaaagcatatccgctttgagcttttcgccctcgatttcccgcattttattgagatgggagagcgcgtcggaaagcgccgttttaagagccgaaagaagcgcctcgtccgccgctgccgcgtcgtcctgcttcaaaacgtcgggatagcgcaaaacggaagtcagcgtcaaatcgtcttggagggacggaagcgcctctttgagcgcctgcgccgccgcggcgtaggacagggcgagcgggacgtccaccgagagagcggcgggcttttcgcgtttgtccttgaacgaaacgaacacgtcgacgtggccgcgcgtcatcttgtcgcgtatcgcgccgcggatgacatcctcgtacgccataaaaattttgggcgccttgacggatacgtctaaatagcggttgttcacagtcttaatctcgcaggtcagctcgatgcctccctccttgcattccccttttccgtaccccgtcatgctcaacatacgaatcttccccgtccttttttcggcgtttttttcatccccgtctttaagttcctactattatagcagactttcgggaaaaattcaagcggtattgcgattttttcccgatttttttgagaaacggacaggggaattttcttgtcttcccttctctccgccccctttttccttacgtctttgttcgccgcgtcgaaaattctcttttcgctctcgtcaaaaacggcgttccgcccgcgcgcggcgcgaaaaaagagtagccgccgtcagccgcggataaattttttcaccgtcttttcttcggctgcgggattgagcagataaacttgttccgctattttttcctccgcctgcgcgggggaaatttcgagcgcgtttttctctaattccccgccccagaaatctcccgccgtcgtgaaagccgtactgttccagccgtattcctccccgcgcttgtttaccttccgcgtgcggccgcacatagtgatcaacagtttcatctgcaaatcgacgagcgccttttcaaacgcggcattttccccctttgaaaatccgccctccgcttttagctcgggcacggacaaggcgccgcgctctaaaatcgcttcgtaaatgcgcacggcggggcgactgagttccccgtcccgatacattttagaaaagtcctttcccttgcgccgcacggcgagaaaatacggataccactctttcgtgatatagccgctggcgcggaaaaataccttggcgtaggcgacgtccgatttttcctccaaaacgcgcatccgccattcccagggatccgtttccctgtcccccgtatgccatttgacgggggaacccggaatctcctgccgccagtcgaaatcaatcagcgcgaaaatccccttatcgctgccgccgcccatcgaaaagccgcacgtttgaagcgcctcgtaaaaatccgaaaaattcctgatctccattcttttttctcccgtaaatatccgaaaaagcggagtttcgctccgccttttttatccttccgactctgtttcgtcctctttcaaaagcctttcaaactccgcctcgtcgataatttttatgccgagtttaagcgctttttccagcttgctgcccgcgtcctcgcccgcgaggaccaaagtggtctttgccgtcacggcgctttggcagacgccgcctgaggactcgatcagcttctgcgcgtcgcttctcttgtatttggacaaactgcccgtcagcaccaccgattctcccgcaaaaacgccgtccctgacgctctccgtttccgctttcggcgttacgcccgcggcaaagagcgcggaaagctctttcaaattttcttcgtcctgaaaataggcgatgacgttgtttgccgtaatgccgccgatattctccaaggcgacgagttcctcgtaggtagccgctttcagttcctctatgctcttgaaacgcttggcgagatcttttgccgcgactctgcctatcccgtcgattcccacggcatagatgaaggcgtcgagggacacccgtttgctcttttccacggcggacaaaagattgtttatcttcttcgtcttgaagccttcgagatcggacaggtcctccgcggtcagacgatacagatcggaaaagcttttcacgccctttttgtccatcaaaaggtaagcggtgctctccgaaaatccgtcgatgtccatcgcgttcttgccggcgtaatgatccaatttcgcggcgatgcggggacggcattcccgattggggcagaaaagatgggcgcccacttcgtttaagggcgacccgcaggcgggacaaaaggcgggcttttctatttccctgctgtcctccgtgtgctcggtggcgcctaaaatttcgggaatcacctcgttggaacggcgtatcagcacgcgcgagcctatctttacgtcctttctcaaaatgtccccgtaattgttgagagtcgccttgcggacggtggcgcccgcgagttctacgggctccaagagggcgagcggggtcagtttgcccgtcctgcccacctgccagacgacgtccaagactttcgtcgtcacctcttccgcttcgaacttgaacgccatcgcccagcgggggaatttatccgtataccccatcgcttcgcgcacggcggcgtcgttgaccttgatcaccgcgccgtccgtcagaacgtctatgtttttgcggtccacctctatctcgtcgatggcggcaagcacctcgtcctcggacttgcagattttaaaatacgggaacaccttaaacccctcgcggacgagaaaatcgtgcgcttcctcctgcgagagggactcgccgcccgacatataattgatgtcgtaaaaataaatatccggctttctttccgcggtgattttcggatcgagattgcgaatggcgcccgcggcggcgttgcgcgcgttcttcaagggctccgcggcggtttgattgtatttgtcgagcacggaaaggcggatgaccgcttctccccgcacttccaaaacgccgggataggaaatgcgcaagggataggatttgatcgtcaatacctgcgccgtcacatcctcgcccaccacgccgttgccccgcgtcgtcgcgcggacgaattcgccgttttcgtaggtgaggcagacggtcagaccgtcgaacttgtattcgacggtatacgccgcgtccccgcccgccgccttggaaacgcgcgtcaaaaacgcccgcatttcctcgtccgtgaccgatttatccaggctatacagcctcgcgatatggttgtggcgcacgaacgcctcgatggggtcgcctcccactcttctcgtcgggctgtcgggatacacctctccgctctccgcttccatgcgtttgagttcgtcgtacagggcgtcgtattccttatccgaaacggacggattatccaggacgtaatattcgtgcgcccagcgattcaaaatgtcggtaagttctctctgcgttttcataatactctcaatttctcaaaatatagttccgcgccgtccgtcgaaagcccgccaaacaggacgaaacgccgcggcgcgcccgaacgtcccgtcattttttgatcgtcagcggcgccagggaggcggaaagctgtttgatcccaagccccgcgaaggcgatgtccaaaatcatattcgcgcccgcgccgcggacgtttacgatcgtgcccaatccgaatttgggatgctccacctgcacgcccgtcttgaaggcggacagatccttgccgccgcttgatttcggcttgctcgtcccgctgcccacgcccccgtaggtgaaggcgcccgaagacttggaagacgtagaacgggaagcgccgtaagagccgctcctttgcgccgccccgccatagcctccgccgtaatttccgccgttccaggcgcttctttgcggcgcggaattctgcctgtccccgtacccgccgtaagaatttccatacgaggaaccgtatctgccgccgccgtatgcggcgttgccgtacgaatcgggatcgtcgtcggaaaaatacccgtcgtcctccgcgtatccccgatagccgagcttcggctctttgggaagttcgagttccgaggaaagttctttgaggaaacgggaacgcgcggtcggctcccgcttgccgtagagataccggcttttggagcgggtgagatacagcctttcgcgggcgcgggtgatggcgacgtacatcagccgccgttcctcctccatatcctcctcgttttccgtcgcgcgggaaacgggcaggatattttcttccagcccgacgatgaacacgcagcgaaattccagacctttcaccgaatgcaccgtggcgagagtgacgtagttgctttcgtccatatcgtccgtatccgaactcagcgtcacctgattgagataatcggtgagcgaggagccgggattcaagcggcagtattcgtccacggagttgataaattcgtcgatattggcgcgcttgttgatgctttcgtcgctttcgtcggcgtacgcctcccgcatcttcgtgtccgcgacgatcttgcgcacgagttcgttgacgggcaaatcctgactgtccacgatccagcccttcacctgatcggcaaacgcctgcaatttctgccgggtgcccgcgttgaagctcatcagttccaaatcccaaagggcgtcgtaaacggaaagctccgtttcgtaagcgtaattttccagcgcctccaccgtgcgcgcgccgatcccgcgcttggggaagttgatgatgcgcaccgccgcctcgctgtcgaagggattgttgacgagccgcaaatacgcgagcagatccttgatctccttgcgctcgaagaacttgaagccgccgaacaccttataggaaatgccgtccgaggtaaactcctgctcgaaagaccgcgtcaaagcgttcaggcgcatcaaaatggcaaagtcggaatatttatatcccctgttcatcagccccgctatcgtatgcgctatgtacctcgcctcgccgctctcctcctccgcctcgaaaacctgcgccttttccccctcgtcgttcttcgtccagagcgtcttgtccttgcggtgcccgttattgtgaatgaccgtattggcgagctttaaaatgttcttggtggaacggtagttgcgttccagcttaaacgttttcgcgccgggaaaagatttttcgaagtgaaggatattttcgattttcgccccccgccagccgtagatggactgatcgtcgtcccccacggcgaacagattgccgtgtacggaagcgagcagacggacgatctcgaactgcacggaattggtgtcctgaaactcgtccacgaggatatagcggaacctgccgccgaggtactcccgcgcgtccgcgttgtttttgaggagcagacgggtttcgttcaaaagatcgtcgaagtcgagggagttgttttcccgaaggtgcttctgatagcgggtgtatactttcacgacctcgtcgatatcccgttccgccgcgtattcggcggcgtactcggcgggcgtaagccccagcattttggcgttgccgatatgccatttgacgttcttcaacagtttttcgtcttcgtattcgcattcctgaaaggattttttgacgatattggagcgctccgtttcgctgtaaatggaaaaattctgattcagtcccgcctcggaggcgtacattctcaaaatccgcacgcacatactgtgaatggtacacacccacattccccgcgcgtccacgatttttccgatgcgctctttcatctcgttcgccgccttattggtgaaggtgatggcgagaatcgcctcggcgggcacgttcatatccccgatcagatgggcgatgcgggaggttaaaacccgcgtcttgccgctgcccgcccccgccagcaccagcaccgcgccctccgtcgtcaaaacgggttcgatttgttcgtcgttgagtttatcgagtatttcagtcgtttgattcataaaaatattataacataccgccccgcgttttgcaagcttttcgggaatggatttgaggtggcaattttcgtcgccgggtcgttttttgcccttttaaagaagcttttttcccgccgaacgcgcctgaacgcttttgaagtttcgcgttcctttccgaaaaaaacgactctttggaaaaaaccggcagtcgcggctttctttgcgtttttatgggcggcgctttcaaactcgcgcgggaacgcctcggaaaggtttatggccgtcctttttcgcgcccccgcgcgaaacggggatattttttcgcttacgcctttttggaaatggaatcgaattcgcattcgcgacggaagcgttcgagcgcgcggaggtatctttcgctcaaagagagcgtgtagcgctgtttttcttcgtaagagagggtgtcgtaatattctctgtcggtgagtctgccgatggcgtcgctcacttcgccctcgttgaccagcagttccttcacctttaagtaaaacgcatcctccttttctcccacgagcgttgcggataccttgctcttgaaataccgtcccgctttgctttcgtttaatccctgctctttcgctttttccatttgtgcgttcagttcgtccttgcactcgttccagaatccgtttttcatgcggagtttcgcctgacgcgcaagccctcttaaagtgcgctgctgtgtcactttgtacttcacctctcttttttgtgtttttgtatttattccgaccaaccgcgattcccctttcaaaagagaatctcccgggtcttttccgttcgtcggggcgccgtcttttgatacggacaaactccgtccgcgctctttcagccgccctttttctttttccgaaatatgttcgccttgaactattttcggacgccttgtttttcggtttcgacgccttgcaggcggcacagcgccccccgtgtttttgcctcccacgccccttaaaaggaaatcgggcgattttttgtcggagatagcgcgggcgaaaaggaattcttgcgaatccaaaggaacttgcaggcaaaaggaaaatttgccaacgaaaacacatttgactcttttcccggcaagcgaatatttttcgcgaaatcccgacttttttcgctccgtttcgacatatatctacaatttttgcaaataaaaaagcccaccgcatatgcgtgagctttcctctttcgttagtttttgtttctctttctggcagcctcggacttcttcttttttcttacggaaggcttttcataaaattccttctttcttaaatcaccgatgatgccgtcgcgggagcactttcttttgaaacggcgtaacgcgctttccacgttctcgttttctcctactttaaccgtagacattcctctcaaccctccttcgcctcaggcactttttgttaccttgatattatatcagtccaaaacttttctgtcaagtcttttacccgattttttccaacctttttcgcggatttttttctttataataactccatgacatttcttagcagaatcgcataatttactgcgaatccttctccgctggaacgcgtatggaatgcatgggaacttaacgaaagtcttttttcatcgccccaataggcataattttcacgatacattacatattgaagaatgtcttcatacaacgtaaacagtattccgtaatattcggtataatatttgttctcttcataaaaccattcccaaacctgtttcttatcgtaaagaagttccaagcaacaatcctcttcttttagctgcgccaaactttcttcatccaaaacatcattgcgtccccatcttttataatcggaatcgagaatatcgtttaacgtatcccataaatcgttcgtttgttcctgcgacagcgttctcactcttcccttatgatagaattttatcctttccggctttaaaatcgaaccgttctcaataaggacttcttcctgcggaacggaaggcagcgcgtattcgttttgattcccaccgcaccctgcaaacaaaaaaacagtcgctaacaatactccaaaaatcttactcctattcataacgttttctcccctttaaagccctaatttttccggataaaataattcccccgttaaaagattgagtattttcacatcgagcgagcagtttccctgcgcgtccgttatttctttttcgataatcttagacggaataggacgtccttccaagaccaaataataatcgctgacatttaaaatacccgcttctttaaataatccctcttccatttttctttccagagtttgacggacaacgggatgatccatatcgataaattcgttttccgtaatgtgatatctggattcaaaaacgccgatcgtttctccccgtttattatatacgtaagtataggcgtcattggtcaaaacgccgtttatttgtctttcatatctttttatacgcggattcgtactgttcaccaacgtatagccgtcgggaggggaaacaatgtttctcggctcaacgatataactgttttcgtttgcggggaaaataatattgtcctcatccccgtaaatgataaacgtacccaatccaaaattgtcaagatttacttgtatagccgcgactgctaaatccgccgcttcttgcacagtctttcccaacagcaattcatctacaaaagctaaaatccaacgattggagtatggccgcgtagtggattgttcaaatcctaaagctgttttcgcgcctttttcaacgcttttactcgttatattagtgtatccccaagccgagttgcatcccgcccatacaataagttcgcaattattcaaagaaggcagcatagatatagataaatgtccgtcgtttcccacttgcgaagatgttcctgtattatattctgcactctgataggaagcgtgtccgtcaaaaatataaatatcgctgtctaaaataggcagccccgttacggggtcgatcgtgtttaagacaaaatcgggcgtcatatccgcttcggtattcgtatgtgcccaaaagccgtgcgcattcattttcgccgcgttttgttccgcttgtattctcctgtttccgtcagggtccggactatgtccgtatatatcggtatctgtcagacttgtattcatgccgtgcagataggctacaaactgtctgacgcggagcgtatacgcggcatctatcgtattttgagaatcaaaaacggagatataataagtcgtatccgcctttaaaaaaacgttgtaaatttgtcccgcggaagtattatatatatgcgtaaaggcaggtctgtccgcatcggcgttcaaatagacgcccataatggcgttccccgttattctcgtcaattccaccttaaagcgcgcgtcgaaatcggtgcgaaaggtaaaatattgcagttctccgtaggacgaaatcgacttggaacaagcagtattcattgcaagcgaatccattcccgcataatcgaattccacttcttccagcgcccacaaatctcccatactggtacctatcacagtggaatatctttcctctttcaattcgttccccgcattgagatatagagtataattgggaagggcaactgaaattttatagactgttcccgcagcgctctccgacgatgcggattccaggtgaaatttttgagtatccgaagaagtttgaatggcctgtataaaagccgtctgaaacgcttccaaagccatatccgcacgatgcgcgggggcaaaagtataggtattggtcgccgtgttgtactgcgttttccattgctgattttctccgccggtaaaacgcctcaactgtatcattgtcatattggaagtcgaataatcgggaacgtccaaatacaaacccgtttttaaatttttcaaataatattttgtataggaatcataaacggaactgtctgtattttgcaaaatccattcggcatatcctcgatttacagcagacaaacccgcgtaacttttttgaacgacattgtcggaagtcgtattatcaaagcagagcgctttcgtatagtcgctcacctgtgtataaataattgccttattcgagtctaacattttgagtttgaatttctgattggtcgtataaggcgctctcgttgaaatgttaacatttccttcttccgtatttgccgctacattgacgataatctgcgagctgccgtacgggatcaattcatacaaactcattcccagatactgtaatttaaatttttgagtggaactcgattgataggcactcgttacgacagaggtaccgtttgcattgcttccgccttttaaatcgagatatgttccctgtttaaaatttttgagataatatacggcaccgtcgtatatcccgttatcgtatcgatgttttcccgaagtcaattctgcggcggtcatcgcacgaaaatttttctcataaatttccggatccacttcctccattttattttccgatatgttttcctttacgtccatgggtttattctgcgcgcttaccacaagcgcctgaatactacaaaatagaataagcagcaagttcacggctaaaagatagccgatacgtttaaatcttctcatctcttctcatctcttcccctctttaattcctgtgataaaattttgcagctgactgtttcaaatttaaattcctttttcattccctcctttattcgttctaaatatagcatacttcttcccataaaaccatagctttattttatatcttgctcaaatttttatatatgttttttctatacgtcaaaacgcccgccccaaatttcccgggcgggcgtctgaatgttcgtaattcgtttaatcgagaagctcaaaatcctctgcgccgtgcttgcacaaaggacagatatagtcgtcgggaaggaactccccttcgtagacaaagccgcagatcttgcacacccagcgctttgtctttttatctcccgtttccgcagccttgggcgcttctccgggcttgggtttgatatgggcgaaataatattcgtacgtcacggaaggctccgctgaaagcactttcgcctccgtcacttccgccacaaagagcgtatgcgtatcgtagtcgagaatatccgtcaccttcgcggaaatcaccgcgttcgtgtgctcggggagatagtaaagcccgttggacgtgcgcggatacgtctttcccgcaaatttatatacgtcgcgtccgctcgaaaaaccgaactgcttgaagatgtcgaacggcgcgctctccgtcagcaccgatacgttgaacacgcccgattttctgatcatctgctcggtataattgagtttattgacatagacggtgatacgcttgggattttcggtaagcatggataccgtgttgacgatacagccgttgtccttgacgccgtcgtttacgctcagcacgaacagaccgtaagtgagtttgaacatcgcgttgttttcaatcttattttccatctcgtcctcccgatgcggcgcgttcgccgccgttacgctttccaaagcccgtgcagattgcagtacgcgtacacggctttcagcgtatccccctccgcgaggacaaacgtcgcctcgggcttatccgtcgaacaaaaatactgcaccgcatatcccttctccgtttccaccgcgacccattcgatcaggtgttccgcgctcatgggatgagtgacgcttcccacgttgaccaccaccgtattccccgaagccgcgacgacgggaatgtgcttttccttcgccccttccgtcgtccccgcaatcagttccttccagccgtccaaagcaagctcgtccgtcgtaatcagtactttcctgcatttctcgcattgataaaatttaagttccatcttttatatctccttatttcattgatttattaagattaaatcctattttattataacgcaaaaaaaaggatttgtcaatagtatatgtaaaaatttccaaaaaatttattttttctgtattccgccgcggctttttaaaaagcgtttctctccgcgttaaacgcccgcttcgacgacgtttccggcgcccaataaggagtcctgccgccgtcagacaaatgcgggcaagcgcatccaagcgccttttttatctttttcgccttttcccgccgcggtggtcgccggttttttccttcaatccccgaagccgtatttatataagagttcgtcgagataatcgcaggattctttaagctcctccgctcttaaaaaatcgtccttgtacacctcgatgatgagggggccgtcgaatcccgcgccgtcgagccgttttaaaaattcgggaaaatcgaaaatccccttgccgggcagtcgaatttttccgtcctcgccgacgtccgaaacgtgcacgtgcgcaaggcgcccttccatttcttggagatacatcgtatacggataagaggagatcctcgcctgcttgatatccaaaacgcaggaaagagcgggacaaaattcccgcgccgcgcgcaaaaaaccgggacgattatacattgcccattccacgttttcgaggcataacccgatgccgaaagaagcgcagaactcggaaatttctctgagtcctccgccccatgcggcgaaattgtccttttcgccggagcgggaggcccgcttgatgcgcgcgattccgtggaaggtataatactttgcgccgagcgcctgccccgcccgcatagctctttccagccagaaaaacgcatcctttttcacgcgcggattgccgctgaatagctgaggctcgaactgcgtattgagtacgtgcacggaatggacgcgcacccgcccctttttctcagccaaaagttcgccgaaattccgatcgtactcggaaaaggaagtgagaaacacctccgcggtcctcacgcccaaggcgtccagcagcggcagcgcctcctcgttattctctctcataaacagcgacgccgtggatacgcccgtccgcatcatttcaagtccttctttccgatattttttcaaacttcatcttaccacaattcaccgcaattgtcaacgcccgaccgcctcttttttcccgccttcttaaagttttatacttgcgcgccgcagcaaaggaagccgttttatacaaatacttttacgttcggaagggaaagaaacgacggagtcgggaggtgtccgtccgcaaaaaaagaagccaaacttcgctgtttctccgttcccgcctttttctcttcttttctcccttcctttcctatttccgccccttccgtctttctctccgttcccgttttttacggcttttcatataaattctcattcgcgtattcttaacgatgcgttaaacccgtaatttttaaaatcttgtcgggacaggagaataaacggcgccgtgcgcgcgctttctctatccgccgcatggccgcgccgaagctgaaaattcgcctattttcgttccttttacacgataatttcggagggcgacgattaattttttatagggcggaaatcgcttcttgctcccgcattctattttatcggcaacgccggcgcttcccggatactgccccttgcggggcgttttgcgatacaataaaaaagaacggtctttacccgttcctttttctctatttttttacccgcatgacgcacgccgtaccaaaggcgccgccctcctcgtcttcctttttcggggcatccgttttcctacccttcaacagctcccgcgcgggcctctgcccgtccgcaagcgccgcggaaacggacgccgcgatcatgatcgcgcaccccgccgcgaggggaatcgtccaccccactttgcccagcatcagactgaacaacacgcccgccaacgattcaagactcagcaggatcgccgtcaaagagggagagatgcggctctgcgcaaatgtctgcacgaggtaggcatacgccgaactcagcgcgccgagatagagcacggcgggcaggcagacgctccactcgacggaggcaaacgactgccgttcgaaagcgagcgccccgcaaagtcccaaaagccccatcgtcagcatctgtacggcgttgaagttgaacacgtttattccgtccgcgaatttatccaccaaaatgatctgtacggcaaagaatcccgcgcacagcatagtgaaagcgtcgccgcggttgaaatttccgcccgcgcctttgaggtcgaacaggaaaaacattcccacgagaaagacgacggcgttgagaagaggcctccactgaaattttttgcggagtatgcaatagacgacgggaacgacgatgacgtaaccgcccgtcagcatcccgctcttcgccgtatccgtatagagcaatcccaccgactgaaagaaaaatccaagaaaattcagcgtgcccaccagcgcgcccgcggcgatttcctttttcgtaaagcgcgcatattgtttggttttgaaaaggcaggcgcggaggacaaagagaaggaacgcggccaaaaggaatctgcccgccagcatggtgaaaacgcccatgctgcccgtcagggcgtcgtccgttacgataatgccgtatccccagatgaacgtcaccgacaaaagcagcgcaaggcacagcattttcatgccctttcccgtgttttttaaagctttcgtcttcatggtttttcctcctttccgcctcccgcggcgcagtttctttaaaatctgagtgtgcggtccggaaaacgggaccatcccgttttccgcctttttcgcaagatggagagggcgccagggatcttcctccgtcttgtcaacctttaccgcctcttgaaaaaattatttttatgtgccgtatcttcgcgggcacagcgctccgttgcctgtttattatatcacttttttcccctcttgtcaacctttccgactatattttttgaaagaatattctttttatatatcaattattctaaacaattaaacaaatataaatttatatacc

SEQ ID NO: 3913 - DNA, 9694 bp, Unknown
  16S sequences of unknown bacteria
ccgccgccgccgcgtccgcgcagaccggagtcgaggatcgtcttgatgacgtcgtccggcgtcatggtcgtcagaaccttgccgagagcctgatagccgtccatcgcgatgtactcgtcgatgttctcggggtcgatgacgccgcagtttctgagcgcgacgcgcttctgggtcttgtagaaggtcgtgtcgttaagcgagacgttgaccttgtcgcggacggtctcgtcgacgtccttgtactcgaggcgctttacgggacgacccttgagaagatgctcgtttacgatctcctcgacgtcagtcgcctgaacgcgggagtagaaggttccgtccggatggacgatgacgaccggtccgacggcgcagagtccgaagcatccggtgcggacgatctttatttcatcggacagaccagccttcgcgagctcggtctcgaaagcttcctgtatcttgtcgcttccggaggaagtacatccggtaccgccgcagataagtacgtgtgaacgaatcatttattttaccatacctttcgttttatcgcttattattttgctgccccgatcgtgtattcctcgacgatctttccgcccttgatgtgcttctcgacgatttccttcgccttctcgggggtcatcttgacgtaggtgaccttgtccttgccggcttcgaagacctcgacgatcggctcgtactggcagagaccgatgcatccggtctgggagactgtgactttgccggtgagtccttcatttgcgacctcttcaacgagggtgttcagcaccggacgcgcgcccgccgctatgccgcaggtagccatgccgacgacgacgcgggtctgaccgctgccctcgcggagtatgacgttcttctgcattttttcacgaattgccgcaagctctgctaatgatttcatgaaaatctttcctttcgaaatatggtttgtttttttgactatgttaatgtgccggaattatctgacgaagacggagcttccgccgccgtccccgtactgttccgaaagactgtcctttatccagacgagcacatccggcgttgaaagcggaacatccccgaggacctcccgcagctctcttgtgtcgagcgacaccgcgagattctccgccgtatggcaaaacagcaggtcgctgtccggatgcccctgtatcagggtcactatcgtcgatatcacgtccccgagcggcggcgaatcgatgtgccgggtgtcaaacaccgcggtcacgaccgtgccgtgatcctccgggaactcgtcgatatgccttgacgttatctcaaggctgccgccggtctgctccgcggcgagacggagaagcgggagtccgagcccgaccttcctcgtcgtccgcgacgtggtgaacgggtcagtgacccgcgacagcatctccggcttcatcccgcacccgtcgtcggttatcctcagggtgaggatgccgcccttctcggtaatcgaaatcccgatgagccccgcgcccgctttcgccgaattctcggctatatcaaggatgtgaagggataattctttcatattcttccgagttttattgactttacaaggttttttcgtatctcgtccgggctgttcccgtcaagatatatcgtgtgttcggcgtcccgtatcgcgtcgagcctgtgcgcgtcgctccccgacaggaatttctttccggaaagggaagggtgcgacttcatgagctcttctcgctttgacatatcgttcagttcaacgcactctgtcggaaaatccggcggaatgtcgccgagtatcgcgattatgccgttcgaggggcggtcgatgtgcgccgggtagcagacgccgccgtggcggtcgactatctccggcagatcggtgagcccgattccggtcgcgacgacgaggagatccgggtcagtcccgaggacgttgtcctcatggtcgactatcagctgttcgccgtaaatctccgggcggttctttatcgggaaccgccttcccgcgacctcctccccgaagctcatcgctccggaaagcgtcccgaaaaggcacacgacgtggatattctccgcggtctcaagctccattcccggaacaggtatcaccccgaccgcctccgccgctctgaagaaagccgggcagtttgcggttgagttatgatcggtgagcgcgagtatctgaagccccgcgagcattcccatgcccgcgatattcgacggcgtcatgtcattgtccgcgcagggggagagacaggaatgaaggtgaaaatcgtagaaataccgctccatcccgctcctccgtcagacgccgacgccgagcatggcgagctccgccgcgacgcggtaggaggtcttatccgacgtgaggacgtttatccccttggtcgaagccgcctcgagcgccggcgggtcgggtttgactccttccgccaggatgacgcaggcggtgtccgcgagcgtcgcgaccgcgcagatatttatgttcgacatgatcgtgatccacgccgaatccgccggggcgcgccccatcacccacgagagcaggtcgccgatgtagacgtccttcacctcgcggtcgggctccgggagagaaatcacgccgagcccgagctttccggagatttccttgacagtcattccgggtcctccttgtcagatttcctgttgtccgcctgtctcatgctcatcaccgggcaaatacggtctcccgcgatgccacggacgatatcctcagcgaaagcgcggcaggacggcgctccgcacgctccgcagtctatcccggggagcgtccggcgtatcctctcgatctccgacatcatcatcatgctcgtcgcgagattgtccgagagcttcgcgcacggtacgtcctgcgggagggaatcgaagaaataatccgccgggatgtatttctcgccgagcggcggctgattctgcgttatcggcagataccgccgcagagacaggagtctcgccctcgcgatgaacggattctcgatcgtcatagtgccgccgacgcagcctccgggacaggcgttcagctcgatgaactcaagcccctgtatgttcccgttctcgatctggtcgagcaccctgacgcagttctcgattccgtctgtcgcgaggtatttatcgttgaatatcgcggtggattctccgcccgacgacgcccagccgacccctaaagcccccgtctcacaggagcgctccggagtaccgatatgcttaagcacgtgcagaagcgaaaaatacacgtccgcgaccgagagcacacagtcgacctcgctcttatagcccgcgaacccgttcttcacgtaactcaccttagccgggcagggagagatgaagcaggtcaggatgtcgtcgtccgaaagctccggacgcctttccttcgcgcgcttcctcgccgccgccgccgccacctccatcggtgggagcatcggcaggatgttgtcccgcaggaacggaaatctcagcgttataagtctcacgataaccgggcaggcggagcttatcacgggcttccgtatccccggcgtcgacatatatgtcctcgtgtaagccgacaccatctcagccgaggaggcgacctcataaacgtcgtcaaacccgatgccgtacagcccctcgattatgtaatcgatgtcgtcgatgccgccgaactgcccatagagagagggcgccggcagcgctattttgtacttctccgcgaaccttccgtccgcgaattccgaaaaaggcaggaaagtaggacgcttcgcctgatgcgggcactcacgaatgcagaccccgcagtcgatgcacctcgtactgtcgatctcggcgtgcccgtcccggacgcgtatcgcctcggttgggcagtgcctcagacaggtagtacatccggtgcacctcgaaacgtcgagcgtgacagaatgcgtatagcttcccattctgacctccttttttttcaggagattctgaccttcattgtgatcttcgtgccggagccgacgacagaatcgatgtccatctcgtcggtgtagcgcttcatgttcggaagccccatcccggcgccgaagccgagctgtcttatattgtccggagccgtcgagtacccctcctgcatcgcaagagaaatatcctcaattcccggaccgtgatcctcgaggattatcgtgatgccgccctcgtcgaccgacacgtcggcgacgccgccgcccgcgtggatgaccatgttgatctccccctcgtacatcgcgatcgaaacgcggcgcacgatctccggcgacagcccgagcagcctcagattcttcttcacgtcgaccgacgccttgcctgccgaggtgaaatccttgccgttcacgtcatagtggaagcggagcggttcagacatggcactcaccgcacgccgcctcggtgtgagactctccggttcctcgccggttcagcccctccgagtagagtataccgcacgcctcgtacatcctgagggacgtcgagagcagcactatgccgtgctccatcgcgaggtcaatcatctcgccggtcggtcttttgtttctgacgaagacaatgcagatcatatccatcatctcggcggtgcggacgacctgcgtgttgacgagtccggtgagaaggaccgcctgatccttcacgtaagcgagcacgtcgctcatcatgtcgctcccgcaggcggacgaaacgtcctgcgagaggtcgccgtcggcgaggacctctgccgaaagcaggtctttgatctttgagatcgtcattttcagtcctttcccggatatttatccgaaatacggttcggttattctcagccgaggtattcggcgaggattttgtcgacgtcgttcgggacgagtctgccgtaaacggtgccgttgacggtcaggacgggtgcgagaccgcacgcgccgatgcagcgggtcgcctcaagcgagacgcgtccgtcggcggtggtggcgccgggctcgatgttcagattcttctcaatgcgctccatgacctgacctgagcccttgacgtagcaggcggtaccaagacataccgcgatcgcgacgtcgcccttcgggttgagcgagaactgggaatagaaggtggcgatgccgtagatctcctcaaacgggtggccgagaccctctgctatgcggcggatgacttcctcgggcaggtagccgtagatctcctgtgcgccctgaaggacgggcattgcggcgcccttgatatccttgtttgccgcgatgagggcgtcgagcttttccgcctgctcaggagtgcccttgaacgtgactgttgttaacttctttttcatctgaagtgctgatcctccttgaagggaatataaaaatagttatatgcggaccgccgcggcaggtagataacgactatgcaaaagccgcataacgcgcatatccttacccatatattatacactttttttcgccaaaaagctatacttttcacaaaaaatatcaactttttttgacggcaaaaaacaaaaattttgcggtgtgatatggaattatccgtaaaatattccggcattaaataatatatggatttaatggtattttattacatcacaggtttggttagccggtgctaacgcatagcggatatatgtgtaatttgacaatttatcgggcttttgacaaatgaggagcgacgggctatatagtgctgatggtatgcttatatcgatatatttgggtggcgtttatcgcataaccgggggaataaaaaatccgccgtgagcggcgggcggggacgcgggtcagttgtcggttcggttgaagatgacctttccgtgtcgggagatttctttttcaattccggagtccttctcgatgtgtgtaacatcaagcacatcgacgtggcgggagactgcgttttgtatgtcttcggtaaagccgatgaatttcagacctttgagtccgctgtcgacgagaaggtctatgtcgctcttttctgtcattgtgttttttgcgaaggaaccgaagagaactgcttttttgacgccgtatttctcgaagatgggggtgagcgcggcttttattgtgtcgatgttggtcatctgaagtcctccattatctgattatattatatcttgtggtgtctgaaaaagaaagcatattttgtaaataatccaaagtataaagtttttcgggaagggtgcaaggatgcagcttgcggcatccaagcaaatatgccttgccgcccaggcagcaaggcatatttgagaggagggtgcttttttcaaaaagcaccctcccctgcaaagcgaagggctatcaggtagcaaaccccgcatactgattctgataaagtttccagtaagcccccttcttcgcgagcagttcttcatgcgatcctgcttccgctacgactccgccgtcgaggacgactattttgtcggcgtctctgattgtggagagtcggtgggcgatgatgaggctggttctgcctttcatcagggctaccatcgcggattggatgtgcatttcggttctggtgtcgactgaggaggtcgcttcgtcgaggatgaggattttcgggtcggctaaaactgcgcgggctatcgcgaggagctggcgctgaccttgcgagaggtcgctgccggattcggagagttcggtgtcgtagccttcggggaggcgttcgatgaaggtgtcggcgttcgcggtgtgggctgcctgctttatttcttcgtcggtcgcgccttgtctgccgtagcggatgttcgaggctattgtgtccgagaagaggacggtgtcctgaaggactatcgctatcgcgtggcggagggttgacttcgggatgtcgtttatgtttatgccgtcgatgtcgatttcgccgctgtcgatgtcgtagaatcttgtcaggaggttgacgacggtggtttttccggagccggtcgcgcctactatcgctattttctgtccctgcttcacgtcgaggtcgaagcctttgagcaccggttcgccgggcttgtaggagaagtacatatcgcggaatgttatgtcgccgcggatgtcctcgacttttatcgggttctttccgttgtcggtctcgctgtcggcgtccattatttcgaagactcgctcagcgcccgccatcgcggtgaggatctgcgtgtactggttcgcgatttcgtttatcgggcgggtgaactgctttgagtactggagaaccgcctgaatcgcgtcgatgccgagcagtccgccggcggcgaaatatccgccgaacgccgctacgagcagatatccgaggttgcctatcatgttcatgcacgggcccatgattccgccccagatgttggcttttatgccgaccttgcggtattcttcggcgattttcgcgaaggttccgatcgccgcgtcctccttcgagtaggcaatgactgtcttgcagccggtgacggtttcctctatgtgtccgttgagctgaccgaggatagtctgctgcgcgacgaagtatttgcgcatgaatttcgagagctgcgtcgtgacgagcagggtcagcgggatcgtcaccatagcgacgatcgtcagctgccagctgtaatagatcatcatcacgagcgagcctaaaagggttatcacggcggagaagagcgacgctatcgactgggagatcgagtttgagatgttctcgacgtcgtttgtcatgcggctcattatgtcgccgtggcggtgcgtgtcggtgtactttatcgggagataggaaatcttttcgaagagatcctgacgcatcgtgctgaccgtgttctgcgagagcttcgccgccgctatgccctgaaggtaagtgaagacggacgagacgatatagaccgccgccatcaggataaccgttttgtagagcttcgcgaagtcgacgtgcgcgccgtcatgatctatcgttatcgcgcttatcgctgtcgcctgcaatgccggacccgcgaggttcagcagagctatgagcataacgaggattaccagcgcgaagagcagatatttgttctttccgatgtattttgtcagcttcctgaacgttcccttgacgttcttcggcttttcgcgcaccataggtccgccgggtccgccgcctctcgggccgccgggacctccgcccggacgcatcgagactatcgggcgctcgccgttcttattctgttcagccattgtcgtttcctcctttgccctcgccgtcggacgacttcacctgcgacgcgtagatgtcgcggtaggtcgcgctcgtcttcatcagctcgtcgtgcggcgcgaacgcggttatcctgccgttctctatgaccgctatccggtcgcagctctttatgctcgcgatacgctgggctatcattatgaccgttgttccggagatgttctctctcagcgccttatgcagtctcgcctctgtgccgaggtcaagagcgctcgtcgagtcgtcgaagatcagtatctccgggcggcgtatcagcgcgcgcgctatcgcgatacgctgcttctgaccgccggagagggacgcgcccttttccgcaatcatagtgttataaccctcagcgaagccgccgatgaaatccgccgcctgagctatctcagccgcctttttcacttcctcgtcgctcgcgtccggacgaccccagcggatgttgtccgcgaccgtgccggagaacagctcggtcttctggagcacgaacgctatcttctgacgaagcgtcttcaggtcgtaatccttcacgttctcgccgtcgacatacacatttccttcgtccgcgtcgtagaagcgcgggatcaggttcacgagagacgatttgccggagccggtcgcgccgatcacggcgatcatctcgcccttcttaacgtcgagatcaatatcgttcagcaccggtcttccggcggaattcgggtagcggaaggagacgtgatcgaatctcacggtgcccttctcgtcggtctcgggggacttgtcgccagcctttatagccggctcgctctcgagcacctcgatgatacgcttcgcgctcgccgacgccctcgtcagcgactggaacatcatcgagaccatcatcatcgacatcagtatctgggttatgtaagtgatagccgacatgacgtcgccgaccttaatgccgccgataaccccgatgtcgttctcgacctcgcgtccgccgatcagcaggatcgcgatgaccgagccgttcatgatcagcataagtatcgggctaagcgtcgccatcagcttctgaaccttcaggttcacgtcgcgcagggaagtgttcgccttcccgaagcggtcgatctcgtagccctccttgcagtaagccttgacgaccctcgcgccggtaacgttctcctgaaccaccgagttcacgcggtcgagcttctcctgaacgtcagtgtagagcggcgtcgccttctttatcattagaaaaacgagaatcagctgtataggaagagccgccagcagcacgattccgaacttcggactgatcgccaccgccatgatgattccgccgataaactgcatcggcgcgcgcacgaacatacgcaggatcatgttgaccatatcctgaacggcgtttatgtcgttcgtcagacgggtcacgagcgagccggtcgtgaacttatccgtctgctggagcgacagcttcatgaccttcccgaacgcgtcgtttctcaggtcgtttccgaacctctgcgacgccatcgacccgaacgccgccgacagaaaataactttcgaag

SEQ ID NO: 3914 - DNA, 6390 bp, Unknown
  16S sequences of unknown bacteria
gctgtataagccgccgtttcccatttcaggccgctgcgcagtcatatagagcagggcaaaaaaggagacaaaatgcagcggcaccagaaaaaccggcgggagcgccactgccgcagcgggcgcaaacaccaaaatggccagcaccagtgccaaggcgatcaaagagtctccgatacaatattcaaaattgacaaagcgaacactcagcagcatacaaaacagcgccactgccaggggagtattatcggcgccaaagatccccgacagcaagctgataaaaacgatggcaaaggccacgatcaatccagaccgcaccgccatctcagtccagtaatacgcccgctcccgcctcgtatcgcaagccgcgatcgcccgtttcagcagtgcgggattcatctgcagcgcgtcataaaacttcatggtcaccggtcttttcctgtcctttctcgatctgggccgcaagccgatcggcgtaatacataaatgcttcaaaatcttcgctggaactgcgccacaaatcataaaagggctgcaaaatgctctcatatcccttcttcaattcggccagccccgtctctgtaatgaacaaccgatagctccgttcatccgccgcctgtctttgtttgcgtatgcagttcttctcatagagcaccttcaggcagcggctcaccgcctcttttttcataccgctttcctggctgagcaaaacaggcgtgttttgttccggcttcagatacaggtgagccaagagctcacattcactggctgtcagcgcagtgttccgcacaggcagcagggcgcgtatgaccttttgcatctgctgttgataatgcatcatgtctgtccattccatggcgccgatctccctttccgagtagttaactttgttaagtatacgaaagaacctatgatgtgtcaagcttttgcgcaaaacacatcccctcgtacatggaaaaccagcagcaaacgacgaaaactgcagcacggggtgcgcaagtcatcaacggcaggaaaccacatggaacggctccattctgctgccagggatcggcttcacaaaagccattgcagcgaaccggatacgaaatccggttcgctgcaatgaaatctccgactttccggtgaaagccgctgtcctttgatcctccaatgaatgggaatcttccgcctgcgctcccatcatgtaaatgcaaggttcctgtaaacgatggttccgtctttcatggtcagctgcggaatcaaaagggcatctcccgaaatcaagtcctctttaaaatcaccgaaatccactttctgttcctgcaaggaaaacaccgcgatatcggcatcatagccttctttcaagatcccctttttctcccatcctgcaaagagtgcgatgtttctcgtcgttcgctgcaaaatatcttctaaccgcattcccaacgcaagatacttcgacataatatacggcagagcaaagcacttgggcttatagaaagaatgaaagacatggctgccgtcggtcgaaataaagtccgggaggaatccctcacgcaaagccgcctgtgcaatatcgtgactatagttattcgtaccattgcacgcatcaaacagcacgcctcttcgtttggcttcccaaaccgccggtttcacccggccatccgctccaataattgtgtttcccttcccctggaagcaatggcaaaaaacatcccccggacggagcgcggctgcaatctctcccatgtccacgggaggattcgtcacatgcaccaccaacggaagtcctgcctgttccgcaatctccaggcagcggtccagagcttgaaccggcatctgcggattcaaatccaagctatagcgaagtttcagtgcaataatttcaccccgatactgctgaattttttccaagatccgctgaggctcatagtcctccacgttcgtgttctcaaaaaaccgcgcatgcagcatgcccaaagacgagacgttaatataggctttgatgctggaataactgttctgcacattgatctgatgaaatgcatcataggtggacacgccagccgttcccccatcgacggccgatgtgatgccgttgggcagaaggcacaaatccggcggaatcccctcatcggatgcacgggtaaagagatgcaaatgggcatcgatcagccctggacaaaccatttttcccgtgcaatcgatctccactgtgccttgttcctgatccaggcatccgaccttgacgatcttttttcctgttaccgccacatccgcctgttcccagaccgcacgctcggaatccaatacccggccgccgcgaaaaataacatcaaacaactgacacacttcctttccattctgtcctttgcagcaaacccggcatctcggggatgccgggtttgcgctgacttcatcgctgcaatcgttatttcataatgctgaccaagaacatcgaaagcggttcaatatatgtaactgccagaatccccaatacgccggtcaggcagaacggtattacgcctcgatacagatcctccaatttaattcgcttgtccagcccggtggcaacaaacatgcacccgccaaagggaggcgttacaattcccatggaaaggttaattcctgtaattacgccaaactgaacaagatcgattccaaatgcagaggcggcaggatacagcagcgggcaaaccagcaggatcgccgtagtggcatccacgaacatgccgcacagaatgtaaatgatattggcccccagcaggaataccaccggacttttgatgacgctggtcattgctgcagtaaccaactgcggcaagccaagaacggtcatgcaatatccgaacagcgtcgcgcagcagcacaggaacattacggacgcactggattttgccgcattcaaaatcgcagtgtaagcgctcttcagatccagttcatggtatacaaaaacgcctacaaacagggaataaatgcatgcaacaatggctgcttccgtagcagtaaaaataccgccgtaaattccgcccaagatcagcagcggagaaagcagtgcccaaatcgcttccttaaaaattgtccagaagctgcgattttccgctgcaccattctgatcgctgcggccgtagccgtttttgtgtgcaatcaccaagcccgttgccatataaatggccgtcatcaacaaccccggaataatggttgcgatgaagaggcttgataccgacgtgccgctcaggcagccaaagagaatcagcggcaaagacgggggaatcatcgttcccaacgtaccgcccactgcctgaatggacgctgcaaacgggacaggatagtcgtcgtctttcgtcatttcaggatacatgacgtttccgattgccgccgtcgttgccagggcagaaccggaaatcgctccgaaaaacgcacaggtaatgaaggaaatcaccaccatgcttccgggaatccatcccagaagcttgcggaacaacgcaaccaatcgcttcgtcaggccgccctggagcatcagttcgccggcaatcataaaatagatgacggccaaaatcgggaacgaatccgcaccggcaaaaatcttggtcacaatgagcgtgatggacaacggcttactgagcgcaattgccagcagtgaggacatgcccagcgaaaatgtaatcggtatgccaattgccatgaatacaatcagcgacaccaccagcgcaatcgcggcaacgctcatttcttcttccctcccatcagttcctttataaagtccggggcttttgccgcgctaaacgccagcccgaaaaagccgctcagagggatacaggcatacaccagtgccatggaaatttgcgtggccgcagcacgtttaaccgtataggacgcgcatactttccatccttctaccaacataagtccatagaagataatcggaaatacataccggcagatcagcagcactttccccaacagcgcggatttagcctcgattctatcggaaatgagcgttatggtagaaaatgtgccgcggtaaaagcaaacggttccgccaactgtaaccagccagacgtgcagataccgaatgctctcttccgaccaggaaagcgagctggaaaaaacatagcggaacagaatctgcaaaatgccgatgatcatcatcaccacagcaaccacgacaatcaggaagtcgatggtagattcaaacttgtcacaaatctttctaaatcgtttcatggatctgcccctttgcaactacctgccatgagtagggtcaggcattcgggtccagcgcacggatctgtgcaaccagatcactatactccggatgctgtgcatacatttcatccgcaaccgccataaacggagccttgtccacatgggtaactgtcacaccatattcagattccatgatttccagagcctcattgttctggcgctgcgcctccggacgctgcatctcaatgcttctctgcgcggcacgacggattgcctcctgatcctcttcaggaaggctgtagaaataatccgcattcatggcatagacaatcggagtataaatatgctcagacaccgtcacatagggatttacctcataaatacggttggagagaatacccatattcaaattctcgtggccatcaatggttccctgctgcaaagacgtaaacacttccgtcatcgccatcggagtagcattggctcccagcaagttaaaatactcaatatgcataggaacatccatggtacgcagcttcatgccctgcatatcttccggactgttgatctggaagctggatgtaatattccggaatccgctttcgccatatcccagaccaaccatgccatactcttccaggctgtcaagggcgctttgtccgatctcaccatccagaacggcatatgcatgctcattgctgctgaacaaatacggcaggtcgaaaatgttaaagtcttcagaaatattggcaaacaagccgctgctattaaggacaaactcatatgtcccgttcaagcagccttccaccatctcagagtcggatcccaactggcctcccacatagatgtccaatccgtacttattgttggtctcttcccgcaggcactggtcaaagtatacctgcgcttggtagaaggggtgttccccatccattaagttggaggaaatacaagaaagccatgtattctcagcctctccccattgctggccttctgatccgccttgagaatcagaaggagtattggtttgagtttcgccgccagaggaagccccgcagcccgcggtcgacataaggagtagtgcggcacacataagcgcaaaaaactttttcattttctttcctccatttgtccaatatcatttattgtgtttgatctaacgtctaacgtcagacctttattgcattatacaatccccactggatcttgtcaagaaacgattgtggattatgcacgatttaatctctcaatcgttctgtaagtcagtggggtcgattgcataagacttgtggatcgcttctgtatcggtttcgataatggcgtttttcgtccagaactcccggtttacctccaggtgatccataaccgcccggctggccccctcgggatcccgcgcacaaatacaatcgcacatttgctggtgagaaatccgcgttttattgcgcagaggcgtctgtctggtaatatcactaaagacctcaacagaataaataataaccggtgtgagattgcagatcacctgattgtgtgtacaaagtgcaatacactcgtgaaatgctttatctacagcatgatgcgattcaaagggctcatccatatctacaaccttcgcgcaatatgttcgaagcttttccatgtcctcttcatttgcgcgctgggccgcaaggtaagctgtccacggttcaattctggcccgcacttccagcaaatcctgtgcgagcttgagcttgtcctgcatgtaggcaaatcccaagggatctttactcatgccgggatttcgcgttacaaacgttcctttccctcttcgaatctcgacaatatttctggcaaccaatattttcagagattcccgaattgtacttctgccaacatccaaatactccatcagctccacttccgtagggagcttatcgtcaggctgcagatgttggtcaataatcatttgattgatgcggtccgcaatctgttctgccagtggtttgtgcggaatttggagatcgcggagcgttgtaagatccatatatcctcctatctggcctctaactagcttcgtcttcctacaaattttatctcgctataacacttgccagccattccctttcaaattatatacagaagcggcggcaattctctgtttattatactggttctttattttgttgtaaagataaaattttcctccgccttatcgcagtgatattt

SEQ ID NO: 3915 - DNA, 7767 bp, Unknown
  16S sequences of unknown bacteria
aataacttcgccgatcatggtcaacacatcaaaaatactcataccttttcctccgttttaaccgctgataaatcacaatttaaagagcttccgttcgacgccgatttcggcattataccccggacgttcgtcgggcagaggagctttaaacggcccgaaaccttttgaaaaatctccgccgtgatttgcgctgcggtcatgctgtttgactcctgaatttgcttttttacttcttttacaatttaaagtttatcagctttttgcaaaatcggttacctcggttttgtaaaatccgtgtaaagccgacccgttgccgccaaagacccgcacctcgcaaacaaaagatgagaaaaaagccgattttgaggaaaatattcttgacaaaagccccgctttttgatagaatagtcagcgtaccgaatggtaacgttcacggagacgtatcgaagtggtcataacggggctgactcgaaatcagtttgcgagcaatcgcacgtgagttcgaatctcaccgtctccgccatcgtcgtcgcaagcgatatgaagcttgcgacgattttttgttttgtaagcattccggtttacagatttatttaatcacttttcgttttcgattgtttgccatttgtttccgaaatttactgtttcgggcaatgccattccgtgtaccatagcacttgccgaagataactttgacgagtaatcaaggtgagcatagatattagcggtagtggaaaaatcgctgtgacccagccattcctgaatttgtttgagcggaactccgttagcaagaagcagacttgcacaaccgtgtcttaaatcgtgaaaacgcattcgcttacagccgtgcttttgaatatatatcggaaactggcttgttaaataatcaggtttcatcagattacccaactcatcaacaaaaacatagccgtcatattcgtaattgtagcagttaccgcaaacctttttattcacctcttgtgccgctttaacctctttgaaatattcagcaaaactaccgaccaacggaagtgtacgcatactggattttgtttttgcagagtcctgtgcgtacatttttgttttaccgtctatctgcaccgaagtaaccgtatgcttaatggtaattgttccccgttcaaagtcgatagcgtcccatttaagccccacaaactcgcctcggcgaagtccgtaaaaagcggctactaatacgggaagttccagttttgtgcctttactaaggccgtctatcgatttttcgaaagggggcttttgcccttttattatgattttttcctgtaaactccgaataaaaccgcattaaccttgcgaaatttcaaaaactgtgatataatatattttataatattatgttttagtgaaaacggagggcttcgctatggataacaaccttgagcgctggtattcaatgaaagagattatggaatatttgggcgtcagtcgtgataccgttctcgactggatcgagcgcagaggaatgcccgccgccaagatcggcaggctgtggaaattcaaaataagcgaagtggacgcctggatgaaatccggcgttgcagcggataagtaatattcgaaggtgcagcatagcaaaaggcaatttccgctttgcaccgccgggcaaaggctcaaccatagttacttctccacggagttggcattgctgcagtcgtctcagcgtccatgggaataaaaacggaagatacgctcatagatttacggaagccattgaagaaacaaattaaaaaaagtgcttaggagtcagccaaaatggtatcaaatatttggaataagaatattccggttgaaaaaagttcttatttatgtgatgatgaaatcacattcttgaataccgataaattcaaacacgatgaaagcaaactcactatgattgatttgttttgcggtgccggcggttttgcggtcggctgctcttgggcgggatttgaatcggtgctcggcatagaccattttgaacccgccatgcgaacatggtctcacaatcatcccaacgccatcggatgtttgggagacattacaaaaacagagcccaaaaaaatcaaagaattgctccaaagcaaaggaatcggcaaggttaatttaataaccggcggagtgccctgccaaggattttccattgccaacagaaagcacaatgacaacgatgaacgcaatttcctgtttttggagtatatgaaattcgtcaaagagtttgagccggattatataattcttgaaaatgtatcgggcatgagaagtaccgccggaggacaattcgaaaaagacattgaagcttttatgaattcgctcggatataccaccacggtagatttgttaaatgccgccgatttcggtgttcctcagattcgtcaaagattgatttttgtcggtgttaaacaaaaaagagggctctcccctgaatatgtctttcccatcggcaaattcagaaacaattatcgtaccgttcatgatgcgatttctgatcttcccgagctcggaaacaacgaagaaatttgcaaatacaccaaacccgccgaaagcgaatatcaaaaactgatgaaaggcaagggaaaaatagagggcattgctccacccgagaaattaagcaatcatgtttctcccaatcatccgcaggaaaccatcaacagaattgcatccaccgagccgggaaagccgatgtatccgaaattcaagcaaagaattcgcctgcgtgaagacgctccaagccccacccagcttgccggcggcattcgtcctcaatttcaattcggacaccccacccagccgagaggactcaccataagagaaagagcaagaattcagagctttcccgacagctatgtttttctcggcggtattgtgcaagagcgcgtgcaaacgggaaatgccgtgcctccgctccttatttacaacgtggcgcttcccattgccgaggacatcagaaggaaggagaaggaaaatgtatagagtttggtacagtaccgaaagctttgccgactatatcatagatcacacggccttaagcggcaagcctgttataaaaaacagaatttacgaaagcgacgccaacaatccgactcggtttcatacaatgccggatcatatcagaaagattctttatctggatgcgccggatttgattgtcgaaaaggacaacgagcccgtattcgctattgaagtaaccacagaagccggaacgggtcacaatgcttttcagcgatttgcaagaatcgcagccgccgcggaaaacagcgtgcctgcattctatatttatcccgaaggaaaattgatttcaagaacaaatcgaaaaaccggtgccgcagctacaaaatgggacgaaatcaatcctcttatattccgcgcgcttgaaggcgttatgagcgtatacaacattcccgcgcttttatactacttcccgtccgacgatataaacgcatatcgaagcaaccctgctgcggccccgcattttgcagataaagggttatgttttgactcggatattataagctattccggttgccccgattcaacttccgacagtatgaccgatatgtttgcggcaatcaatgaaattatcgacgcaacacaaacgctcggtgttattcccgcacgctcacgacttctcggaaatgttgtaatacgcaacaagcgcaaccaaatgcaagcccaatttgttgccaaagccgacggaaaatcggcagaacagatgtcgcccctgtctgccgtgcaaacggttcccactcaatatcttataaattacctttctcgatatgaaacaggcggatatgtattgggagagctattaaaatcaagagaaaccaccgcactatatcagataaatgccggtttcagaggcgacccataccccggatgcttggcggccatagattatttatcatgccgtcagggattgactttcgaggacaggcgcagcaatttggtaatggtgtggggcagaattgaagttgacgaggtcaaccgaacgctcattattcataatgacaagggttcaaccattgaggattttttcagagatgtaaaaagctgttcccgcaacaatcttttggtcaaggattatgccgatcttggcaacaatgagatttccagatattttatgcaggtcagatacggttccgcttattcgaaagtcaagcacataagggtcttttcctactttgcggatgcaattttatttcccgacggttcgctttggagagacgcataatgaccgaggagcaagtaacaaaagcgttattacggtatttaaccgataacggatggcatattgtttgtttcgattttccgcaaagcggtactggcagggttttgcaccccgacagtaccgacggccaaaagaataaagactcaattattccagacattgtagccgtaaaaaacaacatttctttgttttttgaaaacaaggacaggttttattttcccgactataaaaaggtcaatgaattgattgcggacaaccggtatacaaaggccatagacaaactgctttccgattataaaccggacggcatattctacggtatcggcctgccgacagaaaagcacaaagaaaaatccaaagaatccgcccatttggtcgactttatattaggtgtaaataccgacgggtctgctgagattttatacaaccctaaagggatagctttttaggatttaaaaagcggcgtatgcggtttgcttgacggcatgggcgggacagatttaaatatcattgacaaaattaacaggcatgagagtttagctcccctgcctgcttttattttaaaatttttattatgacttcggctgcgccgtcggtgtatctgccccccggatttaagtttatttcggaaacagggcaaacgttgaaagcaaagcggtgctgcggttcggttcagtcgggcggcgcatttgccgcggtacgcaaaaatttaccacgtctgtgaaagctcaacaagctccggcgtttcaggccttcctatgagcggttcttttttgtcgagcgccgaaagccgcgccgtttcatcggcggtcagcgcaaaatcgaacagctcgaaattttctttgatatgctcatgtttggcgcttctcggaatgacggcgatacccctctgcaccaaaaaccgcagcagaatttgtgcaggggtcttgccgtatttttcggcgagagcagacacggcgggttcggcaaacatttcgttgcggctgccccgacccagcggagcataggccatatgcgccacccggctcttatccatccaaattctctcggagacacgctgacaatagagattggtttcgatttgatttaccgccgggacaaccttgttataggcaatcagatcaagcagcctatccggctcgaaatcggaaacaccgattgcgcgggctttgccttctgcgtacagcttttccaaagcgcgccatgccgcatagtaatttgcaaagggccaatgcaggagcagcaggtcgatataatcggtctgcaaattgccgagcgactgcatgaccgtctgttcggcgttttcataggatttgaaattcactttggtgacgacaaacagctccttacggtcaacgccgcttttgagtatcccttcgcccaccgccctttcgttgccgtaggcctccgccgtgtcgatcatccgataaccgcttttgattgccgcggcaaccgcctcggtacaggtctcccctccgagcataaaggtgccgaagccgacaagcggcattttgacgccgttatttaaggttaaatattccattggtttgtcctccgttttaatattgcgcagacatcgggtctgtgctacaattattgtaacaagtttgagtaacacgaagtcaagaatttttttcggaggccgaaatgtactatacaataaaacagatggcgaaaatgtttgacgtgaccgagcacaccctgcgtttttacaccgacgagggcctgctgccctgcgaacgggacggcggcaaccgacgggtgttcaacgaagaatccgtcaattggatgcagggaatcaaatgtctcaaaggctgcggcgcgtcaatcgaggacattcgggaatattgccgactttgccttttggagcaatcggaggaaaatctgcgggcaaggtatgctatcattcttaagcagcgaaaggaagcctataaacggttggaggaagccgaggccacggtaaaatatatggacggcaaagcggcgcattatgaggagattttggccggtcttgcccccgacgacaccaacccgaataaccggacggccgagacccgaccgaggcacgaaacaaacaagggggcaaaataaatttcggttttccccgccgtgggtgcaaagggctggaaacaatgccgctttttttccgaattatattgcaaaaaattacaaaacaagctataattcatatatctgagctttttctttggaggggaaaaaatgctttcggttgtcatacctgtatttaatgaagaggagaccctgaacatcgccgcggacaaggtgaaaacggttttaaaaaatgccgacatcgattttgaaattttctttatcgacgacggctcgaccgaccgctcatggcgcattatttccgagcttcatgccgccgaccgacggataaagggcataagattttcgagaaatttcggcaaggacgccgccatttttgcgggacttaaggcctgcggcggcgactgcgttgcggttatggactgcgaccttcagcaccctcccgaaaagctgcccgaaatgtacggtctgtggcagcagggctttgaggttgtggagggaatcaagaactaccgaggcaaggagcctcttatccacagaggacttgtcaatcttttctacaagctgctttcaaaatgcaccaaaatgaacatgaaaaacgcctccgactataagctgctcgaccgcaaggtggtcaacgcccttataaaaatgcccgagcacagaatgtttttccgaacgctgtcgtcttgggtgggatataagagcacgtcggtcacctatgatgtggcaaggcgggcggcaagaccaagtggtcgaaaaaggaccttttcggatatgccgtcacttcaatcacaagcttcaccgccaatcccatgcagtttgtgacatggtgcggcacccttgttttcatcatctcgattttcatcggcgtttgggcccttgtggacaaaatttcaggccgcgccatcgagggcatgaccaccgtcattttccttcttctgttcataggcagcataataatgctcaccctcggcataatcggccactacatcgcccgcatatacgaggaggttcaggcacggccgagatatatcatcgatgagtatctcgacgaggaataaatttcacatacataacaaaagcgcagtttaaagattctttaaactacgcttttttgtttttaagatttatggcggcgttatattcgttttttctgccgggcgatttataaaagccgtgaaatttcactccgcttttaagctcttcgtcggtaaagccggggtgaaaaagaatttcggcgtctctcccctttttggccgcgcgggcggttattttgggcaaaagcctttccacccgctcctctgtcatgtttcccgaaaacattattcccaaaaattccgccttttttatgccgaaacgtcggtaattttttttgttgagcaaattgaagaatttaagcagccattgctttatcaaattcaccgaaacgcaggacagataaagcgtcgggcagg

SEQ ID NO: 3916 - DNA, 6967 bp, Unknown
  16S sequences of unknown bacteria
tctcgggattgctcccaagacggcgcttttctgttgtggatcagagcgaacacttcacggcgaaaccgccactaaaaaaacaggtgttcgtccgaaccttgtttggtggaccatagggggatcgaacccctgacctccagattgcgaacctggcgctctcccagctgagctaatggcccatattgaatttttgaatttaaaaatacggcagacaattgcttgcccgcccaggcaaagaaaattttgaaaacagcgtcgagacaacggtcgacgaaacggccaacgcttgatttccgtcatatttcgtgcggaacattgccgccatattggcgattggtatcagcgtcatgatgacaagcatccctaagattcattcgctgtaaatcaccagccgcagcaggaagaaaaacacgacagagagcaggaccttcttataagcaatcagtcccagcaactgcacaacgcattccggcgcataaaaatcgacccgttaggacacatccgccaggcgaatttatgatcggcagggcctttagaaagctggcgaatgccataggtatacagcaccagctgaaaaatcagattgaaaattgcagcccatcacgatgacggtgaacaaaatcagcatctgagaaaagacagattgcaaatccaaagtggccaaatcctctacctaaaaatcaaggtaactgctccacgctaataccggtgaattcagcatatgctgtgatcgcggcatctttttgcgccaagtccacctcggcgcggtcaagcatttcgcgggcggcctccgcctccgcgcggttctctttcgcaacggcctctgccacctgcgcttgagactgggcttgcatgaaatcgccccgcagctgccgcgcgcggagaagctgcaacgaaaacagccctaccagcaaaaggttcaccacacaggaaacgacaagccaacggcgcaaccgcggctttttcttctgcggcagcgcgactggacactccgcagagtccggcgtttcgcggtgatgcacatgaatgtgaatctttacctctgggtccggatgcgattcctggccgctgcatgcggggcaaagcaattcgccatcggcgacggtgcgcccacatttcagacaattcattctctcacatcctgcgcctattgtacaacatttttttccgtttgtaaacaccaaattttctgtgcaggaaaaaaccgtaccgctgcgcggtacggttttttcatttacgctttttgctttttgggcagttgacaggtcatgtgcttgcccataggtttatagagcagcgcgccgatgaccaggatcatgaccaggtccagcagcataaagctaccattgtacaacgcggagtagaaccacggagatgtcatcgtcataccaaagaaacgatccggcatgtattctgcccagaccgttgcaccgacaatccagtggaccaggaaccgtgcgacgcagccggcgatgctgcccaggaaaaagccgcccttcatccgggcaaagagcccggcgacacccaggacactaaaggccacgatatagtcgcccagcatggactgccagctatacgcatacgcgccgtccagcaccagctgcagcacggagaacacgacagacgccagcatacccggcccgaagccccagcggatgcagaacaggaaaatggggaacatgccgatcgtgaccgagccgccctgggggagctcccacagcttcaggtagctcaatatctgcgccagcgcgaccatcagcgcaccttcgcacagcacccgcagcgcaacgcgggatttctttttcttttccattacaaatacctccgattctttttctttccaatgaaaaaacgcactgcaaccagaaagattgcaatgcgctggtttagaatcggcctgcatctttccctacgacggcatgatccgtatcaggttcgcgggtcagagcacgatcttgctcactctcagccggatacgcccggccccccgaagactgcttgtaatgcggttgctccattggaacaaccgcattatagtagattcccgtgctcttgtcaaggcgcaatttgctgcatccgctttaatttctccaggacttctgtaaaatacggcggcagatcgcaggtcactgtgaccggttggccggtgcggggatgcagaaacgtcagcgcctgggcatggaggcactggctactctggccaagctcgggctttttatgaccgtagaccgtatcgccgagaatcggatgattcttccaggccagatggacccggatctgatgggtgcgccctgtttccagacggcactgcacataggtatagcccgggtaacgggccagcacctgaaaatgcgtgacggcacgcttgccatccgggcagacggccatttttttccggtcctgcgggtgccgggcgatgggcgcgtcgatgacgccgttatcgtcccgaatgttgccgcaggccaggcagacataggtccggtgcatggtgtggtctgccaattgggcggctaatttttgatgggcaaaatcattttttgctaccagcagcaggccggaggtgtccttatcgatccggtgcacgatgccagggcgcagttggccgttgattcctgagagagaatcgccacagtggtacagcagtgcattgaccagcgtccccgaccaatgcccggccgcggggtgcacgaccatgcccttcggcttattgatgatgacgacgtcactgtcctcataggcgatctctaggtcgattttctccggctgcaacgcgataggctgggcattggggatctcgacggtataatccgccccggcctctgtcttttgatttttcttgacaggctgcccatcttttttgacatgattaccctccagcaggcgctgcgcggcgctgcgggtcatcccctccagcgcctgggtcagaaagacatccagccggacgcccgcggtttcgcagtgcaggatcatgcggcctctccttttttccggctgcggtcaaacagcaggatataggcaaataagccgatacagccgcagacgataaaaatatccgccacattgaataccgcaaaattgataaattctacttcaaacatatcgaccacatagccatgaacgacccggtcaatggcattgccgacgcccccagcccagacggccgccaggcaccagagctcaaaccgcttagtcagcagcttcttccagagcagcaccgcaaggattgcggtgaagacgaccaaaacgccgacaaacagccagcggctccctgccagcatggaaaacgacgcaccggtattccgcacataggtcaggtgcagcacaccatccagcaccggcacaatgccgcccaggctgatatgcgccacgaccagatacttcacgacctggtccagcgcgatcacacagacggcaaacagccccaatccaagatatagcattgcaaaaactcctttttcgttctccctttattatacagaaatccgcgccgcttgcaacgggaaaatctgcgccggttggccgggaatcatcacttgcctgtcacatcgggctatggtataatatgaatcaaagtggataattcgagaaattttatgatagaaggataaggaagcgtctttatgaaggtattgctgcatatctgctgcgcgccgtgcagctgcatgtgtatccgctcactgcgggatgagcagatggatgtcaccgggttttggtataacccgaatattcacccctttacggaataccgcgcccggcgcaactgcctgcgagagtacgccggtgaaattcgtctgccgctgctggaggaggaccggtatgccctgcggccgtttatccgcaccgtagcggaggatatcgggaaccggtgcgtgaaatgctatgagatgcgcctgttccaggcggcggagacagcagcgcgggagggcttcgatgcgtttacctcttccctgtttatcagcccctatcagaatcatgcgctgatgcgccaggtcgccccgcgggccgcggcagaataccaggttgattttctctaccgggatttccggccgctgtttcgccaggggcaggagatggcccgatcgctgggtttttatatgcaaaaatattgcggctgcatcttctcggaagaggagcgctaccgcaagccgaagcaaatcattccatagaaaggggcgcctgccatggagtatcaggaatggaaaaagaaaaaagaacgcagcgataacgcctggactggcattatcattctcgcgtttatatgcttctggccagccgggatcgcgctggtcgttttgaagaacgccggaaagctgccgatcctcggtaccgggcaaacactccagcaatggcggcaaaccctggcacatctggcacagcagcagccggcagccgcgccgcccccggccagcccaaagcagcaggaccgggccaagcgaaagctgaaatttggcggggcgctgctgggcacgggcgttacgctggctgtactcggtctgctgcagatcgtcacggcgcacccagccgggcacagcttctgggccctctggcgcgccttcgccgtggggacgacattcctggccggaggcagcgccctagcgattttgggtgggctgcggaaaaagcagtcccagcggctacagcaatatgcggggatgatcgacccggcctgcggctatctctccatttacgaattggccgaccgagtccaccgaccctataagcaggtctgtgaagatctgcaaaagatgattgacatgcgcacctgggatgcggcatggctggacctgcagcggggccgcctgatgctgaccccgtacgacccagacgaggaagcccccgccgcagataccatgcaggaggctggagcggcaaaatccgccgccgagcaggtgctgcagcagattcgggcggataacgacctcatcgccgatccggagatctcccggaagattgaccgtattgagaccctgacgggcaagatcttcgactatttggaaaagcacccggagcgcgccggggagctgcagacttttatatggactattatctgccccaaaccctgaaaacgctggaaacctatgcccggctggaggccgagggaatcgagaccgattccatccgccaggcaaaagcaaagatcagcggcattctggacaagctctgcgatggctacgaaaagcagctggataagctcttccagacggacgctatggatattaccgccgacatagccgttatggagcagatgctcaaaaaggacggcttgacggaagatgaatttgcatttgaaatcaaaggaaaatgaggcaagcagcatgcattatgaaaccgtactctgggacctggacgggacccttttaaatacactgaccgacctgacctgcagcgcgaactatgccctgacccaatgtggcctaccggcggcgacagctgcgcaagtgcgcgccggaacgggaaacggcgtggcagagctgctggccgcctgcacgccgggcggtcgggattgcccgaaatttcaagctgtctgtgatgcctttgttgcccattatgacaagcacagcaacgatcacaccgccccttacccgggggtcatggacctgctgcggcagtgccaggcggcaggcatcaccatggggatcgtctccaataagctggactgggcagtcaagcagctgggagagctgcactttcccgggatgatggcggtctgcgtcggggagcggccgggcatccggcggaagccggcgccggacgtgatcctggccgccctggaggagttgcatgccgacccgacccgcagcgtttatatcggcgactcggaaattgatgtggccacagccaaaaataccgggattgccgggatcgccgtgacctggggctttcgtacgagaaaagcgctgtgccaagcgggcgctacaaccctggttgattcgacacaagcactggcagaattactgctctgattctccgattggaaaatcatgctgtaaaagcctgaatatgctgctctagagcggcatattcaggcttttgcatataagtctaaagttcgatcattcccagattgcttcccgcgctgcggcaatggcttccatgacctgggccacaccgtccgctttgttttcttccgcaatcaaatctgctgccgcgaggcattccggctctgcattggcaacagcaacgcccagcccaacctcctgcagcatccggctgtcgttttctccattgccaaatgctgcgcattggaagagcggcactctttttttctggcagatgcgctgcaacgcagccgcctttcctgcttgccgatccgcaatttccagaagctggctgcaggatgccgttaagtatacctctggtgcaagctgtccaatcgcatgggacagctctcgcttcactgccggatccatacacacaaccgtaattccgtccaactcccggcaatgctgctgtaagaaagaacgcatatccgcaactggcttgcgcgtattccaaatatacgccggatagggatttccccaacgaaccgggtcctcaaaataccgcgcttccgtataggcaaccccggaaatatatgcctccagcaaaaccgggaagtgcgcggtctccgctaaaatcacctcaactgcggcctgggatagggaagatccccaaatccgcgccccatcgggcaaacggtgaattgccgcaccattggaggtaatcgcataggaaagccccggcaattgggtaaccgtctccggtaagctgcaatagggtcttccgcttgcaatgacgacctctacaccagtcttttgaattcgcaaaatggcattgcgcgcccggtcagataagcgcatatccggctgcagcagggtaccatccaaatctatggcaaccagatgaatctcgccaaagggtgtcgcgtgcttattcatgcatttcctcctccggcgaggaatcgacccgctgcacggcgataacccgg

SEQ ID NO: 3917 - DNA, 12988 bp, Unknown
  16S sequences of unknown bacteria
gctccattgcctactgcaccaacgagggcatcattgccggcgacggcaacggccgtttcaaccccgccgcgagcgtgacgggcctgcagttcggcaagatgctgctggtggctctgggctatgatgctgaaatcgagaagctggtgggcaacagctgggctatcaacacggccaagctggcgctgaacaccgatctggatgaagacatggaggatatttccctgtccaaggagctgacccgtgaagaggctgctcagatggcattcaacaccatgaaggccaacattgtggagtacgattctcagactgatatcaatgtcaacggtgcgcaggttgtaatcggcaacaaaaaggcctacaacgtgaccaccagcagagactggggcaagaacatctacgatgatgaagccaaagatggcggaaatggttacattgtccagtttgccgagcagtactgccgcgatctggagctgaatgaaacggcaactactgcagattccttcggccgtcccgcacacaagtggagctatgacaacgacaaggtcggcacctatgccgacaaggctgtcctgacttacaccacggagttcaagggcaccgagttggcagatgacatcgatgatgccggctgcgagtttgccaagaaagatggcaagtacaatgatgtgaccatcgtccgcaacggcggcgaggccaacactatgaaggatgcagagatctccgcactgctggatagcagcaaggctatctccggcaccggcaacggtgtggccattgagttctatgccaacgacaaggatgaagttaccactgtggttgttgtggcaacttatctgggcgaagtgaaatctatcaagaaggacaaagactccaccaaggccgacgagcgtgagctgagagttgagtataaggataccggcgctgcaacccattccctgaccctgaccgacgacgacaccaagggcttcaacgatgtgtatgacaacgtgaaggtgggcgacaaggtgctggtcacccccaagggcgacaacagcaagagcgacactgcagtcagcgtggcgatccccgagacggtggaagccgccattaccaaggtcaacaacaaggataaagaactgactgccggcggcgaagtctatggcattgccaagaccagcactacgacctatgctgctgatactgatgatgttacgctgtatctggatcagtatggctatgtgatggatgctaccgaccagagcgacagcaaagacaaggctgttgctgttctgaaggtttatcagacgctgaacaaggacggtgagctgacggatatgatccgcggtgttacctccgatggcgaaactgtgaactgggagtacgagggtactaagcctgatgctgataaggtttatacttacaccgaagatgatggcgtatataccttgacagaagcaactgcgaccacggtcgcaaagaatgggacggtcaagattgctagcagcaatgaaatcaagacctccacgaagcgcctgacaatcgacagcaagaccgtttattttgattccagtgtgaagttcatctttgtggatgaaggcaaggctaccgttttggacggcgttcagaaggttgcccaaggtactacagcttatgcaaccatcaaggaagaggatggaaccttctatatcacggctttgtatgtgatggataaggcttccagcagctcttccaccagcgacgacctggtctttgtggcaagtgcgtctaccggcacggtgtctgtgattgtggacggtgaaaaggagacctatcactcctatgaagcctatgtgaagggtgaggaagtggacttctataccgaaagcagcaacgcacagccgggcttctattccgtcgaaattgacgacgcatccggcgcttatatcctgaagggcaatgagtataccacgcagaacggcagcgatctggatgtgaccggcgaagctgaggtcaagggtgtggcaggcaatatcctgagcaccaacggcctgggtgtggatgctggcgctgcgacgatcgtcgatgtgaccgacaacgatctggacactctgtctgccattaaggatgctctggaggagaacaccgtgaagatccgcatgatctacaacggagagaccaatgaggccgactacatttatgtggtgagctgcgagagcaaataatgtgcgaaatctagaaaagttgcactgaaacgtacaacttttcccccgccctgcactttatgtgcagggcggtttttttctccctttgccgtcctgtattcttttctgaggaggcatgttcaattgtataagacagatcattttcaactgaaccaatgggaaaagccggaccgggtgctgatggaggatttcaatgcggacaacgccagactggacgcagcgctgcagacgctgacggagcgcccgacgatcacaaagctgaatacctttacggtggatcggccgattaaaggcgcagcggtgttcgatatggacgtgagcggcatcgactggggcgcgtggcagtatatctttgcagattttcagctccagggcagcggctatatgctgctttaccccaatcgggatcccgaggccgccaccagccgcggttatgtaacatccaattccagtaaatctttgggcgggatgctgtcctgtgattttcatagtacggcgctcacacgggtggaatttcaaattttcggctgcggggcgcatacgctgcagacagtgtgcccctatcagtgtatcactgccagcgccgacggcatttcttacgatgccttggagactctgcatctgcggcccagtcatgaaagttatacgatgaatgccggcagtaaaatcaccgttctgggcatgcggtgaaacccgcacggaatccaaacgggcacaacaaagcgcaattttcggttgcgtgttgctgttgacggcgggtataatagaaaaaactgccgcggcgctgttcgcggggggaaggagtggaaacctgtggagaaagagcgcatttaccaaatgaagctggggaaaatatatcccctgttggtgcaaaaggcggtgcgaaaagggcggacacaggcagaagtggataccgtcatctgctggctgaccgggtattcccgtgaggagttgtgtactcttgcgcaaggggcaatctcctacggtgattttttccggcaggcgcctcatctgaatgagcgccgagaggagatccgaggcagcgtgtgcggcgtgcgggtggaagagattcaagaaccgctgctgcatgagatccgccgcctggacaagctgattgacgagttggccaaaggcaaacccatggaaaagatcctgcgcggcggggcgtaacggccccggaccacgggtgcaaaacaggaacagaaagcgcgcccccgtcttatttcgggggcgcgcttttggttcagcggtccatctgttctaatgtgatctgtccggaaagctcctcggagcgccggatcatctgcagctggcgggcgttttcttcgctgagcgcgtcggcggtggccattttccggataatgtttttaaccgtccgatccagccctgtgccttcgcggtagtcggcaggatagatgtaatctacccgtccgcgctcaagcaggtccttgacactctggcccatctccttataaacggcgatgctggcgccgccgtaggactgcatcattttcatgcagggtacgtcggagagcccatcgcccaaatagatcatattggtgaaggggacgcgtttgctgtcgtcaggcatggagtcgttgagtgttttgtcgtcggacacgtccagcacgcctttgttgatgcggtagacgaactgggttttcgaagtgtagttgacggccagcttgggccaggcggcctcaccgtcctcgccgtaataaaactcgctggcgaagatctctttaaattccgcaccaatggagcacccctccagaatctccttgagtccggaggaaatgatataatgctctactgtgacgccgagggaggcgccaaaggcgttaatgcgcccaaaccacccctctacgccggggaagagccggatgtcccgtcctgcttccgtgagctgctgccgggtcagcggacggccgcagcgatgcgcttcgcgaatcatggtgaacatgtaagccaggataccgtccatgcgttcccggcggccgaactcattggccagctgccagaacgcaggcacggacaagccgagggagggaataaaagaataatcctgcatgtcttcggtgctgagggtattgtcgaagtcatacatcaaggcgataatgggctgcggcgccatgggaaccactcctttccgggccgtgaaaccgataagacggcggcaggcgccgccgtcttaggcattatgagttggatttggatttgtaattgcggccgaatttcaggtcgccgaaatcgatgcggcgggtggcttccagatcctcggaggcatccggatggggggcgtccgcctcttccgatgcaggggcgtccccggcagggatctctgccggttccggttcggtttcggcctgcgtttcagccggcgcctccggttcggcgaaagaagacaggacggaggattcaatggagtgcacctgctcatccacgctggcgtcctgcacggcctgggccgagggagcgcttacctggatttcgggtacaccgtcgagaaattccaactcgctgctgcacaggcggcgcatattggcaataaatgcggcgctttcttcctttgccagacgcagccgctcgctttcggcggcgatctccgcttccagagcagctttgcgtgcgcccatttcgctttcggcggcggcgagcaggtcggccttttccttttcggcctcctgcaccatctgactggccatcttctgggcggtcaggagcgttgcgcgcatggagtcctcggtggcacgatattcttccaccttgtccaccagcaccttcagctttgccttcagcgcggcgttttccttgtaaagcgtggtgtagtcctcggtcagggtgtccaggaactcgtccaccatggccatattatagccgcccatgcgtgctttggagaatacatgggtggaaacttcctgcggtgtcagcatatgtatttcgtccgcctttccttagaaataaagcccgttgttttccaattcattgatcagatcgccctcgatatccacatggtagggggtaatgatataggtgctgttggccacgcgcttgatcttgccttctccggcataggccacgccggagaggaagtccaccaggcggcgagccacatctttgttggtggcttcgaggttcatgaccacggtgcgtttgctcttgagctggtcggcaatctcggaagcgtcctcaaaatgctgggggctgaccagaacgaccttgagctgcgtggtggcgtgaatattgaccaccttgttgctgcgccgctcctcggcacgggcgctgcgccggtcgtcaaacagggcagccgtgttgtcgggctttttcacgtccgggtaatcgtcttcatattcctcgtcttcatcttcatacgtatgggtcagctttttcagctcatcgaacaatcccataacacagcctccgttttatgataaattttctgcaggggcgccgtaatggcgcgcgccgaaaatggcggtgcccacgcggaccatggtggaaccggcagcaatggcatcttcaaagtcgctgctcatccccatggaaaggtataattcatcactattatgaagcaaaagcggggtactgtcaacaaataagtggcgcatttccaagaaatacggcatattttcgccctttttttccgcaatggggggaatcgccatcaggccctggatgcgcacatggcgctccggccgggcaaggacggctttgatggcagattccacttcctcgggccgaaaaccgctcttgctgtcttcgccgccgatgttcacttccagcaggatattttgagtcaatccgttcatggcggcgcgcttgtcgatctcgtcgagcaggcccatggagtccacagaatggatcaggtccacctgccccacgacctgtcgtaccttgttcttctgcagcacgccgataaagtgcagcggcgcgccgtcataggcgtgctcggaacgcttttgcgccatttcctggactcggttttcacccaggcagtcaatgcctgcggcgatggcttcccgacaggctgcggcatcattcattttgctggctccgcacaggagaatctcctgcggactgcgccctgccgcccgggcggcttcggccatccggacgcgcacggaggcaatgttttctgcaatcgtagacataagtgtgtattctctctttctctgggaggaagagtcctttcttcagttgatgacttttccgttgtaaagttcttcggcggtgataataatgctgtcgcccacgcgcaggcgggaagaggaggtgttttccgtattgtcctctttcttggaaggttccaccaggtaataaccgctgccctgatacaccacatccacaggcttaaatactgcctgcatgcccaccaggcagtagacaccggtgacgccgtcttccacgcgcagcgcctcggtgggaacccggatgccggaataggattcatggatcaggctggcgctttggcggcgcagcagcgtaacctcgggcagatattcatcgctggaaaatactaccagttttcgcccgttttctgtgtcgctgatgcgctcgatggtcatggtaagatcccggtccagttctttgacaaagcgcagctgtacagtgtggcccactttgtaggaagcggcgtccttttcgctcatattggctgcataataccaggtgctgccgtaaatcaatttgcccacgttggaggtgagagcgggatcaggggcgacagcggaaagctgggaaggcgtcatggtttccagggctgcaggggtcaggacggcttcgtacccgtccaccacggcggaaaacaaccctgcggaaggggcggtgacagcgcgggcgctatgctgctgctgggcttccagcgttttgatctgtgcacgcagggactccgcttgggcttccagttccgctgtgctttcgccgccggaggaataatcccggcggatcaccagggagcgcagctcggaaacactgccctccagggcggtgtactgccgcgtgtgcagatttttctgcatggcaaatatagcagactggatgctgctgtccagtttgacgacggcagtggggctttcactctcgcccatagcgtaggtcagctgatccagttgggcgcgcagggtgtcgagctggccttcggtttccatggcggcgctgtcggtgtatacggtggccacgcgcccgcctgcagccacgcgctccccctcggccagagtgatgtccagtacaccgccgttctggctgggcagcagcgattcctcgcggacgacatagccagaaacggtggtttcgtcgtcggcctcgtaggtataggcgctggaaagctcgtagggcgcgttcaggccgctgaagacgcggaagagcacatagcagagcaccatgatgctcagcaatgccaaaatcagcgtggtggcggcggaggggccggttttggggggcttgatcgaattgctcataaaaggatcctcttttgggttttcccggccgcgcccttcgggccggctcagtcgccggcggcgttaaagtcgatggggcgcatggggataatggtggaaatggcgtgcttgtaaatcatttgctgtttgccgtcgctgtcgagcacgacgacaaagctgtcgtaaccgctgatcacgccgtgcatctggaagccgttcatcaaaaaaacggtgaccagggtaccggcgcggcgggttttggccagaaaggtgtcctgaaaattgatgggtgctttttgcatatcgctctgtctccttttgccgcaaagggccttttctatgtacaggcgatgtgcgtgtgcgcgttcctcgcccgtcaggcttatcctaatccatgggcggagaggatttctgtcgaaagctgaagggcgcggggaaaatcccgctcttttttccaaaagatccagtgaattgctttgtttcgccgcagccaggtgagctgacgcttggcgtactggcgggagcggagcttgatttcttcggtggcttcggcaaggcttttttcgccgcgcaaagcgccgagcagttctttgtagccgatggcctgcagggcggtggacgagggagaaacgccagcggacagtaatgcgcgtacttcctccaccagaccctgagagagcatggcatccacccgtgcatcaatcagagcgcgcaggtcggcgcggtcttcaaaggtcagaccaatgtagacggcgtcgtagcgcggcggaagcagtttgctttgggcgtcgtgttcagtgatggtctggccggtttcatagtagatctccagggcgcggagaatgcgtttttcatcccggagatgcagccgtgcagcggcggtgggatcgatgatggaaagctcccggtacagcggctcgatgccttcccgggccagccgttcgttcagccgttgccggctccgggtttcactgccgccggcggcaaagctgcggccagccaccagtgcatcaagatacagccctgtgccgcctactacgataggaagtttgccccgggcaagaatatcgtccacacaggcggaggcgtcttccacaaaacgggcggcagagtatgtttcctgcggatcagccacacccaccatgtggtggggcgccagggccatctcctccgctgtgggcgcagcagtgccgatggccatgccgcggtaaatctgcatggagtcggcggagacaatctcgccgccgaagcgctgagccaggagaatgcccagcgttgttttgccgcaagccgtgggaccgactacacaggcaattttgtttgtgtgttccatagactgggagagactcctttccggccctgtaaagcgttttgcgggcagcttatttttggttgtgaaacaggtttaaaatacctgcaagcagacaaaagatccccacaatcccgctgccgatgcgccatgcatggccgtacagaacgaccagaaaatggggcggccggatggtgcagccaagcagcagcgcgccgatagaaagcagcaggacgatgccaagaatctcgcctttggatttcataaacaggccccttttcaaatgtaaatataaatccgccaaacaattgtgtggggtgaggagtcagaaggactctgccagcgctttagcttgggacagagcatcccgcagaagcgcttcgtggtcgatttctttcacatcctgcatgggcgcgccgataaagtggtattctccgatgccgaagaaagggcacagggcgcgccagtgctcactgccgcagttggcttccagcgaaccgccggcagtggtgaggaacagcagtttttccgcccggcacaggcccacctggccttgggacgtatagtcgaaggtgatgccctgggcggcaatgtgctcgatgtacagccgcagctgagcggggaaagacagctcccagtatggtgcggcaatcacgatgcggtccgctgcggcgaactggcgggccagggcgaaggatgcgccttccgtccgcccttcgccctgcagcgtttcgcgcaggcgcagtgcgttgcccagcaggggatttagtgtgagtgttttcaagtccaatgtttcaatatcggcttctgggtgtgcggcgcgccaggccgataaaaatgtttccgccagtgctgccgtacgggacgcgctgccgtggacggtgatgcagcaatcaatatacagaagtttcatagggggttctcctttcgcgcaggggctgttatgcccgcttaaacattttttccagttcataccggctcagcttgacctttacgggccgtccgtggggacagaattggatttctcctttctgtaccttgtctactaaaacccgcagctcctgttcgccgctgaccatgccggctttgatggcggccttgcaggccatggtgtggagcatgacgtcacgggcgccatcgggatcggcgcggccggtacgcagcagctggtcggcgatttcttccagcgccggagcgatgtcgccggcgtcgatctctgctggacaggtgcggcataggattgtgccgtcgccgaaatcctcagcttcgaatccaaactggttcagaaggtccagatgctccagaagcacggcgcacgcatcggcactcaaggcgacggcttcgggtgccagcagctgctgtcccataatcggttcggcattgcgtttcatgcggtcaaaattgacccgttcgtgggcggcgtgtttatcaatgagccatacggtgccctgattgtcttcggcaatgatataggtgcgcagcacctctccggcgatgcgccagggcggttcggcagacggttccagctgttcctgtccagccagcggatcggtgtgcggcgtgtccgcgtccacagcgggcgcgaagggggccggggggggcgcggagatggaagcaggcgggcaatccgcggcattttccgccgcaggatgggcctgcggtgcgagaggcgggatacgcgccgctgtggcaggggacggcgggacgcttttggaggtgggctgaaccgaatcggctaccgtgaccgagccgccccattctgagacgggggtatttgcgccctgctgcagggaaaagctggtcagcggtttgccgggcgctgtccgggcacggaattcctgtgccgtcatggtctggtaaaaagaggcattctgttttggcggcgcaggggaatcggcgggggtcggctgtgccgggcggggggagggcgctggcgcggcaggacgctcgccgccctgttccagagcggatttcacagcgtaatacactgcgtcgaacacggcgcgctcgtttaagaatttgaccacggttttggccgggtggacgttgacgtccactgcatccagcggcagcgaaaggtgcagaacgcagccgggaaatttccctttcatgatctggttgcggtaggcctcttccaaggctgcggacagcaggggggattttacatagcgcccattgacaaagaagtgctgcatggcgcgggtaccgcgaccctgcaggctgcgggtggcaaagccatctactgccacagcgctgccgctgccctccacagccagaagcgacagggcgaactcccgccccagagcggaatagatggccgaaagcagttttccgtctccgggggtgtaaagctgctcggtgccgtcgcgggtcagcttgaaagaaatacgggcgtgggaaagggcctcatgctgcactaccgcagcggcagcagaagcttccgcgctgtcctttttcatgaatttcatgcgggcaggggtgttgaaaaacaggttgtggacggaaattgtggtaccctcagggcaaccgcattcctccgcagcgctggcagtgccgccctccagcgacatgcgcgcaccccgcgccgcgccgcggcggcgggaggtgatctcaatgcggctcactgcggcgatagcggccagggcttcaccgcgaaagcccagggtaccgatacaggaaaggtctttttcggtgcgcagtttggaggtggcgtggcgcaaaaaggcggtgggcagttcttccggagcgatgccgcagccgttgtcgctgacccgaatgagactcatgccgccgccgcgcagttctacgctcactgcgctggctcccgcgtcaatagtgttttccagcagttccttgaccacgctggcgggccgttccacgacttccccggctgcgatcatgtcggcaagatgggatggtaattgttgaatcaaaggcatagttcattcctcgtttttggcagcattccaattccttttcaaatatcaggtccattttctctgtgcgcccggcatgccggctcaggcgtaaaacgtccacacagccaaagcattgactgcggcgtgggcggcaatgggaatccagatgctgtccgagcggtcgtaggcccaggcgaaaatcaggccgggtacggcgtactgcagcgcaataagaagatagtaaagcgtaaaatggtcgcccgccatggcccaggtgtgcagaagggcaaagagaatgcaggtgacaagatacgccgcagcacggctgtgctggcgcagccacccaaaaaggaagccccgtagcagcacctcttcaataaaaggggccagcacgaccagggccagcacggtggccgccggagcggcattcagcagatcaagactgacgagggccgtatcgttcaggttgacggtatgtccccacaggagatgcgttacacgaaacaggatctcattcagcccgtaaaagaaaatcagggcggtccccagtgtttgaaaactgcgcccggcagagccggtgaacgtgccggcacatacaaacagaaagcgatggaacaccagagccacggcggcgaagagcagataaaaccagatggtctgccgcagtgccggaccgatggaaaaccccagaaggccgccggcccagttcaggatcgctgcaccgcacaaagggatcagagccaggtagatgagcagaagaattacgccgcccagcttttccaaatcggttaaatgagagtcgcgggtttgtttttttgttgtttttgccatagaaaatgtcgtcctttggtcattattgcagcttctttttgaattcgtataaaagattcatggcctccagcggagtgagcatatccacctgggtgcggcgcagcgtgtccagaacttcgccctcgcccaaggccgtcagggagatctgtccgctgccgggagtggtggaagtgggttttggcgcgccgctgtcctgttccagttcggacaaaatctcccgggcgcggcgaatgacgccgtcgggcaagcccgccagtttggctacctcaataccgtagctgcggtcggcgccgccggggacgatcttgcgcagga

SEQ ID NO: 3918 - DNA, 23991 bp, Unknown
  16S sequences of unknown bacteria
accattgggttattacccatacccataagtcccatcatttcaacgtgagccggaacagaagaagaacctgcaaactgagcgtctccatgcatacgacccatagagtctgtcaaaccgtaagatgcagggcccgcagccatattatcaggatgcaaagtacgtcccgtaccaccgccggaagcaacagagaaataacgtttgttattttcaattgcccacttcttataagtgccggcaaccagatgttggaagcgagttggattggtagagttacctgtgatggaaacatctacaccctcgtgtttcataattgctacgccttccaaaacatcgtctgcaccatagcattttacaagtgcacgttctccatctgaaaaagcacgttcacttaccacgtttaattctcctgttttaaagttatactctgtctccacacaagtaaaaccattaattctggagataatatatgcagcgtcttttcctaaaccgtttagaatcacacgcaaaggtttttttcttgctttgtttgcagttcttgcaatgccaattgcaccttcagcagccgcaaaagattcatggcctgccaaaaatgcaaaacattctgtctcctctctcagcagcatagcgcccagattaccgtgacccaagcctacatttctttgttccgcaacggaacccggaacacaaaacgcttccagtccgataccgattgcttccgctgcctcggaagcggaagtgacaccttttttcagcgcaattgcactgcccaaagtatatgcccagcttgcattctcaaatgcaatcggctgaacatcttttacaattttatatgggtcgaaccctttctcttgacaaagggcgcgcgcctcttcgagactggcaaggccatactcggcaagacactgttctattttggcaattcttctttctttgccttcaaacatgacatcgttagccatagattttgtcctccttatgatggtcctttttattcttcacgcgggtcaatatattttgccgcaccgtcgtaacgaccgtattgccccatatttttctcatatgcttcatttggtgttacgccatgacgaatatcttccagcatttttccaagttttacaaagcgatagccaatcacctcgtcattctcatccaatgccaaagaggtaacataaccttccgccatttccatgtaacgcacgccttttgctttggtactgtacatcgtacccacctgactgcgcaatcctttaccaagatcttcaagacctgcgcctacgggcaaaccatcttctgaaaaagcagtttggcttctgccatatacaagctgttggaacaattcacgcatagcaacgttgattgcatcgcaaacaaggtctgtatttaagcattccaataaagttttacccggaagaatttccgcagccattgcagcggaatgtgtcataccggaacaacctatggtttctactaaagcttcttctacaattccgtcttttacattcagtgtcagcttacatgcaccttgctgtggcgcacaccagccaacaccatgagaaagaccggaaatatctttaatgtcataggcttttacccatcttccttcttccggaataggagcaggtccatggtttgggcctttttgaacagtacacatactttccacttcatgggaataattcataatggtactcctttcacttttcatttttcctaagtcaaacgctttgtacctttcattataagcaattttccatagtttcgcaatagacgatacgataaattttaatcaaaatacataccaagttctattggaaaaaactttattttcggcatgatgtatgttataatacccaatatatgtctttgtatcaaattttacttatgatatcgatatactataatttaaaaaattcttgaggtgaaataaatgggcgtcatgaaaatgctgtttggtaattacagcaaacgcgaactaaagcgcatacaacctatttgcgaccaagtactcgcattggaagataaatataaggcaatgtctgactcagaattgcaagcgcaaactcccgcattaaaagaacgtttggcaaaaggtgaaacattggatgatattttgcctgatgcctttgccgcctgcagagaagcttctgctcgtgtattaggcatgcgtcacttccccgttcaaattattggcggtattgcactgcaccaaggccgtatcagtgagatgagaaccggtgaaggtaaaactttggttgcaaccttaccttcttatctgaacgcattaacaggaaaaggcgttcacgttgttaccgtcaatgattatttggcaaaacgtgactctgaatggatgggtaaaattcatcgctttatgggactcaccgttggtttgattacccatgaacaaccaaaagaagcacgtaaaaaagcatatcttgcagatatcacatacggaaccaacaatgaattgggttttgactatctgcgcgataacatggtaatttataaaaacgataaagtacagcgcggtcacaactttgccatcgttgacgaagttgactccattttaatcgacgaggctcgtacaccgcttatcatttccggtcccggcgaaaaatcaaccgacctatatgtaaaagcagaccgttttgcaaaaacactgaatatggtaaaggttgcggaattaaaccgaaaagaagacaacgacgaattatattccgaagcagactttttggtggatgaaaaagcaaaaactgctaccctaaccccaagcggtgtaaaaaaagcagaagaatattttaaagttgaaaacctgcttgattcagaaaatattacattgcagcaccatattaaccaggctatcaaagcgcacggtgttatgcaaaaagatatcgactacgtagtaaaaggcggagaagttcttattgttgacgaatttaccggccgtattatgcacggacgtcgctataatgaaggtttgcaccaagcaattgaagcaaaagaaggcgttaccgttgctcgtgaaagcaaaacattggcaaccattaccttccaaaactttttccgcttgtataacaaactgtccggtatgacaggtactgctatgacggaagaagaagaattccgtgaaatttacaatttggacgttgtagaggttcctacaaaccgtcctccaaaacgtattgaccactctgacttggtttataaaaccgaaaaaggcaaatacaatgctgtcattgaggatatcatcgaacacaataaaaaaggacagcctgttctggttggtaccatttctattgaaaagtccgaactgttaagccgtaaactttatgagcatggcatcaaacataatgttttgaacgcaaaacaccatgaacaggaagctgaaatcgttgcacaagcaggtcacaaaggtgctgttaccattgcaaccaacatggccggccgtggtactgatattatgcttggcggtaacggtgaatttaaagcaaaacaacaacttcgttttaagggttatccggaagaagtcatcaatgaagcagttggttacgctcaaacagaagatactcaagtattgaaagccagagaagaataccgcaaactggtagaacactttacagagcaaagtaaagaggaagcagaagaagtacgtcaggcagggggtctgtatattattggtacagagcgtcacgaatcccgtcgtattgacaaccagctccgcggacgtgcaggtcgtcaaggtgacccgggtgaaagccgtttctacatttctctggaagatgatttgatgcgcttattcggcggtgaacgtattgctgcagttatgggacgtttgaatattgatgaaaacacaccgattgaaaacaatatgctcaccaacaccattgagaacgcacagcgtaaagtagaagcacgtaactttgcaaccagaaagaacgttctgcagtatgacgatgttatgaaccgtcagcgtgaattgatttacaaacaacgcgaccaagttctggatggagacaatgtaaaagatgaaatcacaaagatgatgcaccaatccgtagaagatactgttgatgctttcttacctgacagtgaaactcgcgacgaatggaacattgttggtttgcgcgataactatatgggatggcttctgaccgaagaggacttacagtataatgaagatgaactgaaaaccatcagtaaagatgatatcaaagcagaattgattcaaaaagtagatgatttgagtgcatctcgtgaggaattatttggcgagcaagtaacacgtgaactggaacgtgttgttatgttaaagtgtgtagacgttcaatggatggatcacattgatgcaatggagcaactaaaacgcggaattcatttgcgtggttatgctcaacgcgatcctgttgttgaatatcgtaacgaaggttatgatatgtttgaccaaatgattgccaacattcgcgatgatactacccgtttgttcctatctgctaaaattcaagtaattgacgaacaagaagcaccaaaagagatggttgaatccggtgcaggtgccgctgtaaaaatcagcaatcctgacgaagaggaagaaaatgcatctgcaaaaccaactgcaaaagtcggcagaaatgacccatgtccatgcggaagcggtaaaaaatataaaaaatgctgtggtgctgacgaataatgaatcctatcaaaaagaacatgctgctaaagcagcatgttctttttttattacagcattcaccagaaaattcattgaaaataaattacaattactttataattacaagcataaggagtatcaaaggaggagacatatgaacaaaaaacctgtccagattttcgttatgattctaattgcaattatgtttattgcaaccattgtaattactatcgtatggaagccttctccggataatacatctgcatctgttattgcttcaggaatctctgaaattgcaatgactgggtcatctgctttatgactttcactcattacatattttttgtataaaaataaaagacaaggcacactttatgccttgtcttttttaataagcaaacatcatcacctgattaaaatttttttccttggttcttcccgaaattaaaaaccaatctattattgtaaaaataccaaatacaccgaaagtcaacagctttaagactcccaaaccaatatctccaatcataaatctatcaatacctaagccgcctaaaaaaatagaaataattaaaattaccacgggatcttttagttctattgttgaaagcatagaaaacctttgttcatccatagcatataatctttcttttaaaaataatattttgtcccccggaaaatatttttgatttataataatataattatctactgtctgtgcatgcatcatatatcaacttctttcctaaatttaatgattatgtaaactatatagaaaaacacagtgtttgtaaagcattttttatactttattttacttttccaacgaatatacaaatttatacatagttttacagaaaagcacttagataaaacaacaatttatcagagaaaaagaaaagagatgcaactattatttgcatctctttttatatttgtattcaggcttatattatgaaatctctaatcaaatttgtctttaatcttatcgaaaaaacttttccgctttgcataatttttttcattggctgttgattcaaagctttgtaagatttctttttgctcttttgaaagatttttcggaacctcaatggttacctttacgaattggtcgcctcttcctctgccgccaagtttttcaatacccttcccttttaatttaaaaacatctccgggttgggtaccctcatgcacagagtaactgacatcaccgtctaaagtaggaaccgtaatttcagctcccagtgcagcctgggtaaatgtcagcggaatttcgcaccaaacgtcatttccttttcgtgtgaaaatagggtgaggacgaacatttacaaccaataacaggtcaccggcaggaccaccattggtacctgcattaccttgaccggaaactttcagcatttgttcattggcaataccggcaggaatgttaatttccaatgttttctttttgcgtacatgtcctgtaccgccgcattccttgcaaggctgctcaataattttacctttaccatgacatttatcgcaggtacgtgctgtttgcacaacgccaaatggtgtacgctggttcacacgtacctgtccgcttccgccgcagttggagcaagtggttgcactggttcccttcttcgcaccggaaccggaacactcctcacaattttctacatgctgaaacgtaattgtttgtttacagccttttgcagcttcttcaaaagaaatataaatactggtttccgtatcagtgcctcgtcttggtgcatttggatttgcttgtcgaccaccaaatcctccaaagccaccaaatacactgttaaagatatcaccaaaatcaaaatcaccttgaaatgggcttccccctgctgcaccgccgccaaaattagggtcaactcctgcatgaccgaattggtcataacgggcacgtttttctttgtctgaaagcacttcatatgcttcatttacttctttaaaacgtgtttctgccactttatcatttggatttaaatcaggatgatactgtttggccaatttacggtaggcctttttaatttcatcctcagaggcgttttttggcacacccataacctcataataatcccttttatcagccaaactcatcactcctgaaaatacgatttatggaatcaatccatctactcgacctaatatatgtttatgtgcgcaaacatgcgcatcatacgtgcaatatatgattcaaaagctgtatgtcgaatattgtcgtttgatatacaacctatttatcatagtcgaaaaatcgtataaagtcaatgttttgtcgcataattacgtctttattatcaaaggcgattctatgtgattatttgttttcaccgtcttttttatcgctgtctacatctttaaaatcagcgtcatatacctgaccatcagcgccgtttgcatcgcctgccggaggagtggtattatctgccggatttgcctgaccagcttggtttttatacaatttttcggatacagcataaactgctttttgcaaatcttctgtgcccaacttaattgcatctacattaccgccggaaatggtttctcttaatgttgcaattttttggttaatatcgtttttatctgcttcatcaattttatcgccggcatctttgattactttttctgcagagaaacataggttttcagcttcatttttggcatcaacttcttcacgtttctttttatcttcagcagcatatttctctgcatcctgaactgctttctctacttcttccttgctcatatttgtgctggaagaaattgtgattttttgctcttttcctgtagccatatcttttgcggatacgtttacaataccgtttgcgtcaatatcaaaagtaacttcgatttgagggattccgcgaggagcaggagcaatgccgtccagtttaaagatacccaattgtttgttatcgcgtgcaaattcacgttcaccttgcagaacattaacttctacggaagtttgaccgtcagctgcagtggagaaaatttggcttttcttggttggaatggttgtgttacgctcaattacttttgtcataacaccgcccatggtttcaacacccaaagaaagaggagcaacgtctagcaataatagtccttgaacctcaccgccaagaacacctgcttgtaaagcagcacccatagcaacacattcatcagggttaatgcctttaaatggatctttgcctgttaatttctttacagcttcctgaacagcaggaattctggtagaaccaccaaccaacaacactttgctcaaatcgccgatttgaagaccggagtcttttaaagcttggcggacaggttccatagtagcctcaaccaaatcagctgtcaattcattgaattttgctctggaaagagataaatccaaatgttttggacctgtagcatctgctgtaataaatggcagattaattgctgcattggtcatgccggaaagctcaatttttgctttttctgcagcttctctcaatctttgcattgccattttgtcagcgcttaaatcaacgccctctgcttttttgaattcttcaatcatccaatcgcagatacgtttatcaaagtcgtcaccaccaagtttgttgttacctgcggtagccaaaacttcttgaacgccgtcacccatttcaataatagaaacgtcgaaggtaccgccgccaaggtcgtaaaccataaccttttggtcttcacctttatcaatgccgtaagaaagagcagcagcagttggctcgttgataatacgttttacgtccaaacctgcaattttacctgcatcttttgttgcttgacgctgtgcgtctgtaaaatatgcaggaactgtgataaccgctgcggaaacagtatcacccaaataagcttctgcatctgcttttaatttttgcagaatcattgcagaaatttcttgtggtgtataagcttttccgtcaatatttactttatggtttgtacccatttctcttttgatggatactactgtacgctcagggtttgtgattgcctgacgttttgcaacttggccaaccattctttcgcctgttttagaaaatgcaactacggaaggagttgttcttccgccttctgcgtttggaattacaacaggctcgccgccttcaattactgctacgcaagagtttgtagtacctaagtcaataccaattgtttttgccataatatcaatcctccaaaatatatcttacaaagtaaaattctataaaagtaatatttgttttagtttgcaacaattaccgttgcatggcgaacaattttgtctccaatacggtaaccttttctgtaaacagttgcaattacattttcacccaaagattcatcttcaatatgagaaaccgcttggtgatactccggattaaacggttcaccaactgtacccataacagcaacacccattttagataaaatgtcgttgagatttttttgaatcatttgtacgccttttctcaaatcttcggcagaacaatctgcttgtgccaaagccaattccatattgtctaccacaggcaaaaactgtgctatcgtatccgctgtggcagagtcataggtagctgccttttctctgtctgtacgtttgcggtaattatcatattccgcaagtacacgcatatattggtctttttcttcttctttggctttttttacttgttccagctctgtctgtaaagcttccagtgattcttgcaattgtttgaactggtcttggctgaccgtttcaacttccggagtttgctctgtttcttttttgacttctttctcttttttcgccaaaacgattcctccttactctgatgaaatcagatatctatattttatatgataaaaagtaataaacatgtgtaaacgactattgttccttcatcaaagatgtcagcattttaccaacggaatcagagacatactctaaatgagcaatccattttccgtaatgcattctggtaggaccaataataccaatggtgcctgcatgttcaccgcctatggaataatgcgcaatgattaaactggaatcacttaattcgggtcgattggtttcacttccaatgaaaacctgcgcttttgaaattctgggagctgaatgttctgtctgttccaatccctttgttaaaaagcgtgaaacttcttgttcactctccagaaaatccatgatacggcgtacattcccaagctgaaattcaggataaaataataagttggtttcaccctttaaattaatttcggcatgcatacaatcccttgcaacttccagaacagccagcaatgcggatgacattaacacagccatttctcccaaagatacccctacagattgaataaatgccggtgtaaccgcactgacgggcaaacccgcaaacttttcattaaaaatgcggaaaaagatacgcagcatttctgctgtgatatcaaaatcgcaacgaaatacacgagttttcatcacacctgtggaggtaattaaaattgccatagcggtacgacggctggtttgcacaaattgtacacctttaatcactgctccgccgccggaaggcatagtggaaactgcggcaaatttagaagtattcgccagcaactgtgatacgcagcttaacaatttatccgggtcataggcattgaccattaacatgccatccagatatttttgttcttcttccgtaattgcggcttccggcatcagacggtctatataaatacgatatcccttttgagaaggaatacgtccggcagaagtatgtggttgctgtaagtatcccatttctaccaagtttgccatttcattgcgtatggtagcagaggaaacccccagttcaagcgcaagcaatttagaacctaccggctctcctgtttccacatacgtgtttacaattgccgccagaatctttaattttctttcgctgagttccaaccttctcacctctttatgttagacctcttttagcactcttatgcattgagtgctaaatctttacttataatgtatcatttcaatctcataaagtcaatatttaaaatgtaaattaattatgaatcccataaatctacaactttttcaagtcgaattttgtaataccatgagaagataataaacgataaaaaatggaataaatgttagactttcttgacacctaatttatgtgatgagtcgaagataattggccgaaataccgtacttttttgaaaaaatcaatttcttttttctctgtacaaaaacgtctatttaaaattgtattatttttctatttgataaaaatagtagactttttatgacacctcataaattcctattaatggaaattatttattgaatttatgctattttatattttatcacattgtattataaaaagtctaagttttgagacaatcttatttgggatataaaaaggaaggaaagataatatgcaaaaagtaacacgaaaattgttggcaattatgataagtctatctattgttttatctttgtctacatctgttttggcatttgaaacagatacagatagtaataattctactcaacaaagtacaaacaataactctatgtcaaatgatgcgatatctgaaaattcaaatgagaatcatgaaactgccgaacataacattattttgcaaaacagttctgaaatttcaacaagatccaactcggtaaatattacaacatttgatgacttaaaaagtcaaatagcagctgctgcggatggagtacctgtggaactgaatataaatcagacccttataattacagagtcagtaagagttcccacaaatgctaatattacgttaacaggaaaaggtacactggagtttaccgaagaaacccaacgaaagtctttaattgcctttatcgttgaagaaggtgcaaccatggcaatcgatggaattacaatagatgcaaaaaattaaaaatatctgaatcagggtataaggtaggtgctattacaaatcacggcacattactactaaacagcggcgtcattaccggctttgacattattgccggtatgaacagcggaattattaccgtagacggtcaaaatgcttattttgagatgaacggtggatctatagaaggaaatattttcaaagaagccaggcaaacacaatatacaggagtggttcatgttacacaaggagcaacctttgtcatgaatggaggctatattcaaaataatgatttttccgataccatgaattccggtatggtctatgttagaccatactatggcaactcttcttttgtgatgaacaatggtacaattacaaacaataaagtatatgaaggcagcgtctatataggcagtcaacagccggattaccagcatgttggaacattcgaaatgaatggtggtataatttccaacaatactgcaagctatggtgccggcggagtatttgtatctatgaatgcagaagccgtgatgaatgatggactaatttcgggcaatacaggagtcagtggcggcggtgtcggagtaatagatggatttgttccgtcaggtgctatggacgcaggctttgacattgatgaatggggtactatatatcatgttccgggtgcctttaccatgaatggcggtaccataacccaaaatacagctttagaatcaggttcccaaggcggagttggcggtggtatctatattgcttcgaataaagtaactttaaatgcgggaaacattactgataactatgcagaacttcaaggaggaggcgtatatgtggcatgtgtcccttatgttctccatatgtacaacgcagtaattgccgaaaacacggcctctgtattaggcggaggaatctggtcatgccctacaggagacgttaccattcatgtaaataacggcggagctgtatttgataatactgctttacaaaatgcagccggtgatgattttgtatccgttccaagaagtgaaaactacattacaacactgtctgaaaggatgttgggtggtggtaaagctgattattacacagacggaaaagttttagaaaactccggtgtcttaggacaacctgatccatctgttcctcgctttgagccggcaaatccgggtttccctattactgacattataaacagcacagattcctatgcactaaaagcaatcacaaatgatgctgcaaaacaattggcaaacgagaaagcgtccttgttcattacaggcaatcattccgaacgcggcggtggtattggtaccaacggcagcgtagtcataggaacagaagataattggaaattaaatgttacaaaaatatggaaccaagtgcctgaatccaactatcaagacaaagaaatttccattcgtttaaaaataggagattatgaactggatacgattacgctgaatcaagaaaacaactggaccggcagttttacccacttgcccagtccggatactctccagggaaaagtaatcactgtgatagaagaaggctctgaatataatgtctcttacagcgaaattgtgcgtgatgatgatacaaaaacactgtatctcacagtaaccaatgaactgaaaacaggtaacttaactgtttccaaaactgttctcggagaacatgctgatttagagcagaattttgaatttaccgtaacgctttccgatacctctgtcaatggaatgtacggtgatatagaatttataaacgggacagcaacatttgtattgaaacacggagaaagcaaaacggcctatggattacctgcaggcattcaatatcaggttacagaacaggcagtcgaaggatataccctgaacgccgttggtgacaccggaacagtaccggctgatggcactgctgttgctgaatttaccaatacaaaagacaacgatattatcacagatactcccgattcacctgaagaaggacaaatggattctccaaaaacaggcgattcctcaaatattctgttcttgcttcttcctcttgcaattttatcagtggctatagctgctattctattcattaataaacaagcgcataaaaactaatatatacttcatcaattaacatatggaataaaatatagataacaagaagccgtcgattttataaaatcgacggctttcattaattgcaattctcttataccgtgtatcccaatatcgttttttccaacataaagccaacaaaattttaataagtttccttattgaggcgaataaatcaccttttttctctgtatagtgaaggattttattctttactatcaaataaggagtgattttttgacaagcgaaacatttcgtaatcagggcttgtttcttaggaatcaattccaaggagaaggcatatttgagattcctattgtgaaaaaacaacatgtaaatgttgaaacgataacacttatcggttatgatcatgttaaaccggaagaaaaagaatttactcacgcaatggtacatttctttttggacgattataagttcgaagtgttatggaataatcctgagcccagaataaaaaagttggcgcaatatcgggcagtgctaacaccccaatacagtttgtacactgaaatgcccatgactctgcaactatacaatacgttcagaaacagatgggtaggcgcttatttgcaatctcggggcattacagtcataccaactgtctgctggggaacaccacaaagttattggttctgctttgacggtttggaaacgggctctattgtcgctgtctccacattaggtgtacgtactgaaaaggaactgttcatgcacggatatcaggaaatgataaaacgtgtaaacccggaagcagtcatttgttacggtaatccttttgacgaaatggaaggaaatatcattgccgtagattatgccaaaacaaacaatttatccaaatgggcagactacatttgcggtgaaaaagagataccttttaacagcaacttgattgtaaaacggtatggttatgtgctgaacgaaaaaggcatgggcagagcttctggacaatggaaacctaaaaaagaagatgataaacgctttctgggtaaaccgggagaaaccaaaacaactaccaaaaagaatggtgatacttatattacccgtattggaaagaatggacgagcaaccagtgaacgtcataactcaacacatggaaatccaaaagagcatgttaacccacacgaacatgatgtgatttggcaagaaaatggagctccaaccttaggtcccggccgaccggtcagtgaaaaaaataagtatattaatttcggaggtgttataaaaatgagtaatcagtatgaaccaaaatttgaagacttggacgattttctggattctttgctgcgtggcagagaaatcgtaattgaatatcatggaaaacaatacggtatcttttatcttgaaaaaggtttttatgtggcacaatcttaccatgatgaaacaggaaaattatatcgaactccggacgaagcactggaatacactattgacggtaccaagctaagggacattattacagttgtaaatgttgttcaaagaaacttttgattgcctagcaaacccagaataaaaatttttagaaataaggcgtaacaaaaatgaattatattaaattttcaaaatttgaggatttagacgacttccgcgattctttgctgcgcggcagggagattgtatttaaatacaacggaaaagaatacggtatctttctttttgatgatggcattcatgttgcacaatcttaccacgatgagaccaaaaaagtatatcaaacaccggacgaagcgctggaatacaccattgacggcgtcaaaatcaaagatatcatcaccactgtagagattgttcatagaggtatttaagaatacgatttaaaaagatagaatcacgccttgctataaaatctttatgagtcggaaatcatctatgaaattttatacgccaatttatcacgcttgtattttatacgaacaaataaacaagggaagccggagtgttacacgttcagcttcccttgtttatttgttatatatgattctgacaataaatgaacctttttatagagatgccagctccaattcttctaccgcttggtccagaaatatttttccgtctaaatgatccagctcatggcataaacacttagccatttcaccttctcctgtaatggtaatctcttccccatactcgttcagtgcctgcactattactgtttgaggtcgaacggtctttgccactctatttggaaaactgaggcagccttccatacattcttgttcaccttcagatttgattatctttggatttaccaattttaaatactggtcacaatagtcaatgacaaccagccttcttaaaataccaatttgatttgcagccagcgctgcaccgctttccgtattatgcagagtgtccatcatatcatcaagaagttgtcgtactctgtcattcacttcttccacttccctgcaagattttcttaacacagggtcatcattatatcttaattcccgaattgccatacttctctccttttctgaatcatatatcattcttaggcactctattaaattagaatacaatccatcattcaattcagccaatagacggaaaagggggttgtattttttaataaggaatcccagcttacctatatctatttgctgtttatactttttcatatactatatacataattctgatagaaagtcaaccatacacaataggctatcacaacatttttacaaataggaataaagaaaacagctgcctgataaagcagctgttttttgttatttggttaattgataaacattggaatcttccgtaaagttttgtacattataaagcagcaacacatctgtaatgccattttgctccatatagtccatagtactttgtctgtatgcgcgtaaatcaatcatatgcacttcttcataatcatttacggcaaacggagcaaaactgtttgcataggaatctttaacaattaacaatttcttgccattcttattacctgtggtaatctttgtaatggcctgatttccgtttaagaaagcggaatatttatctttttcatttaaatatttctcttcaattaaagaattggaggtctccgttactttatctcctgcacggtactccacttccaagggatattcattcggatttttataatacataatggtttcaggctgtacggtataaagatttgcctttgagtaagtggtacctaaaaactggtcgctcaacacctcagactgataccaagataatggtttttgttcaattcccatctctttacaaaattcttgataagcatagtatacgcccagggacgtccagtgatggtctgtcttataaaagatatcttcatctttatgagcactgagcgcatctgttacgtctataaatcccggcaaagcttccttcatttgtgctattagctcttgctgatccacttcgggcgcaaacagcggcagtttatctttcaaaatatcgttggctgtgggaacaatcatagcctttacttcgatgccgaatctattctgcactttttgtgaaaattctttggctgccgtcagattaccttgaaatctgccattatcataagaccagaattgttctattaaatatccgtcttttgcaaaatagactccaccggaatcttttttctgtgctcccaactctaccagtgattttagtcctacccactggtcacggaacataaaatggtcggatatgtaggtttcaaaatccgtcgtccaaatttgttttgtttcacgcccggtttcatctactgtgggagtgcctacaaacaaactttcccatgttagcttaggaaactctgccaacacacgattctcattttcagaaaaatcctttttgggcattgccgcgtttacaatggcgattgtagctacaataagtacaaatacaatggtcataactcttgcacgtattttcatacaatcacctcctagaatctaaaatataagaacgggttgtatgtactgtttaccaaaaatgcaaccgaaatcacaaatattgcgatgataaaaacattctcgataatcatagcagcccatgttttggtttgtaccaaagacataatttttctgcctaattttgcaggcaaaggtgtgcttgcaacaatcaaaattaaaattagtacaagattggatagcaacaaatacaatgacatattgtcaaccaactgcaaaccaccaaaaccaaacataccttttaaatactcccaaccctttgtcatatcgtcaaagccaaaaatgacccaaccgattacaacaaaaaacagggtataaacatgagagaaaaatgccggaattttcttcaaaacttttagtaagaacagcttttcaatgatgagcagaacgccgtaatacccgccccaaattaaaaagttccagctggctccgtgccagaagcccgtacaaaaccacacaataagcaaattaaaaatttgacgtatcaaaccttttctgttaccgccaagcggaatatatacgtattctctaaaccaagttcccagtgagatatgccatctgcgccaaaattctgtaatgctttttgagatataaggataatcaaagttttcgagaaatttaaaaccaagcatttgtccaagaccaatggccatgtcggaataagcagaaaaatcaaaataaatttggaacgtaaatgccaaagctccaacccaggtcccaactacactcatgctagaaacttccatggctgaaagctgcgtccaaacctgaccaatggtgttggccaataaaacctttttggccaatcccgtaacaaatcgcttaattccataggcaaacatgtccgtactttcgcggcggttatccaattggtccgcaatggtagtataacgtacaatcgggcctgccaccaattgagggaataaggcaacataggcgccaaacgacacaaagtttttttgtgcagccgcatcaccgcggtaaacatcaatgacataggacatcatttggaaagtataaaatgaaataccaatgggaagtgttaaattgagcagtggaatggacgtcccaaaccaagcattgatattgccaataaaaaagtcggtatatttaaaaaatccaagtatacctaagtttaaaacaactgaactggctaaaatccattttgcggacgttttgcctttgtacttttgcaccaaagcaccgtacacaaaattcaaaattgtagaaaacaacatcaacactacatagaatggttctccccacgcgtaaaataccaagctcgcaataaacaaaataaaatttcttatttttctgggcgagataaagtaaataccaaaaacaatagggagaaatacaaacatgaagtttaaactgctaaaaaccatgttatttttctccgtttcacctattatcatttctatgatctaattttcatatgttttttattatacaacagtttatagaactttcacaatgaaattctgcaaatactatgataaaattttcacaattattttatgcaaaaataatcgaaattttatatgttatacaaacaaaattttttgtatcaactactggtattccagttctttttcagtactacatctagatatcaacctatgtctatgttcaacgttaaaaatgagatatgggattctacagagacaaaagatacaccatacctcattttcacttcacggtcggatactgtgccacacccggcaatggtgaacatgacacataacacaaaaaacaacagaagccatttgattctcatattgtttcctccccaaaacagtatgagtcaatataataacgtttacacaaaaaaggagaatgaaacattctctttccttactatgcacctataatagataaaataagctgattggataccaaaaaaccctttggtgtcagcgcaaaaccgttctttttcatatgaaccaaacctgcagcttcataccgctgtgcccgtttgatataagattgcggaagtggttcctgaaatttatgataccaaatttcattcgtcaaaccatctgttaaccgcagcgccaacattacaaattcttctttatctccgccctgtccgtccataattggtgggtttcctttcagaaatgagtaaagattcctatcataataaaatctttctcctttgagaaaagagtgagcagacggtcctattcctaagtattcctttccctgccaatattttgtgttatgcttgctgatttgcaacattccgtttgcatccttttgggcaaaattagaaatttcatattgatggtatcctctgctctccaattcctctaccatacatagataaaaatctcccatttggtcatcatccggcaaaaggagcgtattttgttgctgaccgtatggcgtgttcggctctattttcagcaaataagcagaaatatggcttgctcctgcattatgacaaaacgcaatagactcttttaaactctgttccgtctgtttttgaattcctaccattaaatccatagatacatttgtaattccagccctatgcgcagctttgaccgccatctcagcctgctttgctgtgtgtgttctgcccaataaatccagctcttccgcatgtgcggactgcattccaattgatatgcgattgactcctttttgtgcaagtgcatcgagcaaatcttccaactgtcccgaaggattcacctctactgtgatttctgcctgctccagcccaaaacagttctttgcctcatctatgatactacataaacggtttgcccccaaagtactgggggttccacctccaaaataaagcgtatctgcatttccgccaaccacatttctatatgtatataatttatcaataatacaatcagtataatctctcatttgttttgtatgggttaatgaatagaaatcgcaatacggacatttttgcgtacaaaacggcacgtgtatataaaggccaatcggttccatgttgctcctcctaaaataattttatttatcatatcatattttatcatacttttacatattgtaatgtgtaagccataatttgctaaaaaggcagcaccacaaatacataggagtaagaatacgctttttcttacaatgatgtaacgcaaaaactctccgagcttttatcaagtcggagagtttttgtgatttcaaaacagttctgtcagcaactgtttatgattttcgttttttcgatgtaacagcatcaataatgactttaatgatttgaattacaactgttggtgcaaaagctaagcctgcaattgcgccaatttgcataccatttagaggagagacatcaaatacaccttgaactcccggaataaacaatgcacagcttaataaaccaacgccaattacaaatgcacctattgtatataaattggtatgaattcctaatttaaaaatagaacttttggccctgcagttaaatccatggaacaaacgtcctaaacaaagtgtagcaaatgccatcgtacttgccgtcatagcatccgtttgcagaccgataaaaaaggctcctactgttgcaatggcaagcaaaacaccttgatatcctgtatctatcaaaaagtcttttgttaaaatagattctttactgctgcggggtttttcatttaataaatcctttgaggatttttccatactgattgccaaagcaggcaaactatctgtaagcaagttgataaacaacaaatgtactgctgtaaacggcaccggtaatccgaaaatagaagtaaacaatacaaccaaaatacctgcagtattaccggacaacaaaaattgaatggagtttttaatattattataaatatttctgccgtttgttaccgctttgacaatggtcgcaaagttatcatctgttagaatcatggatgaggcatcttttgatactgctgtacctgtaatacccatagcaataccaatatccgcctttttcaaggcaggcgcatcgtttacaccatcgcctgtcatcgctacaatttggcccttcttctgccacaagtccacaatacggattttatgttccggtgatacacgagcatatactgagattttcggcagcaattcggacagttcctcgtctgaaattttatccaactctgtaccaatcatgaccaaatcgccttctttaaaaatgccgatttgttttgcaatggcagaagccgttactttatggtcacctgtaatcataatcggtttaattcccgcacgaatacaattttgaaccgcttgggcagattcttctctcggcgggtcaatcatacaaataaggcctacaaaagtgtatccttgctcatcatgtaagtcaatcttttcatcgtcttcttgtttttgagcaaaagccagtacgcgaagaccattttcagacatcttctgattttcgttttggattcttaatttatcttcttccgtaatcggacgtacaacgccgttatccaatatatctgttactcggtccagcaatacgtctactgcaccttttgtcaccatatataatgtatcatctatgcggtgaagtgtactcattaatttacggtcggaatcaaacggaatttctgccaaacgtgggtattgctccagtttgtcataatagtccccattatgcttcatataataatccaccaaactggtttcggtggggtcacccaaagttttaccgtctgtcacagtagtatcattacataaaattgaagttaaaaacagtctgtctttgctgccgtctccataacaaaaataatctgttacagtcattttattttgtgttaatgtacctgttttatcagaacaaataatggatacacatcccagtccttcaactgcacgcaagtttttaataatggcgttctgtttcgccattcttgatgtaccaattgccaaagagatggtaacaatggaagacaatgcttccggaattgctgctacagccaaggctaccgcaaacatgagcgaatccataatagctgcaaataattcatttcccggcagctcatgatacaaagtaagaccaaatacaataaagcaaattgccataatgattaaagataactttttactgaagttatcgaggcttacttgaagcggagttttacgttcttttgtatcgttcatcagcttcgcaatttttccgatttccgtattcatacccgtacctgtaacagctaccaaagcacgaccgtacgttaccatagaaccggaaaataccatatttacctggtcaccaagcgccagttcttccttgtcaattgcatcacagtgtttatgaaccgcttcagactcacctgtcaacgcactttcattcacctgcaaagaatagttttcaaccaatcttccgtcagccggaatcatatccccggcttccaaagccacaatatcgcctactacaatatctttggcatcaatttctatcttttgtccgttgcgtattacttttgccaccggagatgacaaagcctttaaactttgcagcgatttttctgccttaaaatgttgtacagtacctaaaatagcattcaggataattactaccaaaataacaatcgtgctctcatagtttcctgtcaccaacgagataattgccgccgcaattaagataatgaccagcaaatccaaaaattgcattaaaaatacttgaaatacatttttagactttttctcttccagttcattgcgtccataagctgcacgctgttcctccactttggcatcattcaaaccatcggttgtggtacctaaattggaaaggacttcttccgtcgtttgctgaaagaagtgtttcatggatattcctcctaacattacatacacggaaacagcaaagcagacaataaaaaaagacttttattacgacccgaaagccgtaataaaagtcttgctatttcagatacaagcgagctttttaaaaaagccggaatgtcgcactgtatcacagatatctctgccagctactcccttttaacttgccaataatgtaccatattttttttaaaatgtcaactacaaaattaaaattgtgacaatctttttgcaatattattattgtatgacaaccgttgaaaaatgtatattgaaatgtatcatatttttattaatatgaaagaagagtatttcatgatagttttttaaatattctgtaatcccatataaatttaacctttcgacagaagcaaatagcaagacaaacatggaaaggaacgtctttcaatctccaatattttggctgttatgagaacgttttaatatttattggttagaaattgcgaagcaatttcttttatgttataacaacctagcaacaaatacaaaatcaaagattttg

SEQ ID NO: 3919 - DNA, 26513 bp, Unknown
  16S sequences of unknown bacteria
accgtcgacctctagcgtgacaggctagcgttctaaccaactgaactacacggccataaattggtgggaacaacagggctcgaacctgtgaccctctgcttgtaaggcagatgctctcccagctgagctatgctccctcattcgcagcgagcttctctattctaacagagagaacggtgtttgtcaagaaaaaagttttttcattcttttttctgtcacacaccttgcggcgacgataattattataccggctcaaaccacatctgtcaacctttttttgatttttcttcaagattttttgaaaagggggcgatgcccccttttcatcggttcctcagggccgtttagcctgtttcaaaagggctgtcagatcctctgtggaaaacacatattctgcatcgcagaactggcaggtgatgtgggcatcctcgccgctgtcccgcagctcccgcagttccttttctcccatgctgatcagggcctgctccactttctgccgggagcaatggcactcataggccaccgggtgcttctccagcacatggaatcccagcccctccagagcctggtccatgatctgctccatggtctttccctgactgagcaggctggtgacactgggcatggatgtaaagctcttttctagctgatccaccaaactgtccggcgcaccgggcatcagctgcaccaggtagccaccggcggctgtcacctgctgatcccgtcccaccagcacacccagagcacacaccgtgggcgtctgctcgctttcggcataataaccggcgatatcttcggcgatctctccggaacgaagagccactttcccagaaaaaggctctctggcgccgatgtccttgatgaccgtaagcagcccctggcgtcccacgccaaaccctacatccagcttgccatcggcgcgaaggggcaggtccaccgccgggttctggagataccctcgcacattgcccttgtgatcggccaccgctgtgatggctcccagcgggccgccgccccggatctgcacggtcaccgagccgttatcgctcttcaggccgtcgcccatcatggacgccgccgccaatgtgcggcccagggccgccgtggccagaggcagggtgtggtgaatctgacgggcccgctccaccaggccggtgcattccactgcgctcaccgacacaaagccgtcttttgtcataccgcgaatcaaataatctgtcatatttcctccatggaatggtgattttctgcaaaaaagtcagggcttttccgccacaaaaaagaggcgccgagtctgttctcccacccgcttccctccaggtgaaccatagacatggcgcacccgcagtccggcctgctggagggcctgctccaactgctcacgggtataggcccgctgctcatgccactcggtgttccggctccaggttccgtcttcttcctgaaggaacacatccacctgatgctgggcccgatggcttttccggtcatagccatactgccaggcgcaaaaagccccctccagctcttccacgctggaaaggccgcccatctcctcaaaagccagcggtgttttcacatcaaacaaaaacaggccccccggttccaaaaacaaggaaacccgggcgaaagcctgtttcagctgccgaagctcggtgagataattgacgctgtccaagcagcaaacagcggcatcgatggtgccgtacagatccagctgacacatatcctggcagagaaacaccggcgggcaggaaagctccccgcacttttcccgagccacagccaacatatcggcagacagatcgcaagcgatcagctcatagccggcctgacccaaaagccgggtcaggctgccggtgccacaggccagctccagcaccaatttcaccggtttttttgccttggcaaaggccttttgggcaaaaacggcccactgctcatagggcacatccccggtcagggcatcatacaccgccgccaaagcggaataggcgatcatttctccagctgctccagaatgatgttatagccgcccttgccgtagctgagagcccggttgacacggctgatggtagcggtgctggcccctgtcttttccacgatatcgctgtaaatgcagccttttttcaagagcttggccacaataagacgctgctgcatggccatcagctcggtgacggtgcacagatcgtcaaaaaaagcccggcactcatccagatctttcagcatcaaaatagcccggaacagctcgtccatgctttcttctttcggtctcacatgcatcttcccagtcccctttgtcttttattttctccaaatttcaagcgggaaaaaccttcaaaaaggtacttatagtgtatcacatcgcttcaatgatgtaaagcccgcattttgttttctttccgtcattttccaaaaataatatctcatttctaccgtttcagcaaaaatatttcaaattctgcaaaaagcaaaaaatacccccggcgccggtaacaattccggcgccgggggttcatagaaaacccatccaaaatggctctgctgcttctttttattccttaggcgtttcctccgctgtccggctctctgcccgggccgcctgacggaatttcacccgggaagaacgcacttcctccaaagcctgggcaatggcctcctcggtgcgcttcatggcgtcatcgcaataggcattggcggcacccatcagctctttggcccgcttttccgccgtgttgatgatctcggtgctacggcggcgggcttcattggtgatatcgttgtcgttgaccttctgccgggccagctcttccgcctgcttgcggatgacttcggcctcccgtttgcccgcagtgatcatctcgttgcgcttttccacgatctcccgggccattttcagatcagaaggaatattggcccggatctcatccaggatatccaaagccttttcccgctcaatgacgcaccggtcacccatcaaagggattccccctgcgtcctggatcatttcgtacagcgtagttaccatttcatcgattgtgtttgccggcattgttccattcccctatcttcattgtcggtgggtgtgacgctgtgcgcccagctttttttccagcgcctgccttacaggcggcgccacccaggcactcacatcctcccccgcgagaaaggcctctttcacacggctggaactcacatgatcccagcggggttcggcatacagaaacagggtctcggcctgaggggcatgaagctggttaaaccgggcgatctcacattcataagcaaagtcttgtgcattgcgcagtcccttgacgatggcatcgaccccgtgatccctgatataatcgtaggtcatgccgccgaaaaagtcggcttccgccccgggaattcccgccacgctctccttcaccaaagaaaaccgctcttccaaagaaaagagagcctgcttctggtcgttgaccatcaccagagcgataacccgatcaaacagacgggctgcccggcggatcagctccacatgacccaatgtgggcgggtcatagcttccggggatgatagccaggctcattttgtttcctcccgggtgaaggtggtgatggcaatggcgccatagcggtactgctttttcacccggtaaggctcctccaagggctggatcaaatcctcccgggcactttcgcatactattataccaccagtttgcaggatgtcaatttccgctatctgccgcagtgcctgattgagcagctcaccgccatagggcgggtccagcaggatcagaccgaatttctgtccccgcagaccggacagggccccgaaggcatccccccggatcaaacggctgcatttttcaaaaccggtagcggcaatattccgctccaccaccttctgggcgctggggtcgctttccacaaacacacagctttctgcgccccgggaaagacattcgatgcccatttgtcccgaacctgcaaacaggtccagcacccggcggccttcgatgtcaaactgaatgatattgaaaatggattctttcacccgatcagtggtgggccgggtgctgcgccctttgggggcctccagcttccgtccccgggccgtgccggtgatcactctcatggtttttcctccttcgccccttgggcgtcaaaatgttcccgcacctgttttgccacattccggggcaaaacctgggccagttcttcctcgctgcactggcggatggcggccagggtgccgaatttcttccgcagcgcccgaatgcgctgctctcccaggccgggaatgcgggacagggtactctccttcatgctgcgtccccgcagattcttctgatactcaatggcaaaccggtgggtctcctcctgtaaattgcccaccagagagaacaccgcaggctttgtgcggatgccaaactcgtttccgtcgccgtccaccaacgcccgggtgcggtgatggtcatctttcaccatgccgaacaccgggatgttctgtccatgctcccgaagcacctgatgcactgcgttcacctggccctgcccgccgtcaatgagcagcaggtcgggcaggggcaaaaagcctttgtccccttcctcggcccgtttgagacgccggtccatggtctcagccaaggagccatagtcgtctccccccagcgcttctttgatctgaaagcggcggtaggcacttttgtgaaaccggcctttttccatcaccgtcatggccgccaccgtgccggttcccgccagattggaaatgtcgtacccttcgatccgctgaggagaagccggaaggcccagaatctccgccagctgttccaaactgcgggaggtcttttgctcccgcttgtccagaagttccagctcctggcgggcattttccatggccagctccatctgcttccgcttttctccacgctggggcacctgcacatagacctttcccttccgcaatgtgcccagccattgagaaagcatctcctgatcttccagctcctgattcaccagcaccacccggggagaacgctgggtcatggtgtaatactgcttgatgaacccttccagcagatctcccatatcctccgaggtgacgccgtcgaaaaactccttctttttgtccagaaggttgccgctgatgtagttgagcatcaccacgcagccccggctgcccagcacctggcaggcgatcacatccagatcggaaagggcgccggagatgatcaactgatcccgtcccagccgttccacggcccgcatccggtcccgcaaagcggcggcccgctcaaattgcatttcttcggcggcctgctccatttcctcctgcagttcctctgccaatccctggtatttgccctccagcagacggcacacctgaccaatgagccggttgtactctcctttggacaccttccccgagcacacggcacagcaccggccgatgtgagcattgagacaggggcggcttttgccgatatcccgggggaacttcaaagaacaggtaggcagtttgaaggtgagcagcgcggtatcaagagcctttttcgccccgctgcggccgccgtaggggccaaagtaccgggccccatcctccactggtttggaaacgatggaaaaccggggatattcctccttggacaggcgcaggaagggatagcccttgtcgtctttcagcagaatattgtatttgggcttgtgttttttgatcagggcgcactccaacagcaaagcttcaaactcgctgccggtgatgatggtttcaaaatcatggacctgggagaccattttcaaggttttgggcgtatgggaggccagattggaaaaatactggcttacccggtttttcagcgccttggccttgccgatataaatgatctctccccctgcgtcccgcatgatatacactccaggcagaagagggagcagaagggctttttccttcagttcttcatacataaatcctgtcctccggcgaaaaaacgcccacaaagagcgagcgccgcatggtttttcatgcggcgccggcgatgggttcgtgtacggcccgggcccattgcccggtatgtaggcttattctccgaagttggaagccaccagagtgcacagggcgttgacagcctcttcttcatcggagccctcggcggaaatgttgatcaccgtgcccttggtaatgcccaaggacagcacgcccagaagactcttggcgttgaccttgcggttttccttttccaccatgatggtgctgcggaattcattggctttctgaataaagaaagtggccggtctggcatacaggcccacctgattgtttacagtaacttctttggaaaacatttaagctaccccgctttctatgcttctattgtaattattttaacagattcgtcacgaatgtgcaaggggcatttacacctaactcaaaggcgccccagcactccttgaaaaagggaaaagagcagcggcataaaggcggccgggatcagattggccacattgaattttttcacatcccacaggttgaaggcaatgagcatcagaacggcgctgcccaccagggacatctgggttaccaccagatcggtgagatagggcttgatgagcacggccagcagggtcaccgccccctggtaaaggcccacagacaaggcgctgaggggcacccccaggccatagaccgtagcaaagagcaccgacataatgccgtccagtattccttttgcaatgagcatggtagggtctcccaaaagcccatcctgcaccgagcccacaatggccatggccccggcacaaaacaggatggtgcagttggcaaagcccactcccacatcccgctcacccgctttgccgccaaagcggtttttgatggcctctcccgccttgtcaaacaaccggtccagccgcaaaagctctcccacaatgccgcccacagccagggacaggatcagaaggagggtataactgctctccaaagcgccgctttcccccacctgaagcataccggtgaacaccccagacagcccgatgaggaaagtggccgctcccagggcctgaaaaatgatcttgctgaaccgctcgggcacgcccttgccgatgagcatccccacaaggctcccggccagaatcatccccatattgatcagcgtgcccaatccgggcatccccatcaccgttcctttctcttcccacttctttttcttttatatgttcatctgcacaatggtcacgccattctccccttcgccataggcgcccagccggaaggatttcacctgccgggctcctttcagccgggaatggacggcctggcgcagcacgccggtgcccttgccgtgaatgatggtggccgagggcaagcgcagccggaaggccagatccaaaaaccgatccagttccatcagcgcttcttccgccgtcatgccccgcaggtccagttcgctgctccccctggtgggctgggaaggcgcctgggtacgcacgctgcccttttccttcttctgggcgggcgctgccgaaatcagctgcaattccttttccttggccgtcagcttcatgattcccgccgacagctgcaccggctggccgggtttgggggtctccaccacagtacagcgcattccgttggagacgatctccaccacatcccccttctgcaaggggcggggcaagggcgccgcctgttttttgatctttttctggatggcctttttctccgcttcggagagatggcccatcatcaccgcccgggcctgggacaggttctcctccgccggattgcggctttgctcccgccgcaggcggcgcagctcttccaccgtgtcatcggcggccttccgagcctcgtcgatcagcttctgggcctgtttccgggcatcctccaacagcttcttccgctcctcctcaatggaggcataggccttttccgccttctccttgtcttcctgtgctttctgccgctctctttgggccagctgtagctggttttccatctgctgccgcttttcttccagggtgcggatcacatcttcaaactggatgttctggctgtccatgccgcttttggccttctgaatgatctccatgctcagccccagccgctgggaaatggcaaaggcgttggatttgcccgggataccgaacaccagcttgtaggtgggtttcagagtggacacatcaaactcacaggaggcgttttccacgcctctggtctccagagcataggttttcagctcggcatagtgggtggtggccgccaccagtaccccctgctgccgcagatgctcgatgatggccacggccagggccgcgccttccaccgggtcggtaccggcgcccagctcatccatcagcaccatgctgccttctcccgcctcttccagaatctccacaatattcttcatatgagaggagaaggtggacaatgactgctcgatgctctgctcgtcgccaatgtcggccagaatgtttttgcatacccgcaccgtgctctcgtctccgcagggcagctgcaaaccgcactgggccatgagagtgagcaagcccagggttttcaggctcaccgttttgccgccggtgttggggccggtgatgataaccgcatcggtcttgccgccgatggtgaaggtgatgggcaccgccgtctctcggggcagcagaggatgccgggctctctccaggcgggtctggcccttttccagcagcttgggacggcaggccttcatcttataggccagtttggctttggcaaagataaagtccagggtgcacagaatatcatagtcctgctggatggtgtttgcaaaggctcccacctccgccgacagctccatcaggattcggtcgatctcgtttttctccttggaacgctcttcccggatggtattgttcagctccaccacctgcatgggctccacaaacaccgtggccccgctggaactcacatcgtgcaccaggccggggatgctccctttgaactccgctttcaccggcaccacataccggtcgccccgggtggtgaccacggtgtcctggagcaccttggcatagctgggagaagagatgatccggttcagcgtctcccggatgcgggaggccgccgtgcggatacgccgccggatctcccgcagttccgagctggctgtgtcggcgatttcttcttcagagaggatagattgctcaattttatcctctaagtatttatttccactgagtcggcggaagcaatcggccaaaacggtttccacctgggtgtccttttccagatacccttttccggtgcgggccgcccgcagcaaggcgccgatgtccagcagctccttcatattcaggctgccgcccaccttggcccgttccaatccggcggacacatcccgtacgccggagaaggacggactgcccagcatccccgccaggcggacagcgtcctcggtctgctgctgcaaacgctcgcagcccaccagattgtcttccggctccaacgcccgggccatttccttggcccgcggggaaaccgcttctttttccagcagctccagaaccttgtgcagttccagagtgcggcaggattttttctgcaattccgtcatatttcttttgttccccctcccagggatcggtaaaagtccagcgtctgaaatccccgctccaggcgggtgaggcagtaggcttcggcaaaggcccccagcagctccaggtccccctcttccaatcggaaggaaaagagctttttcagatcgcatcgcagcacataccgggccgcctgcaaagcggccctgctcaaaggagcgctgacgctccggccaaaggctccccggcaagcggcgcagtggagctgccccagttccagattgaccataggctcttccgggtcggcgccgcaggcggcgcacttccacagatcgggctcatagccggcaatagccagaaaacgcagttcaaaagccgccttgatctgccggatgtcgtacagatgatgggccagggcatacagactgttgagagccagacgaagcataccgggggccggcacatcttcttccccttcggtggccagcagctcgcagaaataggagcccagcgccagggcgtccagatcccgggaaagggaaaaaaactgctccagcatctgggcgtcctgcaaagtgagacggccatttttttcgtacagagtaaactggcagtaggcaaacagctgcccggcccagcccatacggctgcttttccgccggatgttcggggcttttaccgtgatttttccataatcttcggtcatcaccgtcagcagccggtcgctgtcccgccagtccaccgtgcggatgaccagaccttttgtggtcaaatgcatgaatctttatgtagggaagagcctttttacggctcttcccgctccttttctatcacataaaccaaataggcttccggcaggccggtgcggcaaaaaagctgccaggcctgctgggagacagagttttcttcttccttcaccgggcatccctcctgttttcagtgtaccgccccggaaggggaaaaacacatgaaaaatggcgccagtcatggaaaaagatggccataccggaaaaagcgtccgaaaagcttctcccagcttcttcattcgtcttcgtagccgaagtttctgatttgattcgggtgatttctccaatcttctttgaccttcacccacagttccagatggactttggcatccagcagcttctggatctcaaaacgggccgtggagccaatctccttgagcatggccccgcttttgccgatgataatacccttgtggctctttcgctcacaataaatcaccgcgttgatggccaccagaccatcctcccgctcctgccatttttcgatctccaccgccacgccgtggggcacttccttgtccagtttctggagcattttttcccggatgatctcggccaccagctggcgttccggctgatcggaaatcatctcctcgggaaacagggctggagagggcatacacagcttttccagctcccggagcagttcctgctttccttctccggtgcgggcgctgagggggatgacagcggtaaagtcatgggcctgcccataaagcgccatcacttccagcagctcttccttttccacggtgtcgatcttgttaatcaccagaatgcatggcatcttctcccctttgatccggtcgatgagcatctgctccggaatgccgatgcgggccaccggctccaccagcaaaatagcggcatccacatcggccaccgttttgttgaccaccttcaccataaagtcgcccaaagcatttttggctttgtgcaggccgggggtatccagaaacaccatctgataagggtcctggctgagcaccccagtgatccgattacgggtggtttggggcttgttgctcacaatggccaccttggccccgcacaaggtgttggtcagggtggatttgcccacattgggccggcccaccaccgaaaagacgccggttttttcgatcatagattctctcctgtctcccgcagaagccccagctcctgcatgatctcttcttccagattccgcataagacgccgatcctcttcctcccgctcgtggtcataccccagcaggtggagcatggagtgaacggtgagataggcacactcccggtcaaaggaatggccatattcctccgcctgggcccgggcccgctccaccgacaggatcatatctcccaaaggcaccaggccggtatccgggtccacttccatttccaaatcgccctcatattccccattgaccatatccagcaggggaaaggacaaaatgtcggtgggcaccggcttatcccggtactccccgttgatctggcagatgccctcatcgttggtcagggtgatatccaccgaacaatgccaatcgggggccaccttcttcagcgccgcccgggagctttttttcatcagctcctcggcctctttgtcccggcactccttgtccccggaaaagcggatcttcaaactgctcaccggcctcacttcctttctctggtgcacatatggttttattatactccctttccccaaaaattacaatccggcccccgtattgacagaaccagccccacatattataatatcgttaaacgatatcgtttgacgatattaggaggtaagcccatgcccaaaaaatccctggaagtcctcaccgagtccatgttttatgtgctcatggccttttggcgggaggaaaaatgcggggcggaagtggcggcctttgtggaagaaaagaccggtggccgcttccgactgggaccggccaccctgtacaccctgctagccaaatttgaaaaggaagggtatctctctcccagccaggtggaaggacgcaagcgcacctaccggatcacccccaaaggccgggcggcctatctggaggaagtggaacggctgcgccgctgcctggcggatgcccaaagcgaaggaggttttctgccatgaaaaaaagccgacgctctaccgcataccgtctgcccccttgtccgtcctatgacatcgaaggcaccgaaagctggctttccgatctggcggaagaagggctgtttttggaaaaggacggctttctctttggatttgcctccttccgccggggagagggaaaacaacgccgttaccgtctggaggccgcccctcaacccaccggcctgttttccgatcaggaccgccccgatgaagaggcggaagaactgagccgcctggccggatgggaatatatcgccagccggggagatttctatatctttgccaccgacgacccccaggccgccgagctgaacaccgatccccaggtacaggccctggccttggaaaaggtgcgccgccgccagcgccagaccctgtttcccacctttttctggctggtcatttatccccttttctccataaaagggggtgtgctccgctcggccatctacctgggcgctcccattttccttctgggccatctgctgatcctgtggtcgattttttctcccttgcgggaatttttccatctgcggaagctgagccgccgtttgcaagagggcctgcccgtcgatcatcacaagaactggaaaaaatccgcccggcaacattttgccgcaaaaggcgtttttctcatcctgctgaccgtgtggattgtattggtgctgacggcctggcagcgggacaccgacaaagtggataccgtgttccttgcggattttaaagagcccgtgccctttgccaccatggccgacctactgccccaggggcagttcaccttaaatgacatgggctttggcaatgaagtcaccctccgctcttcctggctggccccttcctttattgagtttgaccaggtaggaacggtgaaaaatgaagaaaaaaccgtccaaggcggcatcaatgtggagtatttccacaccgtttctccgctcctggcccgacttctggccaaagaactgcagcggtatgacagacgcctttcccactacgaagccctttccaccccttcagccgcagaattgggtgtggactcggtcacaggctacaccgccattttccccactctggtgatggtgaaaggagaaacagtgctgaaagtgtccttctatcaaacctcccccagttacaccatgcccttggaagaatgggctcccatcttcgcccaaagcctgagtcagtaacaaaatgaaaaagggaaagcgcattctgcgctttccctttttcttattttttgaagttccgccggtttttctctttgccctcccggcttttctgcttctgctcttcgtacttggcataggccgtgacgatcttctgcaccagctcatggcgcaccacatcccgggccgtcagggtgcactggccgatgccttccacccctttgagcacccgcatggcttctttcagaccgctcattttcccgtcgggcaggtcgatctgggtgatgtcaccggtgatgaccaccttggaattaaagcccatacgggtgaggaacatcttcatctgttccggcgtggtgttctgggcctcgtccaggatgataaaggaatcgtccagggtacgtccacgcatataggccagcggagccacttcgatgctgccccgctccagataccgctggaaggtctccggccccagcatatcgaacaaggcgtcataaagagggcgcagataggggtctaccttgttttgtaaatccccggggagaaagcccagcttttccccggcctccaccgccgggcgggtgaggatgatccggttgatggccttttcccgaaaagccaccaccgccttggccaccgccagataggtcttgccggtaccggccggccccacgcccagggtgatggtgttttcctcgatgcagtccacataggcctgctggcccaccgtcttggccttgatgggccggccttttgcggtgacgcagatgaccccgcctcccatctggctcagcttatcctgctggccgtccttgatgagggacaccacataattcacattctggggcgtgatctgctcgcctttggccgccaggcgcaaaagctcggtgatggcattctgggcgcccagcacgccatcgggttcgccgcagatcttcagatgatcgtcccggcagacgatgctcacctgatactcctgctccaaaagccggatattttcatcaaaagaaccaaacaagttgacgatctcttccatgcgctcaatgctgatggtctgttcaatcattgccttcctccgttgtttttcgggaaacgcccgatacttcctgtaaaacgcccgcctgctcccggcactccacctgcaaagcactccgggcaaaggggacttcatattggcattggaactgacggctttccacctgggcctccggcaaggtcagctccaatagctcttccaagcgctgctccatcacctgctccgccgtctcctgagtgacaacatagtctttgggcgtatactccacataccgctcggtgaccagcttcacaggaagaggggtgttttcggtgagtttcagctgcttttcttccataaggatatcataacacgggaaaggctccttttcaacgaaagaaagctggatacgccgggagccgatcaccagaaaacggcgcaccttttcccgtccggtgggcacctttgtctgcacctttgtgggcatcacctgctccagggtgtgccaggtgcgcagcgtcacatcggccatggcgtgagtctggcgcacttcgtcaagggcactgaccatggttccggtgaccaggatgtccccctgcaccacagtatccccggctttcttcattcccaatccggccttgatctggatgctctcaatgatcccgtccttgtcggccaccacatcacagggttcatccaccggcaccatttccggcgtctcctttcgtccgtaggccaaaatctgagcctgacttccgttgatgttcaccgccacaaaagaaaaattgtcgctgtgggtcatcacatagctgcgcacttcctcgctgtccaccttgtttttccccacgccggggcgcagaccggcttcctcggccagacgcagggcctccgcctggagagtgtggtcgcagccggtcacatccaccacccataaaaaccgggtagccgccaaaagagccccggcacacaccaaagcgccgccccacaaggccacccggggcagcagacgatgggtgtgaaaaggcacacctttttttttgacgatgtgcaccgaacacatcatccgccgggtgaaatggcgcagctgccgaaagccctggatgcgcacggtggcctgcaccacatcgggggccagacggcgcacatcccaaaaggcgatgtcattctgggcacagagattgaggaagcgctcaatggccgctccccggatctccacccgcacccagccccgcacataattgatcagcccaagaagcatcagtcatccctcacgatcggataaattccaccgcggccacctggccccggatgtgcagcgccccctggctcatggcccccagacgcagatccatgccccggatctccaccgtcacatcccgggccgccacccggatgcgctcatcggtgtattccagcaccccatgatggcgctccaacagcacctcccgtgggctgcattccagttccgggatatccagcaccgtagaggcggacaactccagctcttccgccgcccgggccaggcactcccgcaagctctcctgccggggccggggctttttccattttttctttttcatccattcaccccgcttttgctcatttgccacctattcctatgcgccaaaggtgctatttttgcctgtccccctcatatatctcagcgaggtgaagccgctatgaaaaaaaatctcctttctccccttcttgccattctccccgatgtggggctgtgtctctttgcctatggccttttgcgctatgggcgggaggcctcggaaagcctgcgccaggggctctctctttgtgcccaggtgctcatcccttccctgtttcccttctttgtattttccggaatgatggtgcgcaccggcgccgccgccaaatgcggacggctgctggaaaaaccggtgaaagttctctttcgtctgcccggcgtctgcgccccggtatttgctctgggactgctgggcggatacccggtgggggccaaaaccgcctgcgccctttatgaacagaaactgtgctcccgggaggaaacccagcgccttctggcattttgcaacaactgcggcccggcatttatcctgggcgtggcgggcctggctgtctttcacagtcttcaggccggactgttgctctggggctgccatgtgctggccagcctttgcaccggcctgctcttccgcttttacggttcttcctctccccgccgtctttctccggtttcctcggaaaaagccatgcccttcagccacgccttagtggaaagcgtcacctctgccatgtcctctctgctcaatgtgtgcgcctttgtcctctttttcggtttgtgcatcggcctgctggagcagataggtattacagaggtccttctctcgctattggaacgattgggcgtatcccgggattttgccgcaccgattctgtccgggagcctggaaatgaccaccggcatctgggggctttcggaagtgaccggcgatctgcctcttcgcctctctgccgcagcttttctcctggccttcggcggactcagcgtccatttccagtccctgtcttttctcaccagcagcggcctttctgccgccccttatttgatgggaaaaatcacccatggcgcattgtccgccctgtttacctacattgccgccctgcgtcttccgccccagactgcggcggccagcgccctgttcttccaggcatcccccagctccctgtcccccctgtccatttttctcttttccagcctgctttgcctgattctgtggctcctcaccggcctgagacggggaaaatggggaaaaaaccattgtcacagcccacgcaagccggtataatagaaaaaagacagggcaggataacacaaaccggaaggaggaaaagcctatgctctttgaccctgagatcaagcgctgctgcgccttttgcgagcactcctccgatctggatgaccggctggtgctttgcagcctgaaaggtccggtggattttgatttctgctgccgccattatcgctatgatcccctgcgccgcatcccccggccccctgcaaacccttcccaaaagaagtttaccaaggaagattttgaactgtaaacgaaaaagccgcctgaaaaggcggcttttgagcgtgtcgaaaaagtggcttagtccactttttcgaattttttcaaggggctgcattcacgcctttggcgcacacttgccccttgagaagtgcaaaaagccacgcacaggtcgcggctttttgcggattgatgaagggtaaagcaaacggtcctttttcgttatataggttcctcgacagtctgaaaagccgcctacaaaggcggcttttctgtttctcctatttttcccgggccttttccagggcatggcccagggcttgattcttgcccctgcggctttcctccagaatctggtcgatctgctgcttcacttgtcccacctgagcgcgcaattcggcagcggaaatgcgcagcgcaccatggcccagaatgatcacttgctccaggttatccgaagtggccacctgcaccttgtgatgccgggcgatggaataggtggttttttcaatatagctgtctgccgtctccgcttccttggtgtacaccacatggatattatgataccggctgacgctgcccagattccctggcactttataggcgtcaaaaaccaagatcacatggtttccccggtagccctggtaattgctgaggatgtccattaggatctgccgggcggtgtccatgctcttttgggcgatggttttcagttcatcccaggcgaagatgatattgtagccgtccaccagcagatattcttcccggcgggcaagtcccgggccggaaagggtctgacgcactgccggcttttcctcctccggttgctgcgctggcttctcaggtgcctttttggcccggctttcaaaatcccggcggcggatggggccataggtccgctcatagatggccatcagctctttgtcctcttccaaagagccggtataccgagaaaccgctggagcggccggagcggcttccaccacttcctctcgcttcttttccaaaaaagagggcaggtgcatatattccggcacctgatcccactcgacggcaaagcctgccccatgggcgcagaacaccgaatccgggctgttttccagatcccgctggggatcgtagcccatttgctccactacctgctgttggtcgtggcagggagcataccctcccagggccagagaaagacggccctggcctttggtgtaggccgtcacctgggcggcataatcccccaaggcggataccggcgcccggccggtgagcacggcctctttcccctggctttccggtggagaaactacgccgcccatccgctggatatcggccatggcccgtcccactgccgtaggcggcagctccaatcgcagatcataccagggttccaacagcacactttcggcctgcatcagtccttgccgcaccgcccgataggtggcctgacggaagtcgcccccttcggtgtgcttttcgtgggcccggcctcccaccaaggtgatcttcatatcggtgatgggagaaccggtgagcactcccagatgggtcttttcctccaggtggctgagcaccagccgctgccaggatcgctccagcacctcttccggacactggacatcaaaaactaagccgctgccccgctctcccggctccagaatcaaatggacttcggcatagtggcgcagaggctcgtaatgccctaccccttccactttgttcgcgatggtctctttgtatacgatattcccctggccgaaggacacttccatggaaaaccgctgggcgatgaccttttgcaaaatttccagctgcacctgccccatcagttggatgtggatctgccgcagctgttcattccacaccagatggagctgggggtcctcttcttccagctgacgcagctgggaaagggcggtatggggatctttgtccggcggcaggatcacctgataggtgagcaccggctccagtaccggcaaagtgcttcccgcttcggcccccaggccctctccggcccaggtgcggctcagcccggtgacggcgcacaccgttcccgctggagcctggtccaccgcctggtaccgggcgccggaatagatgcggatctgatccaccttttcctcccagggttcctctccagcccggccttttcccgagagaagtgctttgacccgcagagtgccccctgtcactttcagataagtcaggcgggccccttgcgggtcccgtccgatcttataaacccgggcggcaaactcctgaccatacgcccgggggggtgcgtaccgttccagtccttccagaagctctgtcaccccttgcagccggagagccgagccgaaatagcagggaaacagcttccgctgggcaatcaggctggacaaatcctctggttccagccgtccttcttccagataggcggccattgtgtcctcatcgcacaaggccgcctcttcccacagctcttccggcggacgatggggatcaaaatccacacagccgccgtccagctgacggcgcagctgctccatcaggctctgccggtgcgtgccgggcaagtccattttattgataaagaggaatgtgggaatgtgataccggctcaaaagacgccacagcgtacgggtatggctctgcaccccatcggtgccgctgatgaccagcacagcataatccagcacgctgagcacccgctccatctcgctggaaaaatccacatggccaggggtatccagcaaggttaccggcctgtctcccatctgaaaaacagcctgtttggaaaaaatggtaattccccgctgccgttcctgttcctcggtgtccaaaaacgcgtccttgtgatccacccgccccagctttttcagctgaccgctttgatacagcattccttccgacaaagtggtttttcccgcgtccacatgggccaacaaaccaacgcaaatcggcctgcggccctgcttttcttccttctgttcgcccatatccgcaccttctctcatgaaaacatacatagattagtatatcacaagagcggaacatcgtcgagataaagtattggaattggtttctgcctcttcggcaaaagccacgaaatggaagcgattgacaccgcttctcacttgtagtacaatcataagaaccataggaatagaaaatgtttcaccgtgatggggcaaatgggggtttgtccggcctgtggcgcaatcccgcagccatcctggcccacggcctgacagatagagagatatggcctatgaagtatatgaaaaattttgcagctgcgttggttctctgtgccattttgttttgtgatttaatgtccattcatgcacaggaggcatcggaaaaggtcattcgggtgggttttcccattcagcccggcatgtcctatatcgatgaaaacgggaattatgccggctatatggtggactatctcaatcagctgatcttgtttaccgattggaaaattgaatatgtgcaagcagaaggagacctgaatacccagctttccactttgctccagatgctgcaagatggtgagattgacatgatgggcaccatgaaccgtaccgcagctttggaagagatgtatctgtatcccaattacagctacggttccacccacacggtactggccgtgcgggatgattccagctacatttcagaagatttttcccaatgggatggcataactgtagcttcctatcccggcctgtccgcccgaatgaagcaattggagcaatacgctcaaatcaacggtttcacctatcaagtggtgaattatgacacatacgatcaggtcatcgatgctgtttataacggcgaagtggatgccgtgccccaagcagacatttcccttcccgaaggctggagaagcatcggccgcttttctccttcgccctattatttcgcccttgctccggggcgccaggatctgctccctgagctcaacaatgctttggagatcgtcaccacatcctacaaaaatttgcaggataaattgtatgaacgccatttcctggatatggattttttccgcctctcgaaagaggaggaggaatacattcaatcccttggttctctacgggtgttgtttttcaccggaaatgctccattccaatatatacatgacgatcagctgatcggttttgcagtggagtatttcagcggctttgccgaaagcgtgggtctgcaatatcaggcggtggtggaagacgatctggaagatgccgtcgaattggtgcaaaatggccaggtggatctgatcgcctgcattgcaaccgattctccgctggcctacgaagacggcatccgtctgtcccttccctacttcaacagctatgctatcctcacatattcggaagagcatgatgcaacggatcagtgctcgctgaacgctgacatgaacaccgaagaagctctggaggacatcctgtccgataattgttccgcctggatcgatggctattctttgaactattacctgcgcaaaaaagcggtctatgaccacatcgtgacagactgggccgataccaaggatttctcttatgcagtggccgtgacaaacaccatccccaatgccaatatgatggtgtcccttttgaatcagtatgccagctccattcccgatgaggatattcaggcccgtttgtccacctatcttttggatcgggtggaatatacgcccatagaatggctgctggccaaccgggccgccattgtggtgaccgttgtcagtcttctctttgtcattgtgggtttcctgttttacaattaccgcaaaaaaatggaatacaaaaacctggtcaatgaaaacaaactgcttcacctttccatttatgacgaattgaccggcgcctacaaccgtggctatttctataagcttatggaacaaaaggcaaagcaaccggaatccggtgcccttgtggctttgaatgtacgcaacttcaagtacatcaacgacacctatggtatgcagcgggccgaccagctcctttgtaaaatcaaggaaattctggatgccaatctgcgggagaaagagctgctttgccgccccaccgcggactgcttctatcttttcattctggaaagccaacccctggacatccagcgccgcatcaacagcctgcaagcccatctcaagatcatggcggaagatttcctggatggttaccggatctccttttattgcggcgccgtttcttccaccacttctcccgatgtgaccaatatccaatccaatctgaacagcctggtggtggccttgtcccatgcccgtcagacgggggattctaccgtgtgcatctatgacaaagaaatgcacaaggaggaacagctgcgccaatatatcgaagccaatatgatccgcgctctggaggaaaacgaataccaggtgtatctgcagcccaaaatgaatctgcgcaccggaaaaatcgacagtgcagaagctctggtgcggtggcagacaaaagaacggggcctgctcttccccaatcagtttatccccctgtttgagcaaaatggtttctgcaaacagctggatctgtatatgctggaaaaagtgtgccagctgctgcgcagctggatggatcagggaattgctcccatcaccatttccatcaatcagaccaaatccctgttcgtcagcgacgattatgtggaaaaactgctggaaatcacctcccgctatgaggtttccccccagtatatcgtactggagattctggaaggcctggcctttgaaaacctggcccagctcaatgataccatttcccttctgaatcgggccgggttccgtgtatccatggatgacttcggctctggttactcctctttgaacaccttgggtaagctccatgtggatcagatcaagctggatcgtatgttcctgatggatctgcgaagagagcagagaagttctcaatatgaagtgatgtctctgatctttgcattggccaaaaagttggggacggagacggtgaccgaaggcgtggaaacaaaagaagacgaagatctgattatgtccatgggctgtgattatggccaaggctactgttacagcaaacccatcccagcggacgatttcctcaccgcttttctgaaaaacaacgaataacataaagaagtgggcgttttgaaaacgcccacttctttattatttttggggtatcgccgtcagagaaaggcatgttctttcccccatccatcccgacagaacgaattttacagcgaaaccggtcctgtttcggcctccaaaaaggatttggtaaactcttctgcggaaataggcttactgtaataataaccctgcccataatcgcaatgcatctcctgcatcatttgtacatgatcggcggtttcgatcccctcggccacagtggaaattttcagccgcttggccacttcgatcaccacttccaggatcttacgattgttctctgtgctgtggtcggcctgaagcaggaaggagcgatccagcttcagttcatcaatgggaagctggctgagcgtgatgagagaagcatagccgcttccaaagtcgtccatggacacccggaagccatgatcgtgcagctgccggatcttctgggacacctgctccggattttccagcgcaaggccttccagaatctccagcacgatgaaactgctggccacatcatagcgctgggcaatggcacagatacgctccacatagtcctcttcataaaagagcagtttggtctggttcaccgaaataggcacgggcgaaagcccggcatccatccaggaacggatctgtttgcaggcctgttccaccatataatagtccagctgaatgcaaaatccattgcgctcaaaaacgggaatgaactgatcggggaaaatgatctgttttccacccaccagccagcgcaccaacgcctcggccccgctgagctttccactcttcagatccattttaggctgaagatacatctggaattctccgttctgaagagctgcttccatatggttttcaatataattttgcattttttctttttcatggatgctggcgtcataaaaagcaatattggcccgctgcgtctgctttgcgttgctgagcgccagcatgacatggctcatcagctcttcattggggcttttgctgacacagtccacggtggaagcacagccacaataaaaaacaatgggatagttgaagggaatacttggactgcaatggcaggcctcttcgcagatgcgctccaatcgctgactcactgcctcctgatccaatgttttcaaggccagcacaaaggtatccgccgtatcacggcagaaaaattctcccgcctccatatgacttttcaaaacattgcagatatctttcaacagctggttggaacgatccggactaaacagctcgttaatgtatttgaacttgcggatattgatggcggccgcagtatattccatattcttcttgcggcttcggtccaaaagctgaaaaaatttgtgccggttataggctccggtcagcctgtcatggtacgcactttgacggagccggatattatagcggtggttcatcaaaagcgccgccatcacaaacagcagagaagtacctgcaaacaacactccaatcatgtgagcattgtataccatgcctgaaacggcatcgctgatcccctggtcggtatccacaataacgatattatccgaatacgcatccatggccatgacgcaggcataaaaagtcaggccattcatttcaaatttgaaaaattgggtgtcatctgtcaacaaggcctgggcaaattggtcccgcaggtcgtcattcaaagcatccgactcttccagctcataaaacccctctgtttgataggttcttgtggaagccagtacttttccatcttcgctgagcacggccgctgcgccgccatcactgaccgagccgacggaggacaaaatattcgcataggactctgtgctcactgagcaagccagaacaccactgatttccccgccagtcaatatgggtgttgcatagcccagggtgttatatcccagcacaggatcataaaaagcctgggaacaataggattttccctccatggcctgctggatagcgtactgcatctcttctgtctcatcttccagttgaagggggaccagctgtccctggggattcagctgcacactctctccattcagaggaaagtaacacaatcggacaaaatctgccgccttgcctgcatcccaaagattccacaaaagatactccgtcccctggggcgtgatatcttgtgtagtggtatcggccagcatacaggccatcgcccgaagggtctgcaaatcggcattcattttaaaaacaaaggacttattgtattgcaccgctcgttctgccaatcggccctgtatggattcctcatacaaatttgtcaccgattgaaacaaatagcgggaaatgcttccaatcaacaaaaaaaccacaatgaaaacgacggccagttttttgagattggatcgaatcttctgttcatccatcaaaataccttcttcaaggaatcgaccatccggtctatactggaaaaccccagcttaccggctaatatagttaaaatcaatatttgagaaaaaatcaatttctattttataatttttctccggagtgtcaaggccatttgctcttttttccatttttccttaaaaatatacacatcagagtgccccggccaatggccggggcactcttctctcataaatattccaaatattcactaaaactggaaaacctgtttcct

SEQ ID NO: 3920 - DNA, 9265 bp, Unknown
  16S sequences of unknown bacteria
caagcggtaaggcagaggtctgcaaaacctttattccccagttcgattctgggtggcgcctccaataacaaaaagacatccttttggatgtcttttttgttttttccacaaaagggcatggaaaaggaagcgccctgtatgtccgccgcttttctttactccaatggaaaaaacagaggcgggtctttacttttttcctcttttaagagataatgggatgcaaagagagtttggagcgccgccggagcgcggcatcggatcgggaggaaaagattatgttcaatctgttttcggagcaagatgaaaacaagtttacctgggaatccatcggcgatgtgatcgacggaagaaggaacctgggagaaaatatgccggtgtttgtttaccggctgtttcagtttaccattaaagatgagctggccaagcgctatggcaacgaagcaacggtggatattttccgtaaagcaggtgaactggcggggaaagagtttgccaatcatctgttggatctgagcctgcccttcaatgagtttgttgcccatctgcaaagcgtgctggaagagagtaaaatcggcattttgcgggtggaaaaatttgatccggatacaggggaagctgtgctgacggtgggagaagatctggactgctccggtttgcccatcaccggggagaccgtgtgcaattatgatgaagggttcctggccggagtgctgaaggtctatacccaaaaggagtatgtggtcaccgaggtggattgctgggccaccggctcccgggtgtgccggtttgaagcatccgtgaaatcgcaagagagcgagcaaaatggataatcaggatatcgaccttctggttcagcagcttcgcaccattttgctcaacaaaccccttgccaaagagccccgggtgcagtcagaggagttggaaaccctccaggatgggattttttatctggccgattgcctggccgaagccaacggctttttggaccagctgcggaaaggcaacctggacaccccttctccagggcgccataatttcctggccggcagtttgaaggagcttcattcggccttgaagcatctgacctggcaggccaatcaggtggccaatggggattacagccagagcgtggactttttgggggatttttcagcttctttcaaccggatgattgcccagctggccgaacgggaatcccagctgaagatccagtcccagatacagggagaatcggtggagctgatgaaggccgtgatggatggcttgaaggattggatcatggttatatcccaggaaagcggagaagtggtgtattccaatcaaagcgccaagcaattttttgagcatcctacgcccgatcaaaatcaatgcggcaattaccaccggtttttggagtttatccgccattgcggccgggaacacagtgaaaaccgggatttcgaataccattgctgcgagagccgccgcaccttccggattcgcacctatggcatccaatggagcggaaaaatggcttgtgctcacatcatcaccgatgtgaccagtgagcgggagtatcaggagcagatcgaagggttggcctataccgatgcgctgacggatctgtataaccgccggttttgtttggaaaatttggagaagatgctggaggaaggaaaggaatttaccttctgcatgatcgatctggatgggctgaaatacgccaatgacaatttcggtcatgatgccggcgatgaatatttgaaaacagtggctcagcatttgctccaggccagccgctccaccgacctgatttgccggatcggcggcgatgagtttgccgctttgttcccccgctgcaaagcgccggtaatcgtggaaaaaatggaacggctggatcgcgttctggaggaagaatccctgcgctttcccatgtccctcagctatggtgtggtgtatgtggatgggggagaaaggctttcggccgctgaggtaatgaaactggccgatgagcggatgtatgtgctgaagaatatgaagaaagccgcccggaatagtttgggtggtgtggtgatgacttgggtttggtccaaggatctggaaacaggcaatgaggagatcgaccgggagcatcgccagctgttgagtgcagtcaaccggctgctggaggcctgtgccgcaggccgagggcaggaggaactgaaccgtatcgtagactttttggttcagtatacccagactcattttgcccatgaagagcagctgcagcagcgctatggctacccggattaccaaagccaccaccagtatcatcaggcttttggcaaggccgcagaggatttggcccggcggctgaaagaggaaggggacacggctcagttggcctcccggctcaataagcagttggtcagttggctgatcaatcatatcaaaatggaagatgccaaggtggcccgctatattcagaaagtctctgaaagcagcaaatcctcatcaaattgaaaatacgccgcagaaaagttctgcggcgtattttttgtggaaaaattatagtgtcgtccaaggcggagataaaacaaagcggcattgccagcggggaggagagagcggggtaaacgcacagattttcagttctacggggtgttccggttccagcagctggtaggataggtggatatgtgccttttcccccttttccaagggacggaaagcggtcttggcacaaaaaagcggctggcctgataccaatccggggagcaagggtttttcatcctggaaagcatggcacaggacagaagaagcgaaactttctccatccggcccgggatgggtgtattccagggcgatccacagcaaaaaggccccccgtttttcctgccatggacggcagaatagcagtttgaccggttcctgtgccaaggcccccatatggtatgcaccccccagaagaaaatgtattttagtcatctttacggtaagactaccaaatgactgtgataaagtcaagaaaaatagtcatctttatggtagagggttgccgtgaaaatttatgattaccaaggcagaagcaatatttgtggagagcagatccgccgctttcgtcgggaacggaagctgtcccagggagagctggccgcccgtcttcagctccaggaggtacagctggatcagaaggcggtgagccgagtggaaaagggggagcggtttgtggcggattttgagctggtggccttttcccgggccctgcgggtgccgctggaggaattgctggggtttccgggcttttcagaaaagggcgctggtgatacaataaaataaaaagcgggaaggagatgggggaatgcaacaatccctttttgatcaaaaaggcctgagccaacccttggccgaccggctgcgcccccagacattggaggattatgtggggcaggagcatcttctggggccagggaaggtgctgcgtcagatgatagagcaggatgaggtgccctccatgatcttctggggcccgccgggagtgggcaagaccaccctggcccggatcattgcccggcacaccaaggcggagtttgtcaatttcagcgccgtaaccagcggcatcaaagaactgcgccaggtgatggctcaggcggaaactacccggcttttgggacagaaaaccattttgttcatcgatgagatccaccggttcaacaaggcccagcaggatgcctttcttccctatgtggaaaaagggagcatcatcctcatcggggccactacagaaaacccctcctttgagatcaattcggcgctgttgtcccggtgtaaggtgtttgtgctgcaagccctcagcggagaggacctggtgaaaatgctccagcgggcggtgatttcgcccaagggactgggggagcaaaatgtgcatatcgacactgcacttttggagaaaatcgccctgtttgccaatggggatgcccgggtggccctcaacaccttggagatggtagccctcaacggggagaaaacgcaggagggcgtgtttgtcacagaggacatcctgaatcagtgcattggccagcgttccctgctttatgacaagaacggagaggaacactataacctgatttccgccttgcacaaatccatgcgcaacagcgatccggatgccgccatgtattggctggcccggatgctggaagcgggagaagatcctttgtatgtggcccgcaggctgattcgttttgccagcgaggacattggtctggcggatagccgggcgctgtctctggcggtggagacctaccaggcctgccattttatcggagttccggaatgcaatgtgattctggcccaggccgtggtctatctttcgttggctcctcgttccaatgccctgtatgtggggtatgagcgggccaagcgggatgcgctcaagcagctggcccagccggtgcccctgcatctgcgcaacagtcccacccagctcatgcgggaactccattatggggagggctatcaatatgcccacgatacccaggaaaaactcaccgatatggaatgtctgcccgaatctcttcggggaaagcgatactataatcccacggaacaaggactggaaaagcgcttcaaagagcgcttggaacagatacgggaatggaaaaaacaccagaaaacataaaaaaggccctctggggcctttttcagactgtcgaaaaacttatctggctagggggaactgtttaccctaccctttatcaatccgcaaaaagccacgacctgtgcgtggctttttgcacttctcaaggggccagtgtacgccaaaggtgtgcatgcagccccttgcaaaaactcgaaaaagtggcaaagccactttttcgacacattcaaaaaggccctctggggcctttttgttttgattgacagagcatcgggactgtgatatactccaaaagtactgaataagtaatttactaatttactgcatacaggaggaaattatgaagatcccaaccacgctgaagcacaaaccggtggtcgtggtagaaaactacgaagaagtggatggccgcatggcctatcacagcgatgccaaaggtctttctctgggcctggcccaatggaacgatcggggcaaggtggatatttccgccaaggtatggcgctatactggggagaagtggtcccgtcagtcggaggaactgcctcttcaccgggcgctggatctggcgatcctcatcagtcaggcccggctgtatttccgggaggcctatcgttttcccaagctctatgaagaagaaggggggccggtggcccgggtagggctgcagggagatgccatgacagtggatatctgccgggagaatcctcgtattgacgaggatattgcgctattctatcaggctctggcccaggatgacgaaatgctgggtgagcgctttcgggtgctggcccgtatcctgcgggaaatgggctattaaaaaggccgcccctatgacggggcggcgtggatcattgataaagctgtacatcgtcgggcatggccagccgttcgtccagaagccggttgatgttgcttaaaaacacggtactggtcagaatggcgcagagcaggtcggtgacaggctctgcgaaaaaggtggcctgggctcccaaaaagtggggaagtgccagggtgaaaaccagaaagacccctttgcggatcagggacaggctgagagctccccgggcgatgcccagggcggtaaaggtgtccacaaactcatactggaaggccagaggaatcactgagaaggtaaacacccggatggcccaggaggacagacgaagcagttcttcgttgcgggtgaagatcatggcaaagtaataaccagccagctggctgatcaggaacatcacgccggtgaaaaccagacacagcgtcagcactttgcggatggccaggcggatgcggtccactttcttcgcaccatagttaaagctgtgaatgggctgggtaccgccggtgatgccgcccaggggcatggtgatcagctgcatatagctgagcacaatggtggccacggtgatataggtgtctcccatctcggcaccgccgtagcgctggagcacgctgttgagagcgatgagcagcacactgtcggtggcgataatggtaaagggagacagaccgaacagcaagatccgccgcatgatagaaggggagtagcctcccaatgtaagggaaatctggggtttacggctgcggaggaaccaaatcacaaaaaagcagctgacggcctgggagatcacggtggccaaagcagccccccgtacgcccaatcccagcaggaagatgaacaccgggtccagcagtacattcaggatagcaccgatgattaccgtggccatgcccatggtggaatagccctgacagatgatatactggttcagtcccacagacaggatggcgaacagggtgcccagtacataaatggtcatgtattcattggcatagccataggtagcgccgctggcgccaaaggccatgagtatgggctttttcagcaaaagagcggcaccggtgagcaaaagggccagaacacagagcatgagaaaggcattggccaggatcttttgggcgccttctttgtttttttcacccagacggatagccatcagcggcgctccgcccaagcccaccaagaaggcaaaagaagagatcagggtgacgatgggaccgcacacgcccacaccggccagcgccagatcacctacatggggaatgtggccgatgtacatccggtccacaatgccgtagaatacattgacgaattgggccagcatagagggaatggccagtttgagcaccagttttccaatggggtctctgcccagatcgttggtctttgacatgatttgcgtcctgctttccatagtggttgcggcctgtccagaggacagccttatatagactactctgtaaagcgatgaattgcaagggaaaagaaaaatttttcggattttccaaggaatattcccaaaaaggaaggagaatggacgatggaatccatcaaagggcggtttgcccccagccccacgggacgaatgcatctgggcaatgccttttgtgcccttttggcctggctctcggcccgcagccagggcggaagccttctgctgcgtatggaggacctggacccgcagcgcagccgggagagctatgcccgggtgctgatggaagatcttttgtggctggggctggattgggacgaaggcgccggtattcctggggaagaggagaaacagtattggcagagccgccgggaggaggaatatgcaaaggccttggatctgctgaagcagcaagaacttctgtatccctgcttctgcacccgggcagaactgcacgccgctgaggcccctcatgcctccgatggacaggtgatttacagcggccgctgtcgggagttgaccatggaggagcggcaggagaaagaaaaacaccgccgcccggccattcgcattggtgtgccggatgaagtgatctctttcaccgacggatgccggggcgtgtatgaagaaaatctggtccgggactgcggggactttatcctgcggcgctccgatggggtctttgcctatcagctggcggtgacctgggacgatggggtcatgggagtgagtcaggtggtgcggggcagcgatcttctttcctccacgccacggcagatctggcttcagcggttgtggggctttccccagccacagtattatcatgtgcccctgctcctggcccccgatggccgccgtttgtccaagcgggatggagatctggatctgggagctttgcgcagccggatcgggccggaagagctggtgggaaaattggctttctgggcagggattttgtccaaagaagaagcggttacaccccgggaactggtttctttattcgattgggaaaaggtgaaaaaacaggatattttgctggatgcccccatgctggatttttaatagaaaaaagccgcctgaaaaggcggcttttttcatagagttattgcaaggccagaatcagtcgctgccggtggtgggagcagcgcatagccaggcacagatggcggttgagtttgcggcacagagaaagcaggcgacggcttcggaaactgtctggcgcagggaggccaggcagaagccacaggtttccccatagctggtagagccggatgagcccatgatgccacagggtcagcagtcgataagcgaacagttggagagtgtgtttcattgcaggagtcctctttcttgtggtttccgtaagtgatgcgatcccgatgctcctattatacataggatatatggaggaaggtgtcgaattttcgggagaaaaaaagattttctatttttgttgccgaagagggaggaagaggggagaaaaagaaaaaagaagcgctgttttcaaaaaacagacgcttcttttgtgtttttttggctgcggggcgcggcacagccgcctgcgcccgcccgttggcagcgcccccgcaaaggatatggtatcacagatcagggggcggaaaccgtcgcagcagggcgtttttattccagattgagcttgcgggacaaaatgtaatttgtgatggcgaaaaagcctgccaggaaaaacagttccaccacgatgctcagcagcagagcaacatgaatggcccagtcatcggatacggggaaaatccactgagcagccaggttccccagtacacccatcaggatctgcaccaggaaattcagggccaggaaggcgccgaaggaggtgagcagtcgcttgttggcgctcagctgccccagggccatgctggcatagagcatcatggtgaaggccagtatgccgagggcagcgaacaggaaaaactctccacaggctgtgaggatctgggcgttcaggctgccccggcggatgagggtgacgatggccttgaaaaagtctcccagcatccccttttcataggccaggatgacaaaggccaggatggcggcaatgctgctgaaaatgtaccaaaccagagaggtgagggatttgcacaagatgtgctgccaaggcttcaccggcaaggtcatggacagatacccttcttcgcccagcaggtttttgtaaaaccgctggagagagaccaccagagtgaggatgaacaccgccataagcaagaagccgaacaaagaggagatcaccacctggaagagactcagaaagaaggaattggagaagtccttgttgaagacaaagagccgggtaaggaaagaggtgctcaacagagacgaattcatcctagatcgg

SEQ ID NO: 3921 - DNA, 6858 bp, Unknown
  16S sequences of unknown bacteria
acgcttttgcaaccaaaaaataaataatacaaagcaaatacagaaaatttatgtactttttcgccgcaggacgttgacaaaaaattcaaagctgtgttataataataatgggttaaataaccagaaaaagcaacaaaacagaaatgataatgcaagatgagaaaatattttaatcaaacattgaaaagaacactgactgcttcggtagccgcaattctttgcgcgactacactgtctttcggaagcatagcggaaggtgttacggaacgacatgttacggaaacgcatatttgctgcggcggtgttattcctgaatcagatgaagtctttatggaacaccttgcaagagaaagcaacatagaaaaggatggcgttgctttaagaagcggatatccatcaaaggttgatttaagcacatccaaatactttcctgctataggttctcagggaggtgtggggtcatgtacggctttttctacagtgtattatcagtttacttatgaggcaaacaaactaaatgatataactattggtaacacggtattgttcgggctgggataacctttcaaacattcagatatatcttgccgattataacggtgacggaaaagtaacaaacaccgacgtaattcttatgcagagatacattgcgaataattcctgaaaattcaaaaaacatatccattcgctattgtatagtgaaagcaaaaacatatccataaattcctgaatttcgaaaggagaaaaagacatgaaattctacggaaaaatattttgcgcatttcttgctgcactgacgctctcaacatcggctccggcgttcgccgaggacaccccggcggaaagcgcaccgggagagattaagctttatgcggactccgaaagaacaaaggagcttacggcgtctcccgaggcggggcagaccgtttacgcctccgtcgtgtgccgagagggatactatccatacagcctgacggttgacggagagatcgccgaggacggcggaatcgtcattcccgagaacggaaagctttcggcgagcgcacagcttgtgcttgcgggcgatatagccgttgacggaaaggtcgatatgaaggacctcgttctcatgatcatgtatgccgttgacggaggaataagcggttccgtgagacagtcgtgcaaaactgatatagatattcctgccggaaactacgacggaaagatgagcggagaatacggcagagaccctattgacaataaagatgtgattcagatggttcgctttctttccggatggaaggacacgctttatcccgagaaagaatatccggttgctgcgaatatccgtaatgtatatttttcttctgtgcttaagatcacgcgcggtcaaaaaaaggatcccgatgctgcagtgcttacttcgaccgatgaactcaagaaatttcttgccaacgtagaacccgacagcagtcttctcgatgaacttacgcggaaatccggtgaagacggctttgaccccgaaaagcacagagacgagatttgctggagcaatgatgatataattgccgaatataacgaagaattttttaacgaacacacgctgtttgttctcagatcggatgacagagcatacatgggatattatcggttgaggtcgttttaccgcaaagacggaacagcgactttcgagctttctcgtgaagatgcggaaattccttccggcgaggaagtcagattttatcagtttattattcttcctaaaggcacgctctctcctcatgaaacattgattttacatcatttttcgaacgaacgaatggagggaatgtatccgtacacgcatgacgttgcactgaacatcggagagtgagtgaaattccgcaatttcccgaaaataaaattttttcataaattttcatgggaaatattgacttttgggaaaagctgtgatataatacagtcaacagttcggaccgcctgccgacgggacggattgccgcacgcaccgcgtgcgatccggggcttgtaccggagactttattttcctttccaattaaaattcaaaacgcaaacggggagtctttcgggattccccgtttgcgtttcgtgcgccgcgcgctccgtcggcgcgcgtccccggcggacgtttcggcggatttttcgacgcaaaatgcaaggcggccgggcaaatttgcagcgcgcgccgtaatatcaatcgaaaatcaccgtcattttcgaaaaaatcgcggaatttttgaataattttgccgtgcgtcttgcattttgcgattcaatgtattataatgaaacatgatcggacggaagaagggcggcgttttgccgcggcgcagttgaggtgcgcgctttgtccgatcgggaaaccgaggcaacaaagaaaatcacagagaaaggaacggtcacaaaatgacgttcattcccgagaattacaagcctgtcctcaccgtcatggagacggaggcggcaattgcggatacaaagcgtatatttgaaaaatatctttcggcggcgctgaatctcaggagaataagcgcgccgatgttcgtgcgtcccgaaagcgggctcaacgacaacctgaacggcgtggagcgcccggtgtcgtttgacattccgtccgcgggaaccacggtcgaggtcgttcattctcttgcaaagtggaagcgcaacgcgcttgcaaaatacggatttgccgccgacagcggtctttactgcgacatgaacgcactccgccgcgacgaggagcttgacaatctccattcggtttatgttgatcagtgggattgggagcgcgtcattaccgcggaggagcgcagccgcgaattccttctcgatgtcgtcgggaagatcgtcggtgcgatgtgcgatacgcaggcggagcttaaaacgatatatcccgcgctgcccgacgtgatcggacgcgaggtgtacgccgtcacgacggcggagcttgaggagcggtatcccgagcttacgccgaaggagcgcgagaacaaggtgtgccgcgagcacgggaccgtctttatcatgcagatcggcggggcgctgccgcgctcgggcaagccgcacgacggacgcgcgccggactacgacgattggagcctcaacggcgatataatgatatggtatgcgccgatggagtgcgcgcttgaactttcctcgatgggaatccgcgtaaatgcggagtctctgcgcagtcagcttgaaatatccggtcacgaggagcgcgcggcgctgccgttccaccgggcgctgcttgacggagagcttccgctcacggtcggcggcggaatcggacagtcgagactgtgcatggcgctgcttgccaaggttcacgtcggagaggtccagtgctccgtctggccggaggacatggtgaaagcctgtgccgacgccggtatagccctgctttaaccgatgatctccggttttgccgggatcggcggcgtgtgccgcctgtaaaatgcgaaccgtcccgggcattcggaaggcggagcgcaaatatgaaaaggtacggtcataaattatggaaatgtcatctgaaatgcttgaagaaatacattcgtcgtcgaaggacgcgcttgacgccttcgccgccgagggcttgagctacgacctcacccgcggaaagccgggacgcgctcagctcgatctcaccaccggtatgctcgatgttatctccgatgccgacgactgcttttcggaaggcggattcgactgccgcaactacggcatcctcgacggacttccggagacgaagcgccttttctccgatcttctcggtatccccgcaacgaggatactcgtcggaggaaattcctcactaaatatgatgtatgacacgatggcgcgcgcgatgctgtacggcgtgctcggctcgcccgagccgtggtgccgcgccggggagataaagttcctgtgtccgtcccccggatatgacagacatttcggtatctgcgaatcgctcggaataaagatgatccccgtgaagatgacccccgcgggacccgatatggatgaggtggaacggctcgtctcgtccgatgcgtcggtcaagggcatatggtgcgttccgaagttttcgaaccccgacggaataacgtattccgacgagaccgtgcgccgttttgccgcactccgtcccgccgcgcccgatttccgcattttctgggataacgcatacgcggtgcatgagttgtatgacgagaaggtcaagctgctcgatatcttcaccgaagccgagaaatacggcacggagaacaacattttcttctttgcgtcgacatcgaagatcaccttccccggctcgggcgttgcgataatggcggcgaccgaggcgaatatcgcgcagataaagccgatactttcgactcagactatcggcttcgacaagataaatcagatgcgccacgtcaagtatttcggcagcgccgaaggaattctgcgtcacatgaagcatcatgccgacgtgatacgcccgaagttcgagcttgtggacagcatcctcgagccgctcaaaacagccggattcgttaactacataaaaccgaagggaggatatttcatcagcctgtacgttccggacggatgcgcaaaggcggtttatgatgaggcaaaacgcgcgggagtgacgctgacctccgccggcgcgacatacccctacggcatcgacccgcatgacgcgaacctgcggcttgcgccgacgtatccttcggataccgagcttgagcaggcgtgcagaatactcgccgaagcgataaaatacgtagtttccggaaagctgctcgaaaagtgatgtgcccgcggcaccttctcgccgcacggactgcacgaataatacatcggatgtgaaaaagtcccgcaccgcggggcttttttctcggtgcgcggtgattatacatcggttgaagcgctgacggaaaattgcgtactgcccgggtctgtctccccaaaaggcggtgtcaaacgattccgccgctctgctcggcagtatgtctgcgcttcggacggagcgtatgttgagtatgttataccgtgcgttcttgcggcgcggcatatgacgttcgaaagaggcgttcatgacgtcgatgcgcacttccgttcatgatgccgatgcactgccgcgctttccgaagcttacatatattatatcggctgagattactcggggagtccgacgcgatgcaaaaaacgcggtgcgtttcacgatttgtcttgacaaacctgcctgtctcggatatactgattaccgtttatttcggataccgtatcggcgctttcgcctgtcggacggagaggctgcgttcttcttcgcaaagccggcggcaggagcgatgcccgatatttttacggcggcagcagatttttgtcttcggaggctatttatgaatttcggactgaccttgaccgaggtgcttctcatgttcgcatatgccgtgcccggttatctccttgtcaaaagccgtctcgtcggcgaaaaggcgattccgggatttgcggcgcttcttatgtatgtgcttcagccgtgtttgtgcattgattcgttcaggcagatcacatatacgcccgaggcgttttcgcgcatggcgtggttttttgtgatatgtcttgttcttcaggcgctgtccgctgcggcgatctacgccgtatcgcgtcttgtcatgggtgagagatttgcttccgatacttctgcgaggatcgcggttatcgccggagtggcgggaaatgtcgggtttatgggagtgccgctgcttcgcgcgctcttgccggattatccggaggcatccgcactttccgcgatgttctttcttgcgatgggaatactctgctggacggtcggcgcggcatgcataaccggagatatgcgccacatgagttttaagcgcgcatttctgaatcctcccgtgatcgcacttgccgcagcgctcccgcttttccttacgaacacgcgccttcccgcgagcatagcggatccgatcgctcttcttgccgatatgacgactccggtgtgtatgctgatcctcggaatgcgctttgcgacatttccgatccgggaaattttttcggaacgtgtcatatatccgaccgcgctcgtaaagcttattctgtttccgcttgcgtcatatgcggtcgtgcgttttcttccgttttccgcggagatgaaggccgcccttgtgataatggcagcctgcccgacggcgaatgtcgtactcagcctgtccgagctttacggagcggggcagaaaacctcgtcgctgatcgtgctttcgtcaacggtgttctgcattttcacgattcctcttgttcttctcgtgctgtgaaaaagggaaaaattttacgttctttttcttgacaaatgcagggatatcggatatactgtttatcgtttgtttcaaaaaccgtatcggggctgcccggcggtgcaaatattattaaagaaaggaactgttatatgaagtacgcatgcgaaatctgcggttgggagtacgatgaggagacgggagatcccgaaaacggtcttgagccggggacgctgttcgacgaacttcccgacgatttcgaatgtccgctctgcggagccggcaaagaggactttgccgccgtctgacgataaggaacagtgcctgtttcggcataattgttgaaacgggcgtctttttttcggaaatgttggtgtttatgcgcccggtggttggcaaagtcggtgttgacttgcccgccgcttcatgttataatatctgcaaggaattttattttataaaattctgcggctgtcgccgccccgtgcttcgcacggttgcagtattgacggcttcgcaaaaatgcccttgcaagcaagcatttttgcttcatggtataata

SEQ ID NO: 3922 - DNA, 8309 bp, Unknown
  16S sequences of unknown bacteria
cctctccccgtaaacttttcatacaaatgcagaacataattcctgcaatgcaccaaacatcgtataatccacagctccgtggacaaaaaaacggtatgtcacatgacacaccatcttttttatttcgcgattaaattcagatcccacgccgggaaaccggcatatcggcgcagatacagcctctcataccccatcccgcgcaccagaagcggcaatgagaacagatccccgctccggtgatacagcgacaccagaagcgtcggacgccaccgcgcgacagtctccatcgacccggacagcgcctcagcctccgctccctcgacgtcgtacttgatataatcaaccgcgcggccgccaagcaccgtatccaccttcgcgcaccgcaccgtccttatcttcgcccccgccttcagcccgatgtcggacacaagcgtcgaattccggttcccctccgccgtgaaatcgagcgaagtatccgcgtcccacgccgccgcgttcacggtctcaagcgaatacggatgatctgtctcagcgaacgccgacagcttcctgaagctcctcgcgtccggctcgaacgccgtgaccgaagtcagccccggcgccatcgccgccagctcccgtatcgtatccccgtcgtaagccccgaggtcaacatatctccgcacactttccgcgccgaccaaccgaccgatcacctcttccggcgtcgtcacccgcgacagatatcgaagctctccggtcagtctgtacgctatgatatcatcgaacagccgccccgactcattgtccgagaaaacctctctcgcggcgtcgatctcactctcgtgcgccagaaaatactccttatcgaatatcccgtccccgacgaccggcatctccgggatatacagctcccgctccgcggcgatacgctcaacgttcgccatgacgtccggcagacgcgaaccgaagccgaccacaacgacgaaatcaccgtatttctcacacacagccgaataactgagaaccttcttcccgtggaacatcctctcgcgcacgaacccgtccgacgcgaagaaatccgcgatacgtatcccgcggtcaacgaacgccgaaatcagcttatcgacgccgttcccggttccgtagaccactatcggcttgtccgtctccctcagcctgtcccagacgtcgcgcccgtccgggaggatatcacttattttcatatcccgaggaatctcttcgcgttgttatagaaaatatcctcgcgctccttttcggtgaggtctatcttcatgaaacgctctatctcctcgtcggggttcttgaccgggtagtcggtgccgaacattaccctgtcggcgccgtacgcggtgatgagctccttcgcgcgctccggggtcatcgcccagagagcggaggaagtgtcgtaccagacgttcggacgacccgcgaggacgttttccgcctcgtcccagtccttgtagccgccgaaatgcgccgcgccgacgacaaggttcgggaagcggtcaaggagcttcgcgagctttttcggttcggaatagcggtactgcgggcggttgtcgcccatatggaggtaaagcggcattctgccctcgaggatttcgcagagctcgtacatacgcttgtcttcgagatcccagcgctggatatccgggtgaatcttgacgcccttcatgccgagcttttcgatacggtctatctcgcccgcgaagtcctcgaaatcctgatgaatgcccgcgaagccataagtctcgaacccgcgctgtctcgaaatctccgcctgagcggctatcgagtcattgacgcgcgtgacctgatgagcgtttgtcgcgacggcgagcatgagaaatccggaaactcccgccgccttagatttggtctcgaggtcggtgtacgtccccttcccttcaactgtgaactcgtagaaagccgcgagacttttgacagccttgtcagaaatcgcttcgggataaacgtgcgtgtgtatatcaataattttgtacatactttcttttccttcttttttgaagtttttgaagaggggtccggggagggacttttttcaaaaagtccctccccggtcgcaccttaatagacgaattcctgataaatagccctgacagcgtcctcaaaatcggcttcttcgacgccgacgatgatagagatttcgctcgagccctgatcgatcatgcggatgtttattccggctccgcttatcgctttgaaaactctcgccgcggtgcccttggctttgaccatcgcgcgtccgacgactgtgacgagcgcgagaccgtcctcgatttcgatggtttcggggttgactgcgcggcagataccgttgagaatctggtcgcgtcgaccctcgagatcgtgggtgttgataatgacgctcatgttgtcgattccggacgggaggtgctcgaagcagattcccgcgtgctcgaggacttcgaggacacgtctgccgaagccgacctcagcgttcatcatatccttttcgattgttatgaccgaaaagccctttttgcccgcgacgcctgttataacgttgccggtatcgtatttattggaggaagaaagtatcaatgtaccatgcgcctccggattgttcgtatttcggatatttatcggaatccccgcgaatctcaccgggaatatcgcgtcctcatgcagcacccccgcgcccatataagaaagctcgcggagctccttataagtcacctcgctgataatacgcggattttcaacaatcctcgggtccgccataaggaacccgtccacgtccgtccagttctcatacagatcacacccagccgctctggcgacgatagaccccgtaatatccgacccgccgcgcgaaaacgtctttatagtatcattaggcattgacccataaaaccccggtatcaccgcccgctcatgcttcttaagctccgccgacaacaccgcgttagtcctctccgaatcaaactgcccgttatcattaaagaatataacctcagccgcgtcaataaaatcatacccaaggtacttagcaagtatccgcccattcagatactcaccccggctcgcggcaaaatcccgccccgccttatgtatgaacgcgttctttatagaaacatactcatcctcaagcgaaaactccatcgaaagtccggaaatgatcccattataccgcgcttctatctccccgaagcactcagtgatatcctccccgcgcgacgccatctcatagcacgcgtaaagcatatccgtaaccttagtatcccccttatgcctcttaccaggagccgacggcaccacataccgcctatccccctcagcccgtacaatctccgcaaccttccggaactgctccgcgctcgcaagcgaactgccaccaaattttacaaccttcaacaccgttaatacctcttatgtttatttacgtgggggagaaggacgctttgaaaagcgtccttctcccccacaccccctcatcccgtaaacttcatacacttaaatatatgaacagaacgagtgcgccaaggggacgaaactgccaaccgtttggcaggcaggaaaattcgtgcttacattatattatatgaaaaaagcaccggtttgtcaatagctgaccgccccggtgcagaaaactttgtagccgtacacagcaggacgcccctcacagaacgtcccactgtatattttttatagccaattaaagcgaaattatttcagagccgcgtcaagcccatacttatcagtgatatgatgcgctatcttacaaagcagcgccgccgcgtccggcatcaactccgggtcaaaatgattatagaaattatccgcctcatagacaaaatccccatcatacccgatgtcaatcagccccgcggcaaaccccttccaatcaacatttccgaaccccggcgccgtatgatcgtcactcttcccgtaattatcatgcaaatgcagcgccttaagcctcttccccagcgtccgcaccatatccccgaccggcttctcgccgaccagattagcgtgccccacgtcaaggcaagccacaaaccgctccccattaacgcagtccccgcaaagcgaattcagcgtatcaacataatccgccatctcctcactcgaagagcagacagtcggacatatgcacttcttctcgttatcccagttgaacatattctcgaccgccgcctgaacgttatacttatccagatacggaatcagcctcgaatacaccctgacggcgagctccttattctccttcgccatcgaaccataccggttctcacggattataggcggatgaacgaccgcgtgtctcgcgccgagcagagacgatatgtaaagcgccttgacctccgcgcggaaaatcacctcgtccctctcgtcgtccccggtccacgtcgggaacggcgtatgcgtctgatagacgtacatcccgtgatcctcgatgagctttctgagcttcgtgtacttctccgcgagctcatcgtcgctcatgacgagaaccccagagtcaagcgggaagaacatactgtaatcaagcgagtcaaaccccgctttcgcgagaagcctgacagtctcctcgattccgaagaacttgtcgaatctctcggtctgtgtgcagatcttcatgatatttgttcctttcttaactatttccaagataagtccaatactcttcaaggcacattccgagcgtctgcatctgctgggcgtggaatctgccgacataacgatagtgccacggttcgaaggatatgccggtgatactcaccttgtcctccgggtatctgaggataaagccgaatttccagcagttttctttgagccacgtgtatgccgcctcgttcgcgaaggctatgtccgcagcagggagattgtgcaggtcggcacagagacctgactggtgctcgctcgagcccggcgggttgattattgtcgcggttgtcgcataggcgtcagcttcgctcattccgcccgctatatattgctgtttgcggttgttgaagttgtattcctgcgtcgcgtagctgcggtagccggaggtgacgctcacgtcctcgtagccagcggctttaagctcgatgaacatcgcctcgagagccttctcggcgtagagacgcatctgctgggtctggcggccgtcgtttctcgtgttcacgacagacgtgaggtccggcgggacataggtcgagtcgagattgtgcgtcacgttgacgagcgtcaggtattccggcgtgtttccggggttcaggtactgctcgtagccggagaggtcggtcaggaagccgagctccggcatcgggacagccgccgccgcctcgtcctcgtcgatgtggtcgagggtcgacgggtactggagcaggaaatagaggtcggcgtactccgcctcggtgtttttcgggagcttgccgtcgtcgccgaggttggttatcacgcggtcgaccgtgaccgtgtgctttctcgaatcgacgctgatgttgagacccttgaaatacgtcttgacgaaatcgaccgggacatagaccttgccgtccttgtagtagctgtcagccccgagacgcgtctcgaccgtgttgacatacgcgacgcggcttccggtcaggaaccggatcgtctccgcctcgtcgttcttgatcacgtattttatgtcgtcgacgtcgccgatgacggcgagaccgcagagatcggcaatgtcagagaagcagacatagattctcccgtcgcgcaccgcgtcgacgtatttcagcgtgctcctgttaccgccgatctcgtaggcgtagccggactcgtccgaaccgctcactttcacgaggttatagaagaacatcatcgccgtgatgcccgacaggattacgacgagcacgagatagatcatgaatctcgagatgaaggtgcgtatcgccgaggcgcggcgttttttcgcgtagtagcgctctctctgccgctggacccggtttatctcgatctgctcggcggtgagctttaccttctgcggctccgcggagcgtttcgcgggagcgcggtagtttctcggggcgtttcccggtcggttatttgccggtcggctgtttgccgtcctgccgttcgggtttccctgccgctgattattattgtatgtgccccgcgcgccgttctgcgcggggttgttccgctggggattgccgcgcgggatattgttctgttgattattgttccccggaacgccgttccgtggagtattgttctgtgtgtaaccgttccgcccggcgggacggttctgaccctgcggatagccgttgtttcccggacgcggctgtcctccgggtcgctgattattgttcatatatttatgaagatcctttcgcgaaaatcctttcgtgataacgcatacacatcccgggcggcgtctcgcgaccccgcccggacggtattattccattaccacgccgttctcccagagagagtacgggcagaccggcacattaaacacagtcgtcgtcacgtggactcccgagttcgacgtgaaaccggtgtttccggagacgccgatcgattcgcctttggtaacgctctgaccgacctgcacgttcgtcgcgtccatgttgtagtaccacgtcttgagcccgagaccgtgatctattatgaccgtgtacccgctgtagtcgagatatcctgcaaagacgacggttccgttgttcgcggcgaggacctgttttccgttcgccacgtagtagtcgacgccgtcgtttctgtagatctcgcttgtcgccgcgatcttgacgtatcttccgaatccgcgcttgatgaacgccgccttgctgtcgaacaggctctgatcaagcgcctcgatgaacgcgccctcccagagcggcgtctcggacgaggaagtcagcagagaatcggtcgcgtcgtggaacgccttcagcgccgcctcgctgcgcgactgggcgacaaccgacgcgtccgcgtcaaagctcgacgagccgaactccttcggcgttatgtcgagaatgacgtcctgcgtcacctcgccgtatgagaaggtcatcttcacgctctcgccggtgaagtccatgccgatcggaatcagagccctcgagtagtcgccgtcggtgtagaacttcggcgtgaacccgatatccggctcgctcgcgaaggtgattcccgacgggtcgtcgacgtttttcgccgtgatgacgacgaactcgcccggctcaatctcggtctcgccgaggtagaagacagccgggagaaggatcttcgccttgaatttatagacagcctcgccgtagcgcgccttgtcctcggtctcgtaccacttcgcctcgacggtgacgtcgatggtcttgccctcgagcgacgcgttcgctatgttcgcgtagaggtcgctgtagacgacgttgcccttgtcgctgattgtgacagtgcagaagtccggctcgatgtcgaagttcagcgcgaacgcgcccttcatcatgtgaaccttctccggcgcggtgccgagagagatgctgccgagcggcacgtaatcgccgctgtaggtctcatagacccagcttgcggtgtccggatttatcgcctcgcccgaaaccgtgagggtcgggaaggtcgtcgtgtcatagaggcacctcgcgtactcggtcgagaggaacgccgacgcgtccgcctcggttatccggtaagccttcccgccgttgtcgacgaaataagcctcggacggatcgctcgtgaaataatatttgtaaaccgactcgcggtcgtaggtgaagaacctgaactcaaagtaatcggttccgaccagcggttcggggagggacgtctgctcgaccgagtggtcgttcagctcaacgaagctcgcgattgtggcagcggagcgggcgtcgtccgagtcaaggtcgaactcattcccggcggggtcggtgatgacgagctttgagacgctcgccttctcgaccggagcgttctgcgccgtcacgtagttggcgatcgcgacgtaggacggcgtgaagagcacggcgaccaccgcgagcgcggagagtatattctttatcgggttgttcatatcgaattccctttcatcagcgttatatgatctgacaggtgtcaaaaacacccacacacatatattatacaacactttttgcccgaggtcaagcatattctcgaaaattcagagaagaaacacaaaaaaaattcccggaaggttgatttccgggaatgattcgggaaaatgaagacaggacgacgccgttcggagcgggcgaccaatggtcgcccctacaaacgtagacatatatccgcgcgattgtccgtgccgcaaaaccccg

SEQ ID NO: 3923 - DNA, 18388 bp, Unknown
  16S sequences of unknown bacteria
gtgccaagccagccagctgttcagccgttgaaatatggtattccgaagcatcgggagcactcgtataccaactcgtgtccgccgtgccgtcccaaacgtccgccgcgctttccgcaaacacgcccatcggcacgcagaaaatcatcatgcagattgccaaagcgatgcctaatatacgttttttcatatagggcctcctattactatatgtatacgccgtacagaacgtaccgtatatactgtttctattttaatcatatacgaagttcagccaaaaatcaacctattttcctttcttctttcttaaattttacgttattattcacaacaagaattaaaaatccgcattcccggtgtttgcggaaatgcggatttaatttctatgaatttatacggtttagctatggtttaaaacgcattggcccataccgctgccgccgcaggtcgcaaacggaatcatcgtcttgccggcaaaatcagaactttccgccgccaccgccgtgggtcgtgccggaggacgacgtgtgcgttgcggagccgccggaagaatcgttgtccttcggctttgccgtgcggttcacgtgcgagtagaggaacacgtcgtttgcatacgccacgttcatgctgccggggcgcacataatccgacgctgccgccttacggcgcacggttttgagctgcccgcgcataaagcccgtcacaacgagcgccgcgacgaggccgatagcaagcgaaatcaaaatcgccgggccccacgggaaattccccacggtgctctcctcgtatgcctcaccttcctcgtagtaaccgctctgcacgcccgagatgtagttgtcgcacatatcggcatacgttgaaaacgcgtcataatagtagccgccgctgaggtcgctcaaaaacgcatcctccatattgccgcgccgcgcatccgtaatggccgtaatggcgctgcccgtcgtcgttatgtaccagtcgcgctcttccatgctgatgagcagcagaacgccgtccgggttatacttatacgaattataatcgtaaaaatcgtccgcatattcacgcggtgtcttgtcgccgatggagtcttccgtcacaacggcaacgtccacgctcagccggtcgctgatctcatcaagcttcgcgagcagattactttcttcctcgcccgtcaaaaggtccgcgttgtcgatcaggtgcggcgtgtagtcctccgccgtatcggcaaacgccggaacagacacaacgacacataaaagaacggcgaaaaataccgataaaagctttttattcattctccgcacccccttagaacagccagaacaggaaataggcaatcagcgcaatcacgccgaagcctgccgtaagcccgccaagccacttaaagtacagcccgttatccaccggcaggtcgccgacgaatttgccggtctgcccgttcatcgcaaagaggtactttttgcccttccacgtcgtgttcaaaagccacacggggtaaagcgcgtactttgccttgccgttgtgcagacgaatggaggaattctccgtcgtaacggagtgataccccttcaccgtagaagcgaatgcgtcttccgtggagcgcttgatgcgctcgttggcgcggtcgatgctctgctcggccgtcacatcgtacttgtccgcaaggtagcccgcaagatacgccgttttaaaatccaccgcgtcctcaaacttgaacggctcaatggattccatcaaatcgtccggcatcttggaggaaccgtccaccggcacgcggtcaaagccaatatcaccgctgcggcctatcgagtagtagctcgtctctgtgtaatcgtaatcgctgtcgctccaggtgcgcacacgcgtcgctttatagcgaatatccgcatcggcatcggcatcaaacaaccaaaacggcacgtaaacgcccttgatctcatcgatatggttctcttttttgaaaatcttcggcagcagctttttgcccttataatgccgctgcaaggcttcctttgccgcctttttgtcgatcttgaacggaatcacgtaatcgggcttcaaagcgccgctcacctgccccatcatcacgaccgggttgccgcagtacgggcaggaggtcgccgccgtgttttcatcacagacgatctctccgccgcaggagttgcacacgtaactgcgcagcgtgctttcttcgccctgctcccacgcgccgccggccgtggtctcccagtccatttcgtcgggctttgcgttttgtacttcttcctcgtgcgcggtaaacgcttcggtgtcaaactccgtgtcgcagtacgggcactttatcttctgaattttactgtcaaattccacagcgccgccgcagcaaggacatttgtattctttaattgccgccatttgctctcatctcctcacagttcaacgcaggttgcaacttttaggcacggtcattttcatcaaacgggtcgccgcactgcgggcagaacttcggcgggtgcgcggggtcttccggctcccagccgcacttgtcacagcggtacttcggtaagccctccggctttttcgcgccgcagtttgcacagaaattgcccttgttcactttaccgcaggagcaggtccagccgtcgttatccggcttctttgccccgcaattcgggcagaaatttccgttgaccaccgtgccgcacgcgcacttccagctgtccgcagcctgcgccgcctgctgctgacccatgccgtacagcgcctgtgcgttcatgccgcccgcattcatagccatatttacgcccataaagccgttcatagcaccggcagagttgcccgcggccgttttcatcgcgtccgactgtgcgccgacgagcgtggccgccgccatagtcgggtcgcgcatcatcgccgtgcgctgtgcctgtttgatcatctcggcgtcctcgtccggcagtgtcacagagccaagcgcaatgctgacgaccgtcaagccgcgcagctcgccccatttcgcggaaagcgccgtattcatggcgtcttccagctccgtgttgtgtgccacaatctggttcggacgcaaaccgaggtcggaaagcttgccgaacgccggctgcaaagcgctgatgaactcgtgcttcagctggctgtccaattcgtcgcgggtatattcctgctccacattgccgcacacattcgtgtagaacaaaagcgggtctgcaatgcggtacgaatatacgccggagcagcggacggaaacgtccacgtccagcccgatcttgttatcgaccacgcggaacggaatggggttcggcgtgccgaatttattgtcgatgagttcctttgtattaaaataatatacgcgctgatctttgccggtgtcgccgccatacgtaaaacgcttgccaatctgcgcaaaggtgtttttaatgcccgcactgagagagccggagaaaacagaaggctcgctcgaagcgtcataggtgaattcacccggctccgcgcaaagctccaccactctgccctgctccacgatcatcatgcactggccgtctgccaccgcaatgccggagccgctcgtgatgatgttgtcactgccgcgcgtattggaggaacgcccgctcgtgcgctttacaccctttgtgacaagcacctctttcggcatcgattcgcaatagaaaaactctttccactgatccgccataacaccgcccgcggcgccgacagctgccttaataagacccataaataattgctccttttcaatggtttccgcacgttatattccgcccggtgtttatgctctaagtttagcacagaattttgctgttttcaatgaatttcgacagcacactcaacaaatatttgcgctttcctctgaattcagggaagcatccatgatggaaacccatttttcaattttgaacctgtgcccagaaaaccgggtgcatatccgtctgtgcggctcttttttaaattaaatttgctttgcctcttcgccgagcgtgaattcatagtgcatctcaagcgcggcaaacagcttttgcatcacttcgtttgcaatggcacggatgtcgaggctcgcaatcagcgccataacctcccgctgtttttcctccggcacgcaataaatgcgcagtgtcagctgcaaaaagcgctctaacttgcgttccagcgtaaaatacacgtcgcacggacgcgccatatatccgcgcataatcgccgccgaaccgatgtccgactcataaaaatcgctcacactgtacccgggcatatacgcgccgaaaatacggtgcagcatctcggctgtcatcctgtggatgatttccaaattttccggcagcgtgtacgcctccacgtaaatttggcgcaggttctcgttcagctctgccagcgtcagctgaatcgccgtctccaccgcgtagagctttacggggtctgtctccccctgtgcaatctgccccgcgatagtaaactgattttgaaacatgaactcggtcagctcggtaagcacaccggctttcgtgcggtacaaattataaaacgtgcccgcggaaacatccgcttccgtcaaaatctgcttcggcggtgtatgcttaaacccctgctccaaaaacagacgcacacaggtagaaagaattcgcttgcgcgaggcctccttttcgttacggtttgccatttatacccctcttttccctgttttagaattgattctaatatccccaaatgagtataccacaacaaaaagaaaaatcaagtgtcggtacacgaaaaaagggcagctcttcgccgcccttaacgaatatttgtctttaccgcacgggttatatgttccgtaagatcgcttttttcagcgtttcggcattcagcggcttcgagagatgctccgtcataccggctttgcggctgcgctccacatcttccgaaaacgcgttcgctgtcattgcaatgatcggcaccgttttcgcatccggccgatccagcgcacgaatgcgctgcaccgcctcaaggccgtccatcaccggcatcatgatgtccattaagatcacgccgatctcgcccggcgcggagtttcggaaggcctccacggcctctttgccgttccacgcctgcatcgtttcggcacccatgtcttccaggaagaattccgcaatctccatgttgagttcgttgtcttcggccagcagcactttcagcccgtgcagagccgtttcgtccgccgcgccattcgccgccgcctgcgcagagggatgcttgtcgatttcaaacggcagcgtcaccgtaaacgcagagccttcgccgagcacgcttttcaccgtgatggtgccgttcatcttctcgatgagctccttcacgatagacatgccgaggcccgtgccctgatactgcgtgcgggcgccctgcttttcctgtgtaaacggctcaaaaagctcgttgttcacaaaatcttcgctcataccgatgcccgtatcacgtattgtaaagcggaatgtcgccgtgttttcgtcacaggcaatctcctccgcatacgtttcaatcgtgccgttttctttattgtattttgccgcgttgctgaacagattcaataagatctgccgcagatgcagcgggctgccgataagctttgcgtgcgcaaacgaaatcttgctgtaggtatacacaatactcgtttttgccacctgcgcttcgttcagtgcgcggacgttcttcatcaaatcgtcaaggtcaaacggcacatgctccggctccatgtggccggattccagcttgctcatatccaaaacatcgttgatgagcgacagcaggtgctcggaggaaacatggatcttttcaaggcagtcgtccacgcgctcatgatcttcacgatttttcttgataatctccagcatgcccatcacaccgttgatcggcgtgcggatatcgtggctcatgcgggaaaggaactccgtcttcgctttattcgccagcgttgcttcgtccacctcagcccgcaagcgctcgtgctccttctgctcctgtgcatggaactccgtggtgtttttcagcagcacaaggctgtggattatcggcttttcctcactgctcttcgcatcgtatacgcgtgaagacatcatcagcgccgttttctgtatccagcgtgtctcgccgccggatacgcgctcacagtattccaccgtcacctgcttttctccgctcgcatagcgttccaaaagcttttcggccgtgtcgatcaaccggtagctgcccatcgtttcgggcaaaatcagcatagaatgacggtggcaatattcgccgtacggacacggtgctttcaaatcctcaataaagatgtctgcgccgcgttcacgacggaaatcacgctccaccagatcatccgtcagattcacggagtataccgcatccgcagtctccagcatcgcatccacgtaactgtcgttttccaaaatagactgcttcagctgctcgtaatactgcgtcagttgctgcttggcgtccgtctccggctgcacactgtcgatcgtctcaaacgccagtaagaaatggtgcagcgtgccgttcggatctgcatccacaaaaatcgccgtcagtcgcccataatcggcactgttctcgccgaaaatcttgtgctgcaattccaccacgcggttcttttcggaaagcgcctcgcacagcgccgtcagctgtaatctgctgcgcaccgccttgcggtcttcctgcgccacgcgttcttctgcaatctgctccaccgcgccggaataactgccgtccgccgcaaggaaaaacgcctcgcttgcacgaattacccggtaagcgtcctgccttgcgtcgcagtacaggcaatcggaaaagttgctgccgtattttttcatgcttttcagcagcctgcgatccagcttcttttcggccaatgcttcctcgcgcttcacgtggtttttgttgatatacatgtttttgtctgcgaggatatacaaatcgcgcatcgtgcagttttcgttctcgtcggagaccgaaatgccaaccgcgtagctcaccggaaaatcggggttcgccgtattgtacgtgtccacacggtcgcggatgagctgtaagcaccgctgcatttcttccttgtccgcgccgtccataatggcaatgaattcgtcgccgcccgcgcgacccacaaagtaatgcgccggcaccgcctcgcgcaccagctccgcaaaaatgcggatgtacgcgtcgcccttttcgtggcccatgctgttgttgatgcgtctcaaattgttgaggtcaaagctgcaaacacccacgggcatcgtgatcatctccggcgcgctcaatagctcctcacatttatttttgttcggcagccccgtcgcttcgtccatgtacacctttttctgcaaagcgtggttcatggcggtgtagtgcagcgccttgataaactcataaccgatcagcatcatcaaaactacgatgtccgccgtgatgtaccgctccaaaaccgccaaagaggacgcgcgcttttgcgaacaggtttccgcaaggctcgtcgcctcatcgcaaatgtcgaaaaacttttcgcttttgtcgatgatgtcggttttctcaaaacccttttcgcgcacaagataaatctcctgtttcaggctttcaaagcaagaagccaactcttccattttcgtctgaaaactcttgtcgtccaatcgcacaagggtaagctcgtcatcgccgaagcgcagaccgttgataaacgattccacgctctccatcatcccgtcctccgcttgacccgcaatctccattttgacaaggcgttgcgtttcgccgcgcacaaggcccgcatagttcaccacgcgcgccgtgccctgaatgcccgagaccagcaccatcatccaaacgatcagcgccgccaaaaccacggccagcacgccgatggccgcctgcacggcattcgatattttcttgttttccctcatattcttcaccgtttcaaatcgtttggagttatacattgccggaccctttcccaaaatcttacggttcattatagcacattcatgttccgtcttcaacacaaaaaaaggcccgacctttgtggattaaactgccaaaggtcggactgctgtttactttacgcgccgcaccggtcaatctcctccacaagcgtttgaatgcttttgtaccatatacacatgctcaccgcttcctttctgcttcccgttcagtataccgcagaaaagcgcactctgcttgattttacttgcggatacaggaagtcggcgtgtttttcattcacgtttcgccaaaacagagcgccaaacgcaagccatagcgtaaaaattttcagacgattacaaaagtaaaagcccctctgccgcgcttttcaccatttcggcatactcctttttcacgttttccggctccgtgattcggattttcccaccgtagccgaacacccagcggtaaaagacagggcttgccgccgtctccgtttccacggtaaatgcgtcgtcgccaacggcctttgtttccacatcttcgccgaatgcgtccaccaccgcattcatcatcgcgttgtcacacaaaagcgtcacgcgctcacggcggctgtcatacatgcttgtcatcgtgcggatatgccgcatcaactcctctttttcgggccgcggctccgcgtcctcatctaaaatctccgggcaacggtcaatgcggtccacgcggaagctcacaagcttttcgtgcttgtcggaataccccacaacgtaatattcatctgtattccaaacaagcttatatgggctgaaaacatacggcttcccgtcgtttttcagcacacggttcttgcccggaccgtaatgaaaatagtaaaacgcaattttcttccgcttcgcaatagccgcgttaatcgtgtctgcaatatagtaaatgctctcgttgcaggatttcccgttgttcgcgcaaaatccctcctgcaaagcctcggcctcataaacgctcgtcagccggcaaagcttttcaatcagctcctcgcttttcttttcggtgatgaatcccgcagattccaccgcgtccgcaagcagcttcaattccggcatctcaaataagcggctcgcaaggtaatagcggttctgcgtcgtcttgtgcgtgtaaatatcaaagccgcagtccacaagctgcttgatgttcttgccgacggtcgtgcggtgcaccgtaacgccgcattccttttggagcttatccataatgttttttgtagaaagctcgtggttttcgtcactgtatgtgttcagaattttcaaaagcgagatcgtccgcagctcagcgttgtcctccgccttcggtgtcttattcgtctttgccataaagcagcactcctttgcgctcgttctgcttttattatagcggacgaactcccaccgcacaagcccggaaatcgtcaggtgtcgctttttcgctcacttcggcttcgtgataagctctgtcaccgcttcgccgtaagacggcacaaacgaaaaattctgctgatactccttcgcgttccatgcaatgttcggcatgtatatccctcacttttccgctaaaatgcgttcgatctcatctaatgtgtcggcaaaataaatgtcctcctgccgctccttggtcgaaagccccatctcgatcatatggcctaaaagcgccttcagcccgtcgtaatatccattcagattataaagaatgcacggcgcgtctaaatgcttcagcgataccttcgacatcacttccgcaatttcctccagcgtgcccgtgccgcccgggaacgcgataaacgcgtcgccgagctcaatcattttcgtctttctgtccgtcatgtcctttgtcacaataagctccgtcagcccgtcgtgctgcagctcggagtccacaaaaaactgcggctccacgccggtcactttgccgccgttttgcagcacgctttcggcgatcgaccccattagcccgcattttgagccgccataaatgaggtcatgcccgttttcgccgatccacttgccgagcgcctccaccgcctcttgcagcttggggtcattgcctgcgtttgcaccgagataaaccgtgatattcatcttcatccccgcctttcttttcccttatcatacaagaattcaccgaagatttcaaccgtttcactccacacggtacaaaacatgcgcataaaaaacggcggcacaaagcctaagctccacgccgccgttttgggatatataaatcaggagagcgcctgcccgcattccgagcagaatttactgcccggctttaccggcgcgccgcagcccggacacaccgtttgtagctttgcgccgcaagcgctgcaaaacctcgcgtttgcgaaaatctgcgccccgcactgcggacagactgcccccgccggagctgtcggcgccgcatttacgggtacgcccgccgtccggaagctcgttggctcgcccatcgtgcagcggtacaccacctcaaaaatctcgctcggcagctttttctgcttatacgcaccgatgcccgccgttaccgccagcggccacagcagaaaaagccccacggcgcccgcgcccagcttgtccgcccactggccctcgccgagcgtcacattgagctgcgtgccgtttaccgtgagctccaccgtcgtcgccagcttcatgccggaaagcgtgcgcagcgtatcggcctgcgccgcctgaatgaggtacccgttcggcgttgccacgctctgcacctccatgcccttttctccgcgcaaaaacgtcgtcacagcctccaaaacctgctctgcagtcacttggttcagctcaaatactctcgactctttcatgtcgttcccccatttctatttcgcttctatttcgcttcgcgcagcgccttccaaagcgccgcatcattttccagttgataagcgtcttcttcatacagcaggttccgctgctcaaaccgtatcacacacgtcgtgccgtctgttttcacaaacgtcaaactctgctcgctgtccgttgcacgcatgtccgttctttcgccgattttcacctcgcaaagtgcgtcaaaaatcgtttgcatcgccgccttgtccgtgatgcggcaggaaacgggcgtgtccatcgtgtagcgatattccatgcagttcatctcattcacgtcaaatgtctttgcgaaattctctgcttcgccgccacaaaacgcaaacacctcgccggcttcgcttctttccaccgtctttcctccgcagcccgcaagcagcacgcacaaaacggccagcgcacacagcaaaataaaaccgcatcgcttcattttcccgcccccttttctatcccctatcctaccaaacgaccgtaaccgaaaaaagcgttttcccggtttggtcattgacacaccggaaaatgtcaaaacccactgcgttcgcttatggcggtttcggtcgaagcgtggtataatcgccttaaatcaagcatacggagggaacccgcatgaaattttgtgaccgtctcaatttatatatcgaaacactcggctgctccgccaaaacgctttccgccgcctccggcatatcggatgccgccatcagccgctaccgctccggcgagcgtgaacccggcagggacagcgaacagcttctgcggctcgcacagggcatctgcgccatcgccgccgaaagcgattattctcccggcttttcggagggcgaagttctcggcgccctccgcgcttccctgcacaccgaaaaatccgattttgacagcgccgttcaaaacctcaaaaacctgctcaccgcattcggcatcagctacgcagagctttcccgcgccatgaatttcgacgcatcctacctctcccgcgtctgctccggacagagaaaacccgcaaacacagaggaattcatcacgcaggtctgccgctatgtcacaaggcggtgcctgaaaaacgaccaaaaagaagccctctgcgcgctcgtcggtacacccgcagagcaacctgcaaagcccgagcaatacactgcgctcctcatggagtggctgtgcgccgcaaagcagcgcgatgccgagtccgtctccaaatttctcgcgcatctcgacaccttcgacctcaatgaatatatcgaagccattcattttgaggagattaaggtgccttcgctcccgttccgactccctgcctcgcgcaattactacggcatagaggaaatgaagcagggcgagctcgattttttcaaggcgaccgcgctttccaaatccgccgcccccgttttcatgtgcagcgatatgcccatggccgatatggcggaagatctcgacttcggtaaaaaatggatgttcggcatcgccgtcgcgctccgaaaaggactgcatctcgatataatccacaacatagaccgcccgtttgaagaaatgatgctcgggttagagagctggatccccatttacatgacggggcaggtctcgccgtactacttaaaaggcgtgcagaacaccgtctactgccactttcattacgtctccggcgccgccgcgctcaccggcgagtgcataaacggctttcacgaagacggccattaccatttcacgaataaccgtgaagaggtgcagcacagccgccgcatcgcagaccacctgctgcaaaaagcgcagcccttaatggaaatttacaaagccccacaggccgatctgttccgcgcattcctcaaaaacgacgcagccaccgtcggcgcacggcaaaacattctctccgctccgccgctttataccatgccggaagatctgctcggacgcattctaaagcgcagcggcatgtcggcagcagacgcagaaagcatcaacgccacactcaaacagcaaacggaaaatatcgagcaaattctcactgcaaacaccgtcatcgacgagctcccgcatgtaagcgaagaagcgttccgggcaagccccctcacgctctcgctttcaaacgcattcatcgaaaacaccgtcacgtacacctatgaagaatacacagcgcaccttaaagccaccaaaatattcgctgaacagcacccaaactacaccgtccgttttgcggagaaacccgcgttccgcaatatccaaattcaaatccacgaaaacgagtgggtcatgctgtccaaaagcaaagcccccgccatccatttcgtcattcgccacagtaaaatgctcagcgccttccaaaacatgatcttgccttatgttgaggattaaccgccacccgcgtcaacggtggttaaaagttttgcagcgttcgcggcgctaatcgccgtttactgccgaatatattcgcaaaaatcattcacaacacgctccatcatttcgttattccggcgcgaaacctcggccgcgttttctgcctgcatgtttccttgccgtatcgcttcctggatgtactcgtccgtaaacgtaaagctcgtcaaagactgtatcaagatcggcgccaccgtctcaaattttccctccggcgcaatgatgccgaaaatgttcgaggcactgcgtgaaggcgtcacgtccacaccgttgatttcatagccgcccgcgtctaaaatgctgccctcaaacatacccgtgcaggccgcccctgtttccgatgtaaggctcgctaagatcgaagcttccgaaaccgcatagcttgcaagcggcgtcgtaatgggcgtttcgctcaaaactgtcatgttttgaatttttgcaaatgcaaaactctggggcatgatgccgtcgtaagcgtcttggtaatcgtccatcgcgtttaagcaccccgcaagcgtcgggtcctccagcaccggcaaatatgtcagcgggtcattgctcgtgctcatcgattgatactgcgccttcgcttccgcactcttaaagtacgggccaagctcaccgtaatagaagatctgcacatccgggtcgttcgggtcccacgcgcggatggaatagcccgcatattcgccgccggtcataatctgccacccctgcggcagctgcatcgtgaacaccccgccgtcgtaattaaccaacgtgtacgccgccgcgggtgtcggttccgccgtcggctccggggcagcggtcgcttccggctcgggggtcacttcaggctccgtctgcgcatttgaagcttcggagaacgcttccgtttttgattccgccgtctcctcgtccgggtctatccccgccgcctcaaacaccgtgtctgtgccgagcgcatcatatgtcttgccgcctaatacaacacacccgtcctcacgcagcgtaaagctcattttgctgccgcttgcgtccgcaaatgtaaaaatataccgtgtgtatttgtcgtccgtctttacaacttcgccgagcgtcacatctttcaacgcgccaaaaatttcttccgcttgctttgcgtcccgcaccgttttcggttccgccgcaaagcttcctttttcttcgtaaatcgtcaggctttccgccgtaaattttcccgcgccgctcactcggtcaaacagcgcgtttttcgcgccgcagcccgcaaaattcaaaagcaatacaagcgtcagcacagccgccgtcattcgtttcgttcgtgtcatgtttgtctcctcagtagtttaatccctgaatgttcagcaccggcgccaaatcgcaatccaccacatacaccatgccgccggattgctgcgcctcctgctccttgttgtacaagtagttcgcccattcctccgcgctcagtggctgaatgagcgactgcagcgcgtcctgcgtcgccgtaaacggcagcatcgtcgtctcaatgaggaagtattgcccggagccgctccacgtttccaccgctgtctgcgcgtgtcccggcgtgaacacaatcatcgcgtgcatgcttgcggattccagcacgctcgccattaaaaccgccgtttcgatgcaaattccggagccgttctctaaaactgcgtcgggcatcaaaacgcgctggctcgcactgaacgaatacggccccatgttgtagcgtacgcccatgttgctgatggcgctctgtatcgccgccacctgataatacgtgatgtacgcgccttggtcggacgtaaagccgtacgccggctgataccccggcagcataccgtattccgtgccgaagctttgctccagccacgataccgcattacggcgcacctgcaaaatgccgtccgtttccggcgtcatccacgccaagatgttgtcgttctggatgatgccgaattcgtcgctgtaatttttataatcatatacgctgtgcagctcaatgttcttcgtctcctgaataatcgcctcgcccgtgatcgtgttttccacacgcagcgtcatctgcgtgtccttcgtcgttgaaaggtcgggcatatcggtgagcaccggcggcttgatcatcaaatacgtcatctccggcgtcagcgtcactttctgctcatatttctgcgtaaagcccgcaatttccgccgtcaccatcacgtcggtgtagcccttgtccgtatataaaagcaggttgatcgccgagtccatcgaggggtacaaattcggaaaaatctcctccacggtcgagtagtccgagaacacgatcgacgcctgcgcgtcatacgcgccaacatctttgccgccctcgcaggccgccaggatctcatccgcatacgtgtcaaggttctcatcgagcaaaaacgcggcgtggttatattcgcggctgtataaatcgaacatcgtctcctcgtgccgcccggaagtaatgcccacgcgcgagataagctggtttgcggaatacagtctcaaaacgtccgaccatgcaaggccccacgagcgcgattccatgtatttcgtcatcacatcaaggttcgcaacgtatttcggccacagatcattgagccactccggcgtgtccaacgtactgagcgccgttttcacattgcccgccgcctcgtaaacggaaatgaggtacgcctgctcgtcgctgcggtcgccgaccgtagccgttacaagcggctgcaaagcgtcatactgcgccgtgtaaaatatcagcgcctcctgaatgccgccgatcacctcaagtgcgtcctcaaagtaagccttctgctccgcttccacagccttgcctttttcggtcttcggcgcgtcgcagcgctcgaggctctgcatctgctgccgcaccgcgcccaccgcgtcgttaagcgcgtttagtttctccgtgcacaaagtataatactcgtccagcacgtcaaagccctctgcattcacagaattctcatacacaatgctgctctgcccggaaagctcgtccgccgcagcttccacgtcctttaaaatgctctgcgtctccgtcacggccgccgccacctgctccaaatacgccttgtcctgctgcaccatgccgcatcctgcaaacgatgtgcacaacagcaccaccgccaaaataaagcttaccgcccgtttcccatttttcatacgcgtcccccttttgctctacagaattattctttggttctattataacgaaaaggtatgccgcgtttgaacccgctttcccgccctgtccgtgacaaacccggaaacgaaaagctccttcaaaatagaaatagccgcctgatttcttttgaaaaccaagcggctatgtacgctatattcagttcgacaaactggaagttgccgggctcaaaacacgcattatgctaatcaaataagttacgccattcctctcttgttattgaatatatataggatatttcgtttttagggtcagggtattccttaacctttttcatcccattagcaattgcagttgaatacgagccgacatttgtatatttcatatatgaatatatctcattataatctgtattcataaacacccagtctcttacagccctagcagcctcttttccatatcctcttcgccaatactttttatgtatatggtatccaatttctggaagaagttctccgtcaatatcctgaatggtaataccacaatctcctataaattcatttgtctctttcaaaactactgcccataatccaaaaccatacttgctataattctcgatattccaagttatccaacctctggttcgttctttatcaaatggcgatggatagtgcttcattgtttcttcatctgacataatctcaaacaatgcatcaaaatcatccattgtatattctctaagcaatagtctttctgtttcaattagcatattaataaaatctcctctctacaactcccgatttgtctctcacaagtaaaagtattataccacatctttacgaatttttctaccacttcgactaccctaaaacacctgcaccatattcagttcggcaaactggaatttatgtcaatgcgaactcaatctcatcaagtttatttgttattgcattctttctccctgtctccttaaagcctattcgacgatagagtctctcagcatttatattattctcaaggatccacagcgtaggggtatccgtacattggcctactgcgtatagtaacaatttcgttccataacccatgttttgcatatctggaagaatataaagatcctctattaaactctttgttacagaaacaacccctattggtttttcttctacaagcatatagagctttgttccgttgttcatcttgtttctcaaatactcccgttgccgatctggcgtgtgcgtttctatgaaatcaggagtacaaaatgcacgatgcgattccttccaggatattgaatggatagttgcggcttgaagaagatttgtttcatctacaggtactatcatacttacctccacaaattctcatttattgtttttaaccaaaagtattataccatatctttatagatttttctatcatttcgactaccctaaaacacctgcaccatataccagaattttcattgcttgcctccaaatccgatctttacaatctgcatcttcatcattccgtcgccgattttggcgagaaaacggaaaaatccgctgacggatgggtccttcaagtcgttgtagcccagcatatagcctcggctggtgacctgcaagcggctatcccacgcactgatctcttggggagcgtccgaaactgcgaaatacgcgcccacatcttgaatcttcgcacttttaagccatgtttttgcaatcatctttaccgccgtccgatttgcagcgtcaaacaccagcacaccgccggggaaggcgtctgccatttgctgtaccagcgctttgacctgctcggtcaggaagtaatagaacacgccggaggcaaagaataccgcaccgtttgaagcgtcaatttttctaaaccattcggtattgttcaaatcgcatgggatattttcctcacgctccccggcgggcaaaagctcgttacgcacggctatgacatcgggaaagtccagattgtaaattttacagctgccgttgtcgcagcttcttcc

SEQ ID NO: 3924 - DNA, 10500 bp, Unknown
  16S sequences of unknown bacteria
cccaatcccgcgcgcctatcgcttaatacccttccatccgcatcatggtgagccgctgatccatcttagagatcatctcatccatgccgatcaggccatccacatactgcatgcgcagttcatagaactccgcgtcgttcatattcgagggcaccaccatgttttcggcgtagccgcgatagttgtcgatgctcgcggccgacacatcccaggagctttcttcctcgtactcctgcatgtagccttccatttccgcgatgttctgctcgtacgtggcgcgggtttcttcgtcctccgcgctctccaggctctcgcgcaggtacgccagctgctcttcgtaggattccatattctcctcataataggacgaacgcaccggcgtattttcgctgggcatggtctggatgcggaagatttcatccagattgtccgccaccgtttccaggaaagcaatggcggtttccacgtttgggctaaagggattcaccagcgccgcgttcacctgcacgctcatcatccccggcacgccttcctcaaagcccagcagcatgggagtgaagttatcgaaggcgtagcggcgcacatcgagattcacggtcgtcgcaaacatgaagtcgcctggctccgcgctccagaagaagctggtgcccgcctcgtcctgcgaaatcaggcccagcgcctcgaaatcgaccgtttccagcttttccagcagcccgcgcagcagcggcgtatccagcgtgaattcctgatccggctggtcgatatacagcaagtagttatccaagatcatggagaacagggtgctccgggcgtcttcctgcgtgacattcggctcgaacatgctcacatcctcatcgttggccatataatccggcagggcgatgagcaaatccagcagttcatcccaggtggtgggcacgtcctcttccgaaaggcccaggcgccggaaggcttccatatcgtagcccatcatgctgtaattgtacatttccagcggcagggcgtaaaccattccatcgcgcgaagcggcctccgcaatggccggatacatctggcccaccaggcccgtgatcttctcgctgcctcccagttccaccgcatagccgcggtccagcagcgtggcgaactccgcgccgctcatattgagcacgtagatgtccatcgaggcggactggctcatcatggcctggatgagatcctcatcggaagtctttttcaccacttccacatccgggttcgcgccggtgaaggcgtagtacgcccgatcgacggcatccgcatacgcatcctgcacgacgatgcgcgtttgcgcgcgctgggaaggatcggtgttgcggcgcactacggtttcataatccgcggcgatgaaatagccgtcctccgtgagcacgggctgcgtttgcccgctatagctcagcggcatatccgccacggattccgccgctgccggatctgtgaggggcatgcgccacagttcgccgttcgaaacgtagtagagcaagtccgcctgcgcgtcgtaatacagcatgctgggcgcgctgtagccatccatgggcatttcgcacagcacttccacgctttcgctttccagctccagcgcgcacagctccacgcgcggctccgccgcgttgtaatccgcctgcagagcaagcacgcgcccctctttgtacggcgcgagcaggcccagatattcattgccaaaggaatggtagctgccatcttccagatcaaaccagaagatgttgttcacgccataggtcgtgcccaccagcatgccatcctgcacaaagggcatgctgatgttcatccaggcgtattcatcgccagaatcttcgatcatcgcctcaaagtccagctccgtcgccagttccacgcgggcggtcttgatgccgtccgcctcttccagcgaaatggaatacaggccgccgccccccaccagggattcttccgcctccatgtcgtaaccgcgttccattcccagcaggcggatttcgcccccatcggtcacgatggcgctcggattgaggttgaaatacacgtcgtcctcctccgttgcctccacggtggaggtatccagctgccactgggtcagcgcgccatctgcgtaagtgtacagcgaattgtagccgaggatatagagcgtgccatccgcgtaggccatggactgcacctgctcgtcaaacccctccatgccctcgtacaccagcaccgcgtcgcccggcgcggccagcgcgccagcgcccgaaaccgccagcaggcacagcgccagcaaaacagagatccactttttcatcgcgtcccatcctttccctttgcgaggctggccaggcgcggcccggtcagcctcgttttttccgcttacattccttcgagcacgatcatttgcaatttctgatcgatgttgcggatgaactcatccagcgtgatcgcgccgttgatatactgattgcgctgttcataatactcgttagaagtttcgctgtccatgccaagataagtggataccaccatgtatcctgccacctcgcgatacgcggcgatgctctcctcgctggcgttatactggttgttcttttcaaaatcgtcgcggtagccctgcatttcttccagcgtggcttccagcgcctgcttatccacctcttccgcgctcaacagctgcgtttccagcgaggcgatctgctcgtcgtagctctcaagggtttcctcaaaatagggattgagcaccggttcgttctccccgggcatcatcgtgatgcgcatgatggcatcgacctgctccgaagcgtactccagatactcaatggccaaatcgcggttttgcgagaacggattcacaaaggccaccgtcacatccgtgctgacgagcggctgcatgccctcatccagccccagatacagcatcttggggccattgcccgttacatagggcgagaaggaagagccgtaagtgtagaacatggtgctttccgcgttgtagacataatctcccgatccctcttcgctcacgcccagcgcttcgaagtccacggcctcaaaggccgccatcagttcgcggaacagcggcgtatcgaaggaaaactcgttctccggctggctgatatacagcatgtacgcgtccatcagcgaagaaaacagcatatagcgcaaatcgtctaccgccatgtacgtttcaaacaccgtcacatccggatcgttttccagatagtccggcaggcgtcccagcaaatcgaaaaattccatccagttggcgggcacgtcttcctccgtaagtcccagccgctcgaaggcctcggggctatacgaaaggtcgccaaagccataggcttccagcggcaggccatacacttccccgtccttctggatcacttcctgaatggcgggatacacggcggcggcaaagtccgaaaggatttcgctgcccgtgagctcggccatatagccgcggccaaacaccgcgctgtattcggacgagctgacggaaagggtgtaaatatccggcgtggtcacctgcgtcatcatggattgcaccacgtcccccggagactgcgccagcaccacttccacttccggatgcgcctgctggaaggccacgcgcgccgcttccatggccgaattgtaattgtattgcacgatgagccgcgcttccggccgttcctccggattggtgttcaccttccagagcgtttcataatccgaaagcagcaaatccccatccgcggcaacggccatgcagctgggatacgacgtgggacaggccgccacggaagccgccgcttccacgtccgcgcccaccacgcgcatcaattcgccgttggcctcgtaatagaaggcgtcgctctgcgcgtcgtagccgatgggattggggtatatgcccgtcatttcgcccagcgcgaacagctcctccatgtcgcccgtggccggatccagcgcgttaatatgcatgatcatggaatcggtatattcattgatcaccgccagcaatttcccttctttataagagaagatgccctgcgtagaatcgtccatttccaacagttccgcgctgcccgccgccgggtcgaggcaaaccaggctggtgccgttcatcatatacgctatgccatacagcttgccatccacctgcaccggctggctgggcgtagccacattagcgtagtccccctcatattcgatgaagttctcaccgtcaatcgccatggcaagctccaggcttaccgtgcccgcttcctcgtcaaacgccagcgcatgcaggccatagtccagcaggcgcgcgtcactctggtcgtcttcatagacggtggctccggcgagcacatacacgccgtcttcccaatagcaaatgcccgacacattaaaatagccgttgcccgcgttctcgcccaggtcgtaaggcgcgattgtccaggcctgcacctcgctgccgtcttcattcatcgtgtaaagctgttcatagcccagcacatagattttgcccgcttgcgggtcataggcaaagcccatcaggctatccatcgtgtccgccggcagggtgaacagcggctgcgcgctgctggccgccatggccggaatgcccatggccagcaggcacagggcgagcatccaggcgatcgtctttttcatggtttcacgtcctctacaaaaaaatctatggggtttggtgctgacaagggcaacgatcctctcactgcccttcccgcacgatcatccgcaatttctggtcgatgttgcggatgaattcatccagcgtgatcgcgccgtgcaaatactggttctgttgctcgtaatactcgctggaagtttggctgtccatgcccatgtacatgccaaccgtcatgtactgcgcggcctcgcgataggcggcaatgctctcctcgctggcggaatagcgagaatccttttcatagctctcccgggaatccttcatctctttaagctcagcctccagcgcctgcttgtccacctcttcggcgttttccagctgtgcctccagcgaagcgatctgctcgtcgtagtttttgagtccttcttcataacggctgttgggcaccggctcgttttccccgggcatcatcgtgatgcgcgtaaacgcatcgacctgttctgcggcgcgttccagatattccacggccagatcgcaattgggcgaaaacgggtttacgaaagccaccatcaccatggtatccgccatgggctgcatgccttcgtccagcgccaagcacagcattgggggttcgctcgaaaccgtgggatcgaatgaaccatagccatagaacaaggtatctgccctgtcctgcacgatggcatagagatcgtcctcatattcctcggataggcccagcgcctcgaaatccacggcctcaaaggccgccatcaattcgcgaaacagcggcgtatcgaaggaaaattcgttctccggttggctgatgtacagcatgtaatcgtccatcagcgcggaaaacagcatctgccgcgcgtcgctttgcgtcatgtacgattcaaacacgttcacttccggagcctcctccagcatttccggcaggcgctgcagcaactggaaaagttccatccagttggcgggcacgtcttcctctgtaagtcccagctgggtgagcgcggccggattgcaggaaaggcgggcgcggccaaacatctccagcggcagggcatacacttccccatccttcacaatcgcattctgaatggcgggatatacggcggcggcaaagtccgcaaggatttcgctatccgtgagctcggccatatagccgcggccaaacaccgcgctgtactcagcggaatccacgtacagcgtgtaaatatccggcgtggccgtctgcgtcaacatggcttgcgccacatcgcccgcggactgcgacagcaccacttccacctccggatgcgcctgctggaaaggcacgcgcgccgcttctaaagacgaatcggaattggcctgcacgacgagccgcgtttccggccgctcctccgggtcggtattgacgcgccagattgcttcataattcccgagcagcaaatcgccatctagcgtgaacgctccgctatccgcataggaaaggggattggccgccacggcaaccgctgcatccgcatccgtacctgcaatgcgcaacagctcgccattggccccgcaatagaaagcgccgttgtacacatcgtagacataaaaatccggatacacatttgcgcccagttccagcacgaacagctcttccacatcgcccgttgccggatccagcacgttcacggggaaacgcactgtatcggtaaaatcgctgaaaaccgccagcagcttgtcttcctgatagggcaaaagaccgcgcacatcatcgtcgattgcctgcaattccacgctgcccgccgccggatcgaagcaaatcagctgcatgccgttcaccatatattccatgctgtacagcttatcgcccgactggatcatctggctgggcaagctgaagtacacaaagcccccttcgtcctgcaccaacgcctcgccatccatgggcagggccagctccaggcttaccgtgcccgcctcctcatcgaagtttagcgcgtgcaggccaaaatcccggatttccacattgctctgatcctcggtataaatcgcgcccgcagccagcacgtaaaacgtgccttcccagcagaaaatgccaccgatattgaaatagctgttctcgctatcctcgcccaggtcgtaaggctcaatttcccaggcctgcacatcgctgccatcctcgttcatcgtgtaaagatgctcatagcccagggcgtaaatttggccctgttgtggatcgtaggcaaagcccatcaggctatctgccgagtccgccggcagggcaaacagcggcacagagccgctggccgccatggccggaatgcccatggccagcaggcacagggcgagtatccaggcgatcgtctttttcatggtttcacgtccttttctgcgaatttgggcttttgcggcgccgcgttccggcttccttcgcgcggccaagcccacagaaaaaaatccatcgaacactacttagacgcccggaatgggatttggttccattccgggcatggcatccctataaaaatcctactcttccgccgggccgctatccgccgccgcatcgctcgcctgcacggcgctatcgtgcccgtcgatggtgtacacgagcactgtcatgcccaggcgcacggattcatccggcgtaaaatcgacatacgccgtgtacatgggcgcgccttccgcctcgggatcggccacgttgtaggaaatctccgagatggtgccttccatgcggtgctcctggttgatgtcccaattgaattcaatgcccaccttcatgccgggcacgacataggccagatccgcctcagacacggcgatttcgatgcgcatggaatcgctgggataataggtgatcagcttgccgcccttttccacgctcgcgcccatgcccgcgtccacggcggtgacgatgccggaggcttccgagcggatttcgttcccgggcgcgtacaggccgtccagcgtgccgctcacgctctcaaacagcagttgtccgcgctcgacggtgtcccccgtctgaacgtgcatcttcaaaatgctgcccgtgcccttcaccgctaccgcggccgtgctctccacggtgccgcggccaatgcgggatttgctgtcgtaatccggcttgcggtagatggtcacggtttcttccaggtagaactcgcccgccgtcacctcgacggtgtagctgctgttttccaccttggtcacaactcccacgccctggtgcgtgccatcggacgtacaggaaaggtataccacctcgccggtgtggatcacccggttctggttggaattgtatgccttgctggtgtcggcagaaatcgtgtatttgtgcagcggctcgatgaacagcaccgcgccatagcgctcggtaacgctttccgtattgtcgcctggctggccaaacacgcccgccactctgccttccaccggggcgaattccttggtggtggcgagcttcgcgatcagatcgccctgttcgatccgctcgcccacgctcaccgccatttcctccacgatgccgccatagggcgcgagcaccgatagcgtctcgcccccggccaccttgccttcaaaatacagctccgccgcctgtgcgccgggcgcgcccagcagggcgagcgcgagcgccagggccattatggttcgaacgcttcgaatctgccgcatgggatttccccctttcggttggtcattgcagcgtttgcttgagcaggttgtaggccttcagcacctcgtccatcttatccgcgctggccagcaacacatcgtaatagtacatgggctgcttttcgtcgtccgtcatctgatacgtctcttcacccacgttcacggacaactccatgctgcagggcgcttcttcctcgcccgtcacgatcatgcgcagcgtgtactcgaattccttcgtggccacgccgttcatcttcatgcgcgtgtacaccgtgccgcccgtgaagccttccgtgggcagggcggtcatgtaatcgcccgcctgcaggcccaaatactcgatgccggaattggccagttgccggtacacctcgccattgaacttccattcatacacgcacgcgccgctgttcgggtcgtatgccttttcggcggtgaggatcagcgcgttcggcgcggggccaaccgtggcgtcatgcttgggatcggtcttttctttatccgcgtccttcttttcctcttccgccggtttttccgcggcgggcgcggcttcttccatgcccaggcggctgaattcgcccacaaacgcgtcgtccgtagcgaaccagaaatcctctgtcgtgctgccgcccaccacattgagcgtgaggggcagttcctgttcgcccatggtcaaaacgtgcatgggcgtatccggcagtttcaattccacgccattgtaggccgcaagagtttcgtcctcgtcagcgggcacgtggtcaatgccaccgccgccaccgccgccaccgccgccatgcggcggttcgggcgtgggttccgcctcttccgggaaaacgtattcttccgcattggaagaaatgttgcccgccatatcgcgcgccagcaccgtgcccacggccaacaccgaacccggttcgcccgcgtagagatagaccggctcgccattcgtttccacccacgtttcgccgccatccacggagaagcccgcgatgccgctgagcgcgtccgtagcggcgatcaggcaggtaccgggcgcgtcgggataatccaaaaggcccaccgcctggggcggcgtgaaatccaggctcaccgaataggcctgcgagcgggtaacttcccagccctcttcatccaaaatcaggaaatacagcgtggccgtgccttcttgctcgaaggtatatgtgccgttcgggatcgtttcataggtttcgccgttgatgcaggccgcataggtgtagcccgagccttccggaatgccggaaagctggaacaccggcgcgacgttgctccatccgctcgccacatagttttcgctcgtcacgttcagcaccgcggcgggcggcggccaactgccttcctcgcccacccagacgtacacggtttcgcccaccggcgcgtctgggtcgtactcttcgcgcggatccgagctggaaatcagcaccacgccgccggagaacatgccgtcgtccggccggatgtcaaacgcttccagttgctccacggtgtacccttcgatttccaacacgcggggcgtttgcaaatagatcacggagcccggcgcggcctgcttcagcacgtcttccagcgagccgacgatgaacttggtttccccttccgccgcgttcgggtccttcatccaggcgtcctcgggcaggggccaggtgcccttgcgccccacccatacatagacgtccgcggaattggaggccgtgcgcatcaattcccacgtcttgggcaacacgtccgcctgcgggtcttcggcagaaatgaaaaccgtgtagctgtccgaatacagactggggtcgggttgcaaatggtacgactccagctgctccacagaatagccgctgagcttgatgacatccttggtggaaaggtaaatggtatagctgccatatgtacccagcaaatccgccagatcgccgcgaacgggttcctcgccacccgcgttgacccaggcctgcgcggcgggcgcttcttcgccaccctcttccggcggctgctcgccgttctcttcgccaccagtctgttctccactcggcggcgtaggctcgccactcggctgcgtaccatcgctcggtggcgtgggttcgccacccggctgcgtaggttcgccacccggctgcgtgggctcgccactcggctgcgtaggttcgccacccggctgcgtaggctcaccgcccggctgtgtgggctcaccgcccggctgcgtgggttcgccacccggctgcgtgggttcgccacccgactgcgtg

SEQ ID NO: 3925 - DNA, 10455 bp, Unknown
  16S sequences of unknown bacteria
tactcgacagccgatattttcacgggctgcattctcgtgtagtcaaagccggagggcatatcctcgcatctgaatactgcgaccgccatgtctcccggattttgcgaaactatacggtagagaacggctgaaacctcggtatcgctatatgtgaacgtcatctcgcaacttgatttttccatgagcggggcggcgtcggattttttcataacgcaggcgacgtaccaacggaaatccttaaccaccgagcctacgcatacaccaccggaataagacgggtcggattcggtcagcgcgataaagtcgtcgtaggtcatgctgtcgaccttgtccgaggaaaaaatctcgccgtagccgtcatattccgagaaataatatcccgtagttccggcgtaaaccgtatcgagacaggcaccgagctgccctctgagagacgctttttcactctcgagctttgcgacgcgtgaactgtagtcgacctgacccgagcgaatgagcttcttattaatgttcacaagaagcgtcgttctcatagacaaggcgtcagagtagtttccgctggtgcagtgctttcgtatggtgaaaatattgtcgaaaatctcgctctcgattcccgcagtcgactgaacggagcggtttgaggagtacgacgaatttccttcaaggagcgtaatctgctcgtctatctccgcaagccggttttcaatgtcaggggacgaaacggaatacacatcggcaattttcgcaccgaccgctattctgccgccgtcatgtatcgcaggcgcgacgcttcccgagcttactcccgaatacagtggagtttccttgcgcatgatgtacgcgtctgaggtgatggtttcggtgatggttttcggaactgcgtcgacaagctcaagctcaggggaaaatatatcgtatatatggtacgcgatatacaccatgagcccgagcgcaagaagccccgacaaaaccgaaacgagccacttctgcaaataggttttatcaaataattcggtaaattttctcatatcacaatatcgtatctgattttactattatagcacacaactcctgccgataaaatacatttcacgattatttacaattatttaaccttgtttagtcttgcttcgccgataagtcttcaagcacaaacagcttctcctgacgtatcacgggaactccgtcaatgatgtctccccgtccgagagctatgaacacgccgcggttatatatgcggacaagctcaccctcggctacattcgccttcacctttttctggaatatgttggctccgccgcgaatcagctttgcgtagtagtccacgacattcacgctttgcagctcagtgaacaggctctcgacaggcttcggcagcttcagtctttcctcaaacgtcatgttgtcaagctcgtccacggtgacggcgtccgcgagagtgaagtttcccgttcttgtccgcacgagagacgacattaccgcgccgcatccgagcttttttccgatatcggcgcacagtgttcttatgtacgttcccttcgagcagacaacgcgcattttgtatgtgtcgtccgaaactttttcgggagtgagagagtatatctcaacctcgcgcgcctctctctccacttctccgccctctctcgcgatatccacgagctttcgcccgcctacctttatcgcggagtacatagggggaacctgcattatctttccgacaaacgagcggcagacctcaagcacctctttctccggcgggatgttgtcgcttgtcgtgaggacctcaccggttatgtcttcggtgtccgtcgtcagtccgagcttcatctcagcgacgtactccttgtcgtgcatcatgaggtagtccgacgctttcacggctcgtcctatcagtacgggaagcacaccggtagccatcgggtcaagtgtgcctgtgtgacctacctgacgcgtatcgaacagctttctgcatgacgagattatcttatgcgacgttacgccttcgtgcttgttgattattaaaactcccgaaacgagagcaggattgctttttgacatagttttaccttgcttctttttcagcggcgtatttttcgacagcctcgccgaacgcctttgtcatcatatcaagagcttcctcgggagaatccgcttcgattgtgcatccggctgctctgacgtgtcctccgcctccgtgagccgcacagacagccgcacagtctatctcagcgttcgcgcgtgaagacaccttatagaaccgtctgtcctccgagagctgtctcagggatattccgacgagaactccctcaactccgcgcggagtatcgacaacgtttccgatatcgttttccgtaagtcccgcttcctcgagcatatcctgagtgaacagaaccgctccgagctttccgtcgttatagaagcggaggttttgtatcgcaagcatctgtgcggtaagctctttcagtgttctttgaccgaacagtgagcggcacaaatccgaggtatccattccgccgtcgtttgccgagtttatctcttcaagaagctccgcggctatgaggtgggtcttttttgtggtattcgagaacttgaagctgcccgtatcggagactatcgcggcatacatttttctcgcggcgtcgggtacggagcttagtttcccaatgcttttgaggtacgcgtacatctcgtagactatctcgcccgccgcggaagcacatgggtcaatgtagtttttcgcaaaaggttcgcccattccgtggtggtctatcataaggcttatctgcgggatgaggaacgcgtttttgtcaagctgaatgggggaagccacgtcgacggatatgattctgtcaaagcgggagaggctttcctcatcggtctcggacatatgcggcacttctccgtcttcggggcagtcttcaccggtatgacatgacaggaatttcagtctcttcggcataacgctcggatttgcaacggacgcgtcctttccgagagcaagtatgatatctctcagcgcgaaagccgagcctatgcagtcgccgtcgggattcacatgggtgaggatgagagtgttctccgccttgtcaagcgaatcggcagcttcctcgagcgtcacagtctcatatacttgctcttcggtcattatctcgggggaattattcatcttcttcctccgcgtcctcgtcatttgcgtcgcttgtcggctgaatctgcttcagtatcgccgcaatctccgcaccgtgctttactccctcatccttgacgaaagttatctcgggagtgattctgaggttcagtctttccgcaagtcttgagcgaatgaacggagttgcggatttcagtccctttctcagctctttatcgtcgcattcaccgtacacggaatagtacaccttggcgaatttgaggtcagccgaaacgtcggagctcattaccgttatcatttctccgcttactctcgggtctttgatgtctctgagtatctgcgcgcactcttcagtaaaagcggcgttgattttgttttttctgtattttgccatatctatccttttctataattcattgctgttgaagccaatctggcaggaattcgctgtccatgacgtttgtgacaaaagctcttgcgtcggctgccgacatataatatccagatatctgcactccgtgacgagccgccatgtcatccgtatagttttcgaggaaatacagatgcgtgtcgtaccagtccatgccgtagtagaacacagtcggagtaaagctcggctccgctatttcaagagaaccgtttccgtctccccttatatggaacgagaggaagccgcccacctgattcacgggtcttgccatgccgctgacgaagtttccgagggagtatatgcacagcgtttttccgccgccgtccctctcgatccactcaatcggctgtagggtgtgagagtgatgtccgagtatcacgtcagctcccgcgtttgctatgagttttgcaagtctgtactgctcggagttcggcgtttgcgtgttctcgtctccccagtgcatcgaaactatcagaatatcgcagatttcgcgcgctttttccatgtcggagagtatctgcgcgtcgtcgatatacggtatcaccacatcggaggaagagcttttcactattccgtttgtcgagagagtgtagctgaggaacgccatcttcactccgtccttctcaagcgtgcggatgtttgacgcgtcttcttcgttcaggtatccgccgaggagcaaaacgggctgttcgttccagaagtttattgtggactcaagacctgacgcgcccttgtcgagcatatggttgttcgcgatgttcacgatatcaaatccgagcgtcaccatgtcaagtccgagctgtctcggcgcgttgaagcagggataacccgagtagccgtattcctcgcctgccatgaccgtctcctgattgatgaaggcaatgtcagcggaagcaatgtaatctgcgacgtcggcatacatcggaagaaagtcgtactgcttttcgctatttcctctgtagtatgcgtcggtgtaaatgttcgggtggatgaggttatcacccgccgcgataaagctgatgtccactccggcatacgggtcttcaagagcagtggtttcaagagactccgcagtttcgtctgattcggcttccttctgcgtttcgtcggtgaaatccttcgaggacgcatattcgccgccttgtgactgtgagggttcgtcatttttcgctctttccctcgtctcgtagtccggaagcgtaatcttttcgcctgattctctgaggctgagggcgcacgaggaaaagactgtcgacaacaggcagatacacgcggcaagcacggctgtttttgtggtataacgtcctctcattttcccgctccttagaattacaattatacaatttatattgtaccacaaaacggaagaaaatacaagagcaaacagtcatgtgatgtatatacatactatgataagttaaattttttcccatcggttgcgcgcatgggggaaatatggtataattatgctgtataattgtagatacgtcacgaggtactataatggtaaaaataatgcatacgggggatatccacctcgacagcccgttttcctcactcacttcacgtcaggctgaggtaaggcggaacgagctgagagcggctttcacctctatgatgacatacgcgaaaatgaacaacaccgatctgcttcttatcgcgggagacgtttttgacgcggaatatgtgacaagagagactgtttccctgctctgccgcgagtttgagaattacaaaaagccggtgttcatctctcccggaaaccatgacccggcaagcgaaaaaagcatatggatgcgcgatatttttccgccgaacgtccatgttttcaaagcagaagagccggagcgcgtgtctctttcatccgttcccgttgatgtttacggcttcggcttcacttcccgcgagatgacggctgttccggttcgctcacgcaatgtcgaggacaaggagaggattaacatacttctctgccacgccgacatgacaagcagaacaagcacgacctgcccgctgactcccgaggatatagacgcgttcggagcagactacaccgcgctcggtcacatacacaatgtttcatcggcagaaacgggtcacgacggtcgatggtgctactgcggatgccttgaaggacgctcatttgacgaaacaggaccaaaaggcgcgtgcatagttcagataaacaaggtaggagaagagtccgacataacgataaagcgcgtgcgtttctccaagagaaaatacgaaaagtgtgagcttgacataacgggagcttcgtcaaactccgacatttccgcgatgatagaagactgtattgcttcacgcaggtacggagacgacacgcttctctcgctatctctgacgggaaagctgtctccggagcttattgtagacacggaaggtttgtcgtcgcgctcatacggactgtttatgctgaaagtgaacgacgagacctcgcttttgcttgacgaggaaacgctgtcgcgggatctctcgataaagggtgagatataccgtatactcatgccgaagctgaattccgatgatgcaagagaacgtgaagttgcaagccgtgcgctgagatacgctctgtccgctctttccggcgagaatattttataaaaggtcgtcaaaatgtatataaaatcacttcatatcatatccttcggagggcttagaaaccgcgatattgagctgacacccggtgtgaacatactctgcggcgaaaacgagtccggcaaaacctccgcggctatgtttatcaaatttatcttctacggactcggctccaagtcgcagaaaggttcatcctccgagcggcagaggttcgtcaaccgagataccatgcaggcgtcgggctttatgatagtcgaaacagattcgcgcacctcgtacaggcttgagcggacgctgatactatccgacaactcccccgcacgcgaaaaggtgagaataatcaaccttacaaccggagaaaccgtaagctcacaggagccgggtgaatacttcttcggagtgccggaagatattttcgtctcgacctgctttgtgtcacagtcggcgtcgctgaagcctgagaactccaagctcgacggtgtgctctcaacctcggataagaacgagaatctgctcctctcgggcgacgaaagcatagacgtgaagcgcggactgaaaaagctgaacgacctcagacgtgagctttgccacaagaacggaggcggcggcgagattacagaacttcgtgaaaaacgcgcgtcacttgcggctgagcttgaaaaaaccgccgaacgctcccatgagataatcgcggcgggaatctcccttgacgacataaaccagaggctttccgagcttgaagcggctcacgacagatatgcggctctgttctcttcccttgacaaaatcgtagtcaaaaggaggcttgacgcactggagcaggcaaagcaaaagctcggtgcggtaaaaagccagctctcggagatagaatcaaagctgccgccggaaacggatgccgcactagattcagctgagcacgacataagagcatacgacgagcttatagtagcgtatgacgaagaattctccgattttgacgacgcagacgacaatgaagccgacgacgaaagtcccattctgccggaggacgccgaggacgacattgaggaagcaaacgccctctacgccgactcacgcacaaagctcgccctgtcgatagccatgatgatcggcggtgttctcggacttgccgcgttcttcatcctctacttcttcaacacagacatttactcaattccgctcattatcaccatcgcgcttgttaccctcggaatcgtgttcatcgcgaagtacatatcggtaaaaaatcagcttgccgcactccttgacaaatgggacgcggaatccatagacgagtttgaaaccgcggtgactgacaagctgaacaagttctacaatcagaaggactttgaggaagaaaagaaagaccgcaccgaaaacgccgacaccgcaaagctgaaatttgacgcggctcagtcatacgttctctcccttgcggattcgctcatgttagagcacggggacagcatttacgatacgattgacgcgataaaggcagtctcagccgacgcgaaaaagaaaaaaagcgagcttacacttcttgcggaaaagctgagcggcagagtcgacaccttgagcgagcttaccgaaggcgttgacgttcatgcggcggagcttgaagcacagaaggttctctcaacggaaatcggcaaaacggcggctgcgatagactcggaaaagctgaaagaagccacacgtgaacgcgactttaccgaaaacgcactgaaatccgcccagaagagaaaatccgcactggaagaaaagctgctttcactcggcaagctcagccacacgcccgacgaataccgctccatgattaactcaatcgacgacacaattgaagagcttacactccgccacgacgcctgtgagcttgcaatgagcgcgataacggaagccggagaaaatatgcgcaccggaatcaacgtaaggcttgccgaatctgcctccgagcttatccgcagctgcactccgcacgacagtgttgcgcttgacgcctcgctgaatccttcgcttgaatcgggaagcaggcatcttacctccgacattctctcgcgcggaacggctgacataacatacctcggcataagaaacgcgctttgcggcgaaatgttcccgtccgagcgtcctgtgactgtatttgacgaatgcttcgcgcacatcgacataaaccgcacaaagaatttcttcagagcgctctctggcggacagtatctgattctcacctgccgtgaggacgaaacaaacgccgcgcgctcactcggaatcagcataatcgaaatgtaacgaaaggagactttaccatggcactttcggagaaaaaatacgtactcgcactggaccagggaacgacatcgagccgcgcgatactttttgacagacacgggcatatcaaaggctcggtcgctcgtgaatttccgcagatttacccgcgtgagggatgggtcgagcatgatcccaccgacatctggtcgactacatacggatgcatgatggaagttatcgccaaatccggcattcacgagagcgaaatttcatccatcggaatcacaaatcagcgtgaaaccacagttctctggaatcgcgagacgggagctccactgatgaacgcaatcgtctggcaatgcaggagaagcgcgggaatcatcgaagccctgaccgacagcgaacgctccattataaaagaaaaaacgggacttatccccgacgcgtacttctcggcaggaaagataaagtgggtattcgacaacgtagacggcgcgcgagaactggcggaaaacggaaaactcgcgttcggcactgtcgactcgtggcttatttacaagctgaccggcgagcacgcaaccgacaggacaaacgcctcgcgaacaatgctgtacaacataaacacactacagtgggacagcgagctttgcgatatgttcggcgtgcctatgtcaatgctcccgacagtcaaatcctcgtccgagctttacggatacgcgcaggtcggaagcgaaaagataccggtttgcggagttgcgggagaccagcaggcggcgttgttcgggcagacctgtttcagcgcgggtcaggctaaaaacacgtacggaacgggatgcttcctgctgatgaacacgggagagaagcgaatcgagagcaaaaatggacttcttacgacaatcgccgctacttgttcgggtgagaatgtacaatatgctctcgagggaagcgtgttctccggcggatctgtgatacagtggctgcgcgacgagatgagattcttcaccgagagccgtgacgccgaatattatgcttcaaaagtgacagacagcggcggagtatatctcgttcccgcgtttaccggactcggcgcaccgtactgggatatgcacgcgagagcttcactgacgggaatgacgcgtggtacaaaacgtgaacacatcattcgtgccgcggaggaatccattgcgtatcagtcagcggatcttctctcggcgatggaaaacgatatcggcacttgtatttcttccctcaaagtagacggaggagcgacgcgggacaatttcctcatgcagtttcaggcagatattctcggcaaggacgtgctaagaccgacggttcgcgaaacaacagctctcggagcagcatacctcgcaggactttcatcgggattctggtcgtcgcgtgatgagcttttgacggaaaacgaaatcgagcgtacgtttgagccctctgtaaccgaagaaaagcgcgccgagcttcttcacggatggcatgaagcggtaaagagaacgctcacaatagaataaaaaacagccggattttgatatgctccgaggattaaaggtgcatatcatcattcggctgaacttttgcgaaaaacaaccggactctggcttttgacctttgtccggctgtttttatgaggtaaattgtatgattttcagattagtcgaaacttatcttctcttcttggagatagcatagcctgctgcggaaactgctgctgcaaccgctgcgataacgcctgcgtcgaatgtcttcggagcttctgttgttgtagcgggagcttctactgtttcttctgttgcggttgtttcagccgcttctgtttcgggagctgttgtctcttctacaggtgcttctgtttcagtagttgtagctgctgcttcacctgctgtgcctgtgaggactacttcggacatctggaatgttccggagagtgcgccttcgctctggaagtaaacatacttaacgccttctacgggagcggaga

SEQ ID NO: 3926 - DNA, 15173 bp, Unknown
  16S sequences of unknown bacteria
tgccgctcgtcatcgagccgacccgcgggctcacggcggtctcgtacacgacggagcaggcgtccgcgcaggtgaagtccgcgatactgctcgcggggctgcaggcacgcggcacgacgacggtgacggagcccgcgcacagccgcgaccacaccgagctgctcctgcccgcattcggcgtgcccgtggccgtgaacgggctttcggcgagcgtcgagggcccagccaggctccacgcgcacgacatgtccgtgccgggcgacccctcctccgcggcgttcatcgccgttgccgcggcgctcgtggaagggtcggatgtgaggatagcggacgtcgcgctcaacgagacgcgcatcggcgcgctgcgcgtgctcgagcgcatgggtgcgcgcatctcgtttggcaaccgccacgacgagggcgccgagcccgtcggggacgtgcgggtgcgctactcccccaccctgcgcgcgacgacggttgccgcggcagagatcgcctcgctcatcgacgagattccggtgcttgcgctcgccgctgccgcagcccagggcgagaccgtgttcgaggaagccggcgagctgcgcgtcaaggaaagcgaccgcttcgcggccatcatcgacatgctgggcgcactcggcgtgcgcgcgtttgccgacggcgacgacctgcacatcgtgggcggcgtggcgcaagcgcccgcatcgctgcagcttcccgtctaccacgaccaccggctcgcgatgacggcccacctgctcgggaagtgctttggcgtagacgtcgccgtggacgaccccgactgcgtctcggtctcgtggccgagcttctacgaggacctcgctgaactcgaatcataagtttccgcagaacgcatgggatgcgtggcagtgccacggttctcgcgcggggggacatgtggggcgcgagaagctagcgcaggtacttgcgacagcgggtgacgacgatgatgcccgcgagggctgtcgtcacgaggatgatcgcgaacgtggggacgtagcttccgcatgcctcggcgagaaacccggggaacgtgtcgccgataaagccgccgaccgcgtagcccacctggaaatcgcgcaccgtgcgggcgcgcgtgctcggcttggagagtttaagcgaccacaccgaaatgcacgtcgatccgagcgacgtgcccagcccgaagaacaccgcggcggcgacagcgaccgtcatgaggtgcaacggcgtcaggcagcacagcgccatcccgatgaccgccgccccgaacacgagcaccgtgccgcgcaccgtgccgaagcggtcgaacgcaatgcccgcccccagcttggacgccgtcaggcagatgccgaacagcgacagcatcgccgcggcaaagccctcgtcgtagccgttggtcgtcatgaggatcgacaggtacgcgagcgcgccgacgcagatggcgccgacgcacgccatcgccacgatgagcagcacgcggtccttacccgaaagcgtcacgccctcgtctgcagaagctccgctggcctgctccttgacgaccttggtcgcgaactccatctgctcctcgccgtgcgcccgcatccccaagtcggagggctggttgcgcacgagcgcgaacacgattgccgccaccgccgtcgcgaacacggcttccatgagaaacgccgccgaaagcgacagcccgtgtatgaccgacaaggcgaccgggggcagcagcatgcccgcaacaccgctgccgacggcggcgatgccgacggccgtgcccaggtgcgtcttgtaccagcgcccggtcaggagcgtggcgcccaccatgccgccgagccgcccgccaaaaacaccggcatgctcgtcgcgaagctgtacaggtagaagcccgccgcggtgagcgcgcagccaagcgtgaccgccaggcggcagtcgagccggttgtagtagcggttcacgacgaacatggcgagcagcgtgacgagcgtgcgcaccgacaggatgagcgacccgcccgaatccccgatatccggcagggcgacgaggtagggctgatacacggaaaacgaggtgctcggcatgccgatgttcacgaacaggaacagaaaacagcatgcggttatgactttgggatagtgctttctcatagtgcgaggggccgcgctgtgcggcccccaaatcatcgccttatctggttgcgtgcctctagtagaccatgcccatggcctcgcggacctcgtcgagcgtttccgccgcgatggcgcgcgcctgcctgttgccctcgtgcagcacgtccttgacgtagtccatatccgccgcgagctcctcgcgacgtgcgcggatcggggcgaggtagctgttgaccgcctcggtgacgaacgccttcagggcaccgccgccgccgttgccgatctctgccgcgatgtcctgctcggtgcggcccgagcacagcgcgccggtggtgagcagcgcggagacgccggggcgtccctcacggtcgaacgtgatgttgcggtcggagtcggtcggggacttcttgatgatcttggccgtctcctcggccgtcatcgaaagcgagatgccgttgtggtagctcttggacatcttgcgcccatcgaggccgggcacctcgatgacatctgacaggatgccttccggctcggggaacaccggcgcgaagcgctcgttgaagcggcgcgcgatggtgcgggtgatctcgatgtgcgggagctggtccttgcccaccggcacgacgttgcccttgcagaacaggatgtcgcacgcctggtgcaccgggtaggtgagcaaaagccccgtgagctggtggccggatgcctcctgctcggccttaaccgtcgggttgcgctcgagctcggactcgctcaccagcgagaggaacggcagcatgagctggttttcctcgggcacggcggaatgcgtgaagatcatcgtcttgttggggtcgatgccgcaggccatgtagtcgatgaccatgttgtagacgttgtcctggatgttttccgtggtgtcgcggtcggtgatgacctggtagtccgcgatgatgatgttggtcttgatgcccatgtcctgcagggcgacgcgacctttgagggtcccgaagtagtggccgaggtggagccggcccgtgggacggtcgcccgtcagcatcgtgtacttgtcgggatgaacggcaaagtccgcgcggatctcgtcgctgcgcttcttcgctacttcgaagctaccttcgttgggcatactctctcaagcctttctctcttgaaaagtgacgcgtctgatagtaccgcgcacctggttcatttccaacagtttctggaaaggcgccaatgcggcaacatcgtgagaaatgacgctgcgcctcgcgcgccgcgacggcgtcagcagcggtaatcccccaggtgctcgggcttgagcccgaagcgctccaggcagacgttgcccggcgtcgagcggaacacgtacgagtggacgttgggcacgacgagctggttgagcgcgtcgggctgcatgccgaaccacacggagaagaacccgcggatgacgccgccgtgggcgatgacggcggtacgcccctcgaactgctcgaggtcgtcggctgccgccgaaaggcgcgcgacgaagtgctccatggtctcgcctcccccgtcgggaggccaggcctcggagcccggcccccacgggaacgggtatcccttctcgatgacctcggagaaggtcttgccctcgagcgggccaaagtcgaactccttgatgcgctcgtcgacgaccaggggcacgccgagtgcctcggcggcgggctcggcgatcttcatgcggcacctgagcagcgggctcgtgacgatgcggtcgggcttccaggcgacaagccccgcgaccgcgcggcgtgactgccgctcgccgacctcggtgatgccctcgtcgagctgccccaagaagtagtcgttcgcgttggcgaaggtctgcgcatggcgcatcagcagcacacgcggaatctcgggtttgcggtccgtggagatggggttttcgctcctccactgagcgttggtgccgtttttcacagcccggttacctccttgagcgccgcgacttcgtctgctgtgagcagacgccacgcccccggctcgaggtccccgagcgaaagcgggccgaacacgtcgcggtgcagcttgatgacgcggtggtgtatggcaaggaacatgcgcttgacctggcgcttcctgccttcgtgaatctggatgctcacccgggcggtgccggcgtgcgaatcgcgcggattgccgccggggcgtccgcccttcgagctctcgaggcgcacggtggcgggctggcacgggccgtcgtcgagcacgatgccgcggcgcagccggtcgagctccctctgtgtcgggaccccttccacgagcgcccggtaggtcttgggaacgtggtgcttggggtgcagcagcgcctgccccatgtcgccgtcggtcgtgaacagcagcaggccggtcgtgtccatgtcgaggcgccctaccgggtacagccccgggtagcggtccgtgggcacgagctgcgccacgcaggggcggccgtgcgggtcgctcatcgtggtgagaaagccagccggcttgttgagcatgaggtagaccgacccgtcttccaggtgcacctcgcgcccgtcgacgcacacgacgtcggccttggggtcgaccttgctgcccagctcggtcgtgaccttgccgttcacggtgacgcgaccggcggtcatgaggtcttcggagccgcggcggctggcgacgccggcgcgcgcgaggaacttctgcaggcgcatgggatagggtggctcgggggttgtcgtcttgttcatcattcgatcgtcgggatgtcttcctcgtcgtcttgctcgtactcgtcgtctgctgcggcgccctctctccaggcagcttgcaggccggcaaaggcgacgtctgccttctcggtgatcgcgctgccgatgatcgcggcaagcgcctcggggtcgtcgtggcgctcgtcgtcgccgcggtcgacctcctcgacgcgcgcactgccgtcggcgttgacgaggcgcacatccagcccgcgctcgccgagctcgtcttcttcgtcgaagctcatctgccggcgctgctcgtccatgccgctcaagcgctcgcggatgtactcgcggctctcctcgtcgggcgcgaagtcctcgagcggcggcaggtccttgacgctcttcaggccgaagcgctcgaggaagctgcgcgtcgtcccgtagaggatcgcgttgcccggggcgtcgtcgcggcccatctcgcgtacgaggcccttctcgacgagcgacgagacgacgccttcggagttgacgccgcggatggcgttgatgcccgcgcgcgtgacgggctgatggtacgcgatgatggcgagcacctcgagacccgcctgcgacaggcgccgcgtgtcccacgagatgacgtagcgctcgattaggtcgtggtaggccgggtgcgagtagaagcgccacccgcccgcgacctcgcgcagctgcatgccgcggttctcgtcggcgtactccgcggcaagctccgttaggacctcgtccatctctaccggggatacctcgaggatagccgcgagcttggccgagctcaccggttcgtccgagacgaacagcagcgcctccgccgcccccatcagttctgcgtgtgcctcgtcacgtgccatatgcgcctactcctgctcctcgggctgcctgttttcagcctcgtcgtctgccgccacctgggtggcctgtccatcgtgccctgccgcgtctgcgtcgtctgcctgcgcgatctcctgctcttcggcgcgcgcgagcgcctcttcggtctcgagcacgaccgcaccgtcttcttgctcgagcgtcgggtcttcgggcatgccccaatcgggaaccgagaagtccgtgatctcgggcgccgaatcctccatcttcaggctgatgtcctcgaacgcatcgtcttgctcgagcgagacgacgccgcgcttgtacagctccagcacggcgaggaacgtcaccaccacgagctccggcgtgggattgtcgcccacgagctggttgaacgtgcgcgacttgcggcgcttcatcgtgcggtagatgccctcgacgtgctgttccatcgagatgggcacagcagcaatgtgctccgcctcgagcaggaacgtgtcgcgacgcgcggccaggtcggcgcagatgacggccagctcgtgcagggtcacgtcctttaaatagtcgggcatgaggttgagaaactgcggctcgagccccgcctggcgcgggtgcatgtggccctcgttctcgagcctgctgcccagtgccgccgccgcgttcttgaactgtttgtagagccgctcgaccaggatgtcgcgcgtctcttctggcgagaggtcggagaactcgtcgtcgagctcgaggtccggggtgccctcgtcgggaacgagcgaagccgccttgatctgcagcagggtcgccgcgaccacgaggaagtcgcttgccacgtcgaggtcgaggtccttcatgtgctcgacctcgtcgaggtactggtctgcgatctgcgcgatggagatggcgccgatgtcgatgcgctggcgcgacacgaggcggagcagcaggtcgaacgggccctcgaacgcctcaactcgtacgcggaatgacactgtgcctgcccttttctcgtgattggactcgcctgtattcgagtccgtattgtagcggtttgccgccgcatccgcgaagccgccgcgtcaaaggcgcgccgcgcgaactcctagcgcggcagcatgaagtgcgcgaggttgcccgccgtcgcgttcaggtacatcccgatgatgtcgacgttcgtgaagtacgggagcacgaggacgagcaagagcaggatgaacatcgagtactgctggaccttgtagtaggtgcgcagcgcgttgtcgcttaggagcggcgcgatgatgacgctgccgtcgagcggcggcagcgggatgaggttgaagaacgcgaggcacaggttgacctggcagaagtacacgccgaagtaccacacgtagatcgccagctcggggatgaccaggtagagatagttgccgagccaggcgataccggctcccaccagcgccatcgcgaggttggagacgggcccgacgagcccgacgatgacctcgcccttgcggacatcggagaagttgttgggattgtacggcacgggcttggcgtaaccgaacatgatgccgaggccgccgctcagcaccgaagtcgcgatgaggatgcccggcaagatgatcgtgccgaacaggtcgacgtgcgccacggggttgagcgtgaggcgccccgcgttcttggccgtgttgtcgccgagcttgtaggccgcatagccgtgtgcgcactcgtgcaggacgatcgcggggatgaacgcgaggaccatgagcgcgatgagcacgacctgctggaacacgttgccgctgatcattgctgagctcctgcctgcttcatctcgtcttcgaccttggcggagagctcgagccattccgcctcgttggcgggcatgcgcaccttgagctcgttgtactcctcgagcgcctcggaaaacttctccttgtcggcgtacaggctctcgtccgccatgagctcgaggagctccttgttgcgcttgtcgtcgcgctccatctgctcttcgagctgggcgatgcgcgcacgctccttcttgagcttgcggtagacgcggttgcgggcctctgcctcggcgcgcttttgctccttgctcttgggagccgagcccttcgtggccgcgcccgtggcaaggcccgagcgcttgcccatcttgttgacgggcaccgcgcccttcgcatcgcgcttggcctcggccttcgcggcgttggcggcgcgcttctcgggcgagtccatggtgtcgtcgcgacgcgacatgcggtggttgacctcttcggccgtcatggtcgggttgccgttgatgtcgacctgccccgacttgtacaggaagtagtcgtaatcgccctggtagtcggtcacctgcccgccgtcgatgtagaggatgcggtcagccacggagcggatgaggtgccggtcgtggctgatgagcacgaccgtcccctggaacgcctgcagcgcctgctcgaggatgtcgaccgagctgatgtcgaggtggttggtgggctcgtccaggcagagcagcggcgtgggctggacgagcatcttggccagcgcgaggcgcgccttctcgccgccggacagcacgctcaccttcttgtcgacgtcgtcgcctttgaacaggaacgcgccgagcagcgtctggacctgcgtgcgcgtccagcccggcgcggcgttgtccagctcctggaacaccgtcttgcgcaggtcgagctcctcgagctgatgctgcgcgaagtacgagacatgcacgtgggtgccgttcacgacattgcccacgtcgggtttggacacgccggcgatcatcttgagcagcgtcgacttgcccgagccgttgggcccgacgagcgcgatcttctgcccgcgccagatggtgaggtcgaggccctcgtagacgtgcttgtcgccgtaggacttcgagacgttttccaggtgcatgacgcaatcgcccgtgcgcttgggctgcgggaagtcgaaatgcactttcttcttctcttcggggatcacgatgcgctggatgcgctcgagcttcttcacccggtcttggacctgctttgccttggtcgccttgtagcggaacttctcgacgaaggcctcgaggtgcgcgatctccttgtcctgcgcctccttcatggcgatgagctgcgcgcggcgctccttgcgctgccgcatgaaggaatcgtagttgcccgtgtagagcttgacctcgccgttgtcgatctctgccacgtggtcgaccatcgcgttcatgaacgcgcggtcgtggctgaccacgagcacggcgccgttgtaggtgcgcaggaagttctcgagccagcgcacgctctcgaggtcgaggtggttggtgggctcgtcgagcaggaggatttccggctgccgcaggagcaacttggacagcgcgatgcgcatctgccagccgcctgagaactcgtcggtgctgcgctccatgtcctcttcgtggaatcccagcccgaacagcacgcggcgcgccttggactcgatgttgtagccgtcgcgcgcctcgtagcgcgtgcggagcctgccgtactcgtcgagcagcgccgaagcggtgctgtggctgctcgactcgagctcctgctcgatttcggccagacgcgctcccatggcggcgacgtcggccacgcttgtcatgacctcgtcgatgaccgagcgccccaccatctcgatggactcctgctcgaggtagcccgggtgcacgcccttgccgtagaagacctgccccgagtcgggagagtcgaggccggcgatgatgttcatgagtgtggtcttgccagcgccgttggggccgacgagggcatagcggtcgtggtcctcgatgcgaaacgtcgcattctggaacaagacgcgtgtgccgaaggatttggtaactctgtctacattcaaaatcatggcgagtattgtacgcgagattgcccaccctgggaacgcgctaattggcaggcgacaacgcccggcttgcactgccgcaaagccgggcgtcacacgcaggcgcggcggcctttctagaagtggtagccgcagctcgacgcggtgagcacgtcgaaggtgtagccctggtcgatgaagtactggatgatctgcggcagggcctcgaccgtggtcgacttggactcgaggtcgtgcatgagcacgcagcagctgttgtcacccgcggcctccttctcgacgttggccacgagctttgcgacggggaggttgttgcccgtcgcgtcgccgttttccacgttccagtcgaagtagtgcagacccgccgcgctgaccgcctgtatcgcgccgtccgcgaccttgccgtcgtaggagttcttgctgccgcccgggaagcggatgacggtgggcttgaagcccagacgctggtcgacctcgcccgcgagcgtctcgagcccctgctcgtaggagctctcggtcgcgtagtccgtcgagtagtcgtgcgtctgggagtgcaggcccacctggttgccgtcgtcccagatcttcttgatggagtcgagatgcgagctcgtgcccaccacgaaccacgtggcgtggacaccgtagcggtcgagaatctcgagaatcttgtcggtgttggccgaaggaccgtcgtcgaaggtgaggtacaccgtcttctggtcgggcttggcgtcgtagccgttgtcgctgtcgctcgtcgccgagcggtccgcctcgcttcgcgtggtggaaagcgccccggcggaggtcctgacggtcgtcacgtccccatcggaagccctgctgccctgactctcgaagccggcttgcccgactgcctgtgcacttgtggacgcaccgtcgtccgagccctggccgggcgcggcaaccgcgacgcgcagcacgacgaccacggcgagcacggcgacgagcgccacgagcgtgaaggcgagcttacgcttggacccctgctgcgcagcgggagtttgccccacggtacgcgagggccgcgggcctgcgccgtagtcggcacgtggcgcgtgcgcctgctcgggacgcctgcgcgcgccgttttgcaaggagcgctcgtgtgcgcggtattcgtggggtcgttcaccagccctgttatttggatgattgctgctgttgcggtccatgtcctggcttccttcgtgttcttggccgtacgccctgtcccgagcggacggcggcgtgaacactaccacccacagcacgccgtggcggtggagatttcgcgattattcgcctgattcgcccaccaccggtatcaatacaatttttgtatttgacacataagcattatgtatttcacatatttctaacaccgggatagcatcacgtaacacgcgagtgcggccgcatgccgccccgtaaccgagaaagacgttaggagcaaacctatgcatatccttggaatgggcaccccagagctgatcatcatcctcgtcgtggcgctgctcatcttcgggccgaagaacctccccaagctcggccaggccatcggcaggagcgtaaaggggctgcgcgacggcatggagggcaccgaggcagacgacgccgacgacgacctttccatgagccgcgttgaccgcgccgcgaagcgcctggcagaagaccaggcacgcgagaaagcggagaaggcagccgccgcccaggccaaggcgtaggcaagagcggagtcggggccgggaatggtctttcgctcaggcgcgcttcgcacgcacgagaggtttcgtccgagcagccggcagctgctcgccgggaaacagcccgatgaagcgcttcgcgagcggcgagaggtagcgtccctcctgccatacgagcgcctggcgcgtcacgaggtccttgcacttcaaggtgcggatgcgaggggaatcctgcgtgaagaacgccgagatgcgctgcgggacgagcgcggtgccgtacccgttgtgcgcccacatcagcgccgtgcgcgcgtcatcggtcgtgcatcccacggtaagccggcaccccgcatcgtcgaacgccttgcgaatgaggcgctcgaagcgacggtagatgaccaccggcacgtcgtcgagctccgcgatgcgaatatcgtccgtaccccgcccctgcgcaccctgcgccccggcatcgccccagctcaccgccaccatgggctcgggttcggagagctttcccgcaaggcccgccatcttgaagggcgtgcggacgatgcccaggtcgacgacgccggccttgagcatgtcgaggacctcgaacgtgttgccctcgtggatggcaaagcgcacgtcgggcgcatcgacggcaaacccgctcgagaacgcgttggggatgagattgctcgacgaggagatggttccgatggaaagcatcccctgcttgccgccgcccacctgctgcacctcgtgctcgacggcgccgaccatgtcgaggatctgcagcgcgcgcttgtagagcagctcgcccgcatccgtgagcgcgacgccgcgcgaattgcgcagcgcgagcttcgtgcccagctcttcttcgagcttggcgagttcgtacgagagcgggggctgggacacgtggagccgctcggcggcagccgtgatctgcccctcttccgcaatcgcgacaaagtactgcagctgcttgatgttcacgtcccccacctttcgcgtacgtgcgccttcgctccttattcctcctgcaattctatacaagctttgaataggacataccggaattaacatgaaaccgagatacggaaaacattccctcgagccctcgcggcagcacgcctgccgccggcacagaagggcgctcgcgatcgcatgcggcgtcctcgccgtcctcgtctgcgcaacgggggcgtttgccgcctacctgggcggcatcgacagctcgcttgcgggccctgcgagcgcgggcgagcagcaggccatcgacgaggcgctcaccgcgaagagcacgatgtcgttcgacgagccgttctacgtcttgctgctcggatcggacgagcgcatcgacaacccgagcatgggcgcacgctccgacacgaacatcctcgtgcgcatcgacgcgcccgcaaagcaggtcacgctcgtctcgatcccgcgcgacaccgccatcaagctggacgggtacggcaccgtcaagttcaactccgccatgacgtaccagggcgtccccggggcgatcaccgccgcgtcaaagctgtgcggcgtcgacatcgcgcattacgccgaggtcgatttcgatgggctgagcagcgtcgtcgacagcatcggcggcgtggacgtggaggtcgacagccgcatcgacgacccgaaggcgggcgacgtcgtgatcgagcccgggatgcagcatctcgacggcgccgcggcgctcgtcttcgcgcggacgcgccactacgtggacggcgactacacgcgtgtccggcaccagcgcgagctgatcagcgcgattgtccagaagatgaggggcatgccgatcacggacctgcttccggcgctgaagacctcggcgtccgccatgcacacggacatgaagctcgccgacctcgtcgcgctcgcacgcgcgatgcagggcaccgaaggcgacttgaccgtctattccgcgacgttgccctccacgaccggcatgattggcagggcatcgtacgtgttcgccgatactgccggcgtgaagcgcatgatggcggcagtcgacgcgggagacgaccccgcgcagaccgcgcaggcgcagacgacgcagccgacacggacgcagcagacggcggcagacgactgacaacggcggctgggtcgagaggagattccgcaaagcaggcatgcgctttgcctgcgtgcgagcagagagagcaacaggggccgagcagacaatacgctgcccgaccccttcttgctgccgtgccctgtagctaccgcgcgctacgcgctacttgctcgcgtacacgatatcgtccttgctgccttcccatgccggcagcgtgaagattcggaatcccttctccttgagcgcctcgacctcggcggcggcatcatcgccgaccttgagcgccccgttggggcaggagtgcacgcagtacggctcctcccctgccgcgatgcgctccgggcacttggtgcagctggggcgccaaatcggcgtccagctcatgtgcaggttgggccaggtgccggcggggcggtcgatgccctcgcccgagccctcggtgcggaccgtgatgcggtactcgtcgtcggggagctcgtttccgaccttgcaggcgagagagcaggtccagcagccggtgcagcgctggaggttcacgagaatcgttgacttacccatcgtatgctcccttctatccctcgaccttgcgcaggtcgcacgcgcagtcccaaatcgtgtcccaagcgccggccatgccgccgatgccgcccgtcgcgaagcccggctggtagccgccgatttcctcgacgcacttgacccagttgagcgcgcggtcgtcgagcgtgtagttggagcccagctcggggatgagctcggagtacatgccctcctcgaacgcctcgtggcgccagccgaaccagcactggaccgttcccggcgggatgacctggtcgagcttcatctcgatgacgacgtggccgcgctcgttgtagatctcgaccttgtcgccgtccttgatgccctcggcctctgcgtcggccgggttcatgcggcccgtcggatgcccgccggacagctcggccatgacggggtcgtccgtgaacatcgactgcatgaagaagcgctggcggccgctgaagaagtggtacttgccctttgccttgccgctggccaggctcatcggcgtaggcgcctcgagcggctcgaggtactgcgcgagctggtctttgaccggcacgagcttttctgcgtagaactccatgcgcatcgacggcgtgtcgaacttgaggcccatgaacgggtcccagttgaccggcggcgtcgcggcgcggaccatcttctccttcttcaggcgctcgtaggtgagcggcggctggatgccggcgatgagtgggtactgagactgcaggcggatggcgatccactcctcgacggtcttgtcgaagtactcgcccaggccgacgcgcttggcaagctcgctgtagacgaaggtcgcgtcgcgcgcctcgccttgcggctcgattgcgggctcctgcagcacgacgtggttgtaggccgcgctggcgacgagctcgtagcgctcgaacggcatgcagtcgggcaggacgtagtcggcgtactggccggtatccgtcatccagatgtcgatgtcgacgatgagctccatctgcgggaagatcttgtccagccacaggccgcggttggggcagttgtggacggggttcccggcgatgacccagaaggccttgatcgggtacggctcctgcgtctggacctgctcgatgaactctgcctgacgcagcatcttgcccttgtagccctcgcggccgttgggcatggtgatggcggagtcgttgaagatgagcggggagcccgcgggcagcatctc

SEQ ID NO: 3927 - DNA, 1946 bp, Unknown
  16S sequences of unknown bacteria
catactccaccggaagccggtactcgcagaggggtggcgtttgaacccctctgtgcgccctccgcgtaggagcagccttcgaccgcagtcgatataataaatcaaaagacgttagtcttttttctttatatctttccgaaagacataagctttcttagaagggtaggcgtagtctaaggtagaaaggataaaaaatcctttcagatctgctttcgggaaagccgttccttcactccgctgacggaaatgtgcgagaataccacattttctccgccgtcagcagaaaccacaataaagctccgcggaaggtcgcttcctgccgaggaagtcaccccgctcttctcagcggacttgagaaacccgcggttcacctcggagtctacgtgcccgtccatgtcgaataccccgattatctcttctccccgtatcagcttgcccgcgcctgcgtgaatgtacatggcagttatccatttaaccttaccggcatgacgaagtacaggaatttttcgctttcgtcctcgttctccggcttctctacatcaagcgaacggctgccgaatacgctctcgtcgggagttgccgtgatgaaatccgaaccgtatgacggctctatcaccacacccatgagcggggatttcagtctaatcctcagcctgtcgcagtcggcgggcgcggcgcggagtgagtcgagcaggaatctgcaattgaagccgatagtcagctcgtttccttccattccgcacggcactttctcgaagacagatcctcccgaggacaccgacgacatcgtgatagtgccatcggctatctcgagcttcacgtgggagcgaccggagccgccgagcttgtcttccgtgacaatggacgctctttcgcacgcgccgaggaactccttacgcgacacgtagagctgggtagtataggtttgcgactgggattcgagaatctttttgtagtcgatgtactcggtatcaataactctggtgaagaagtaaatattgtcgattttgaagaagacgtggcgtctgccgacaatgagcgtgacctcgtcctcggaatcctttaaaagctttgtcagctccgtgaggaatttgccggggatgatcattttcgcgtcgggcaggtcggagcagtctccgtcgtcgagggggcatttagccgcggcaagcttatttccgtcgcatccgacagccgtcatttcgcccgactcgattttgaacagtgcgccgttgaaagcagctctcgcgtcgttctgacccacagccgaaacggtttcgtcgatgagctttttgatgcggtgctgggggatagagtagattttatccccgatgaacataggcatggaggggaattccgcgccgggagtagccgagatctcgaagtcggagtagccgccgctgattttggtatgtcccttatcgtcgatgtcgatggtgacttctccgtcggggagggcgcggactatctggaggacctttacggtatttatgatgaacatacctttttcgtagattttgcactctacacttgtacgaagacctttatcgaggtcgaaagcggagattctgcaaaggtcgtcgcggtcggtatcgtagtcgccgtacttagggttaggcgggcactcgaaaagaagaccgtcgacggcggtgagggtatttttcgtttgagaaattcccgccggaggaataagcgcggcaaggagcttctgcttatcgaaggtaactttcatatgcgtatcctttatttttattacaaaatttttttcttagcaagtttagttttcgccaaagaaagagcgaagcaattttcttttccttagactacgagcgtattctaagaaacttcatgggaatgaagattcactttagattcaagtgagaagaaagtagaaagactgccgtctttcagatttattgtatcgactgcggtcgagggctgctcctacg

SEQ ID NO: 3928 - DNA, 6245 bp, Unknown
  16S sequences of unknown bacteria
cttcaagaagatcaccctggcataatcagaaatcccggggaacggctttgccgcatatcggctgcccaagaacaggcggcgcttctgaaagcctgaagctgctcccgatttccgcacagaaaaaccctcctgtccgattttgattcggacaggagggtttctttattgtatcagaaagggaaggaccgttcttacaggtagccgttttcagccaggagctctgccatcagcaccgcaccgccggcagcgccgcggatggtattgtgggacaggcagacaaacttgtagtcatactggctgtcctcccggaggcgtccgatggatacgcccatgccatgctcctgatcccggttgagccgggtctggggcatgttgtcctcctcgaaataggtcaggaactgcttgggggcagagggcaggttcagacgctggggctctccggcaaattccttccagcggcggagaatctcctccttggaaggcttgtggtcaaagcgtacaaagacagctgccagatgtccatcggtaaccgggacacggatgcactgggttgtgatggacggggaagaagccagcttgatctcatcgccctccacagtaccccagatcttcatgggttccttttcgctcttctcctcctcgccgttgatgaaggggatcacattgtccaccatttcgggccaggtttcaaaggtcttgccggcgccggagatcgcctgataggtgcaggccagtacttcacggacgccgaagtcccgcaggggttccagggcggggacatagctctgaagcgagcagttggacttgactgcgataaagccgcgcttggttcccagacggcggcgctgtgcgtcaataatcttcatgtgatcggcgttgatctccggaataatcatggggacatcgggggtgaagcggtgggcggagttattggagatcaccgggcattcggccttggcatagcgttcctccagggcacggatctcgtccttcttcatatccacggcgcagaacacaaagtccaggccatctgccatcttctccacatcagaggcgtcatacatcaccagatctgccatggaagccggaaccggtgtgggcatagcccagcggttgcccagagcctcccggtaggttttgccggcggagcggggagaggctgccagcttgacaacctcaaaccacggatggtgctccagcagtgaaacgaaccgctgtccgaccatgccagttgctcctactacgcctaccttatattttttcatagaattcagtcctttcagccgaatcaggcaagattttattgaaaagaggccccggttgttctataataaaatagattgggttcattctttttccagattgtgtcctcgaatgggaaacaattgtatttgaatgatatagtatcacccgtttcccgaaaagtcaatgcttttttggagcattcttttttcgccaaacaaaaaactatattctgtatctgtgtgatatacatactttttctaaggagtcctgcaacatgaaaaaatctgatttctggttcgatctgccggaagaactgatcgcccagacccccattgagccccgggatgcgtcccgtgtcatgcttctggataaggagaccggcgccactggtgaatgcgtattccatgacatcatcgaccggctcaatcccggcgatctgctggtgctcaacaattcccgtgttctgccggcacgtctgtatggctaccgggagggaaccggcggtcacatggaattcctgctgctcaagcaggtacagaaggatgtgtgggaagtcatggtccgccccggcaagaaggcacgggaaggcctggtctttgaattcggcgacggacgcctgaaggcagaggtgctctccaccaccgagggcggcaaccgtctggtgcggttccactacgatggggagttctattcgctgctggaggagatcggcaacatgccgctgccgcactacattacagcggagctcaaggacaaggagcgttaccagactgtatattccaaggatctgggttctgcggcggctcccacagcgggtctgcacttcaccaaggagctgctggaacgcattgagcagaagggtgtgggcattgcctatgtgaccctgcatgtgggcctcggcaccttccgtccggtcaagacggaggagatcaccgaccaccagatgcattccgagcactactacatcaccccggaaactgctgaaaagatcaaccgcaccaaggaacagggcggacgggtcattgcggtgggaaccaccagctgccggactctggaatccgctgcggatgagaacggacgcatccatgagtgcagcaatgataccagcatcttcatctatcccggatacaagttcaaggtgctggatggcctgatcaccaacttccatctgcccgaaagcaccctgatcatgctggtgagcgcactggcaggttatgagcataccatggcagcctacaaggaggctgtggagaagaaattccgcttttacagcttcggcgatgcaatgttcattgcagatcagccggatctcaggaggtaagaatgtataaactgatcaagaaacagggaaatgcccggcgcggcgaattccagacggttcacggcacagtccagaccccggcctttatgaatgtcggcacatcggcagccatcaagggcggtatctcgtcctgtgacctcaaagacctcaaatgtcaggtggagctctgcaacacctatcatctgcatctgcgtcccggcgatgatgtgatccgggacctgggcggcctgcacaagttcatgggctgggaccgtcccatcctcaccgacagcggcggattccaggtattctccctgtcctcgctgcgcaagattgaggaggaaggtgtctacttccagtcgcatatcgacggacggcgcatcttcatggggccggaggagagcatgcgcatccagtccaatctggcttccaccattgccatggcctttgatgagtgcatcgagaacccctccacccgggaatacaccgcccgctccattgcccggactgtccgctggctggagcgctgcaagaaggagatgcagcgtctgaattcgctgccggagaccatcaacaagaaccagctgctgttcggcatcaatcagggatcgacctttgaggatctgcgcatcgagcacatgaagcagattgccgacctggatctggacggctatgccattggcggtcttgcggtaggtgaaaccgctgaggagatgtaccatatcatcgaagcagtagaaccctatatgcctgcggacaagatccgctatcttatgggcgtaggtactccggtcaatattctggaagcagtcgccagaggcgtggatctctttgactgcgttatgcccagccggaatgcccgccatggtcatatcttcacctgggatggcgtcatcaacctgatcaatgccaagtatcagcgggatgaccgtcccattgatgagcactgtgactgtccggtctgccggcagcattcccgtgcctatatccgtcatctgctcaaggcaggggagatgctgggcatgcgtctggctgtcatgcacaacctctacttctacaataccctgatggaacgcatccgggaggcactggacaacgatacctttgatgaattttatcagaaatatgtcccgatcctgggccgccgcatctgacagcccagagaattggcgtaaaatcggggattttttcagttctcccttgcaagcagccgtttttttctgtataatatttcttgtatattttttggaggtgcaaatctatgttttccaatctgatgctcactgctgacagctcgagctatacttatctgttcggtcagctcggcgttatgatcgtaatgatcgctgtactctggttcttcctgatccgtccccagaacaagcgggaaaaggaagtttccaagatgcgtgaggctctggaagtaggcgatgaggttattacccgcggcggcattatcggccgtgttgtaaacctcaaggacgactatgtaatgatcgaaaccggcagcgaccgtaccaagatgcggatcgcccgttgggccatcgacatcaacaccaccgctgagaaggaaaagtaagagaatttctcaaaaggtgtactgatatgcatttcggtgtaatatctttatagcggaaaccgatatcgtatcaggaggtcgtcgctttatgatgtctgaaaaacaccctaccggaaaacatctgcctcatcctgtcaagcctgtgctgctctgttctttgatcggcgcggcggccgtagcgcttctgctggctggattttccttcctgctgaccctgcaggatcttccgcattccgcggtggaaccactggctctgctggctggtggtaccggctgtctgctggctggatttctctgtgctaagctccatggacgcagcggtctgctcaccggcgccgcctgcggagtgatggtattcgggattattttcctgaccggatgcctgacaatgggcggggcactgggaccctcagtctggctgaagggattgattttcctgttctgcggcgccattggcggtgttttgggggtgaacacagcccttccggtgaaatagctatttacacaggaatgggttttgtggtataatttagctacactgaaacctatgaacgaaaagaggatataaactatgacacatgttaagactctgaacaaggctaatctcaaggaaagctgcgccaagggcggctgcggcgagtgccaggcttcctgccagtctgcttgcaagacttcctgcaccgttgctaaccagaagtgcgagaaccccaaccgctaaacggttgatctaaactgaacgcagttacagttaagggacagtttctgtcccttaacttttgtccccgaaaaaatataaggagatcaaaatgatacataagtattttcagaacggctattatatcgtcctggatgtaaacagcggtgctgtacatgtagtggatgaactgttctataatatgctggaccatgtttcggaagatctggctgaggagtgcccggaagagattatccgtgccttctcggaccgctggtcggaagaggagatccgttctacctatgctgagatggtttccctcaagaaggagggtcagctgttcagtgcggatgattatgcccagttcgcagatatgatggtttcttcgcccatcaaggcactctgcctgaatatcgcccatgactgcaacctgcgctgcgaatactgcttcgccggcaagggtgactactgccagggccgtatgctcatgactgaggaagtgggcaaggcagccatcgattacctgctgcactattcccagggccgtcacaacctggaagtggacttcttcggcggtgagccgaccatcaactttgatgtagtcaagaaggtggtagagtatgcccgctccaaggagaaggaatacgataagaagttccgctttaccatcaccactaacggcctgctcctcaatgatgatatgatcgatttcatcaacaaggagatgtacaatgtagtctgctccaccgatggacgcaaggaggtcaatgaccgcgtgcgtgcccgtgtggacggcagcggctgctatgatgccattatcccgcacttccaggagctggtccggaagcgtgagaattcggaatatcccgaaaactggcagtattatgtccgcggcaccttcaccaagtacaataaggacttcggcgaagatgtcctgcacatgaactccctgggctttgatcagatttccatcgagccggttgtagctgatcccaagcagccctatgcgctgacctatgaggatctgcctgaggtattcgaggaatatgaccgcctgtccaagatcatgatcgaaaagcagaagtccggcaagggctttaacttctatcacttcatgatcgatctggatcagggtccctgtgccatcaagcgcctgagaggctgcggctgcggcaatgaatatgtagccatcactcccgatggtgatgtatatccctgccatcagttcgttggtcatgaggagtggaagatgggcaatgtattcgatctctccatcaacaaggagatgaaggataacttcgcccgggccactgtatatcacaagcccaagtgccaggactgctgggccaagttctactgcagcggcggctgcaacgccaacaactggcagtatatgggcaatgtactggattccttcgatctcgcct

SEQ ID NO: 3929 - DNA, 5483 bp, Unknown
  16S sequences of unknown bacteria
cgaggagttcacggtcgaacgtgaggggctcgaataccgtttcgtcccctgtgcgctgacgctgccttcacagagcgatggcgttcatcaggcggtcgaacagctgcgggagtggttcgagcacgaagatccctcgtttttggcgctctgtgtcgaaacgctgatgcaggaggcatatttgcggctgccggaggatatagatgaatcagagagtctgatgctcgccgcggcgagagaggacgatcttgactgcttcctccaggagcatgctttgccgccggacgcagattgcgaattattattgaacaggcatgaatgctcattcggataagagatgcaggaggtatgaacatgagttcaaaatgggaattaaaagaaaagtcaacgggtgaactggttgcgactgtcgaaggagaagactggaaacaggcgcagaaaaaggcattcaacaaaatcaagaagaacatcaacattccaggattccgcaaaggtcaggctccggcggcactgattaaaaagcagattcctgcgcagaatatcttaatggatgctgtagaggcagtagcgaacgatgtgctcagtgacggtgtggaagaacacaagctcgtgctggtggaccgccctgaactgcgcatcgatgagatcaacgaggaaaaagtcatcctgaagttcatctgtgcggtcaagcctgaagtcaagcttggcgattacaagggccttccaatcaagaagaaggctacgcgcgtaacgcagaaggacatcgatgcagaggtcgagcgcctgcagcagcgttatgccgatatggtcgttaaagaagaaggcaatgtggagagcggagatacggcagtcatcgattttgaaggattcaaggacggtgtcgctttcgatggcggaaaggctgagtcttatccgctggagatcggttccggcgcattcatccctggcttcgaagatcagctgatcggcatggccaaagaggaaacaaaagacatcaacgtcactttccctgaagactatcaggtcgctgagctggctggccagccggtcgtgttcaaggtgacggtgcacgagatcaagacaaaagtgcttccggaagccaatgatgagctgatcaaggaagcgaagatcaaagatgtggaaacaatggaagattaccgcgcatatgtgaagaagaacctgagcgagcgcaaggatcgcgagaacgaggaaaacttcaccaatgagctgctggagaaggtcgtagccaacgcagaggtggagatcccggatgcgatgatcgagcgtgagacggatgagatggtcagagagatcacacagcgtctgagcgcacagggcttcacgctggagcagtttgcccaggtaaccggacaggatgaggagaagatccgcgctgaggtccgtcaggatgcggagaagaaggtaagggttcgccttgtcctggaggcagtcgctgaggcagagcagttcgagatcagcgatgaggagatcgatgctgagctgaaggccattgccgatcagtacagcatgcagatcgaacaggtgagaaacctgatttcccatgacgcggtttcttatgacttacgtcagcgtaaagcgttggaacttatcaaggaaacagcaggtaagtaagtaaaaaaagacgctcgtgcgtcttttttgccaattgaaaggagcggtcgatatggacaacgagtcaaagacaattgttagggcaccactggtctgcaccagaggcgtcatcgtttttcccaatcaggaggtcatcatcgatgtaggacgcgagagatccatgcgggcggtcgaggatgcccgtcagcagtttgaccgccgggtcgtgctggtctctcagaaggatctgacgatcgaggatccggaagtcagcgatctgtacagcgtaggatcgctttgcgagatccgtcacatccgccgtctggatggttatctgcgcgtgaaattcagaggcctcagccgtgttcagctgcagtcagctgcagatgagggcggatgccagatcgcttccgcgctcatcctgaatgatatcacgcaggatgagatggaagaggtgacgctggtcaggatgatcgcgcgccagttcgaggacatggatgccgtgacggcgcatatgcctaaagagatgatcacggagctggccaagggcgtatctgcacagcagctttctgatcagatcgcacagatgtttccgttctcattggagaagcgtcaggaattcttagagacgctcggcatcaatgatcgtctgacgctggtgctgcaggagatccagaatgagaagcagctcagcgagatcgagaacaagatcaatgaaaaagtaaaagagcgtcttgaagagagccagaaagagtattatctgcgtgagaagatgcgcgccatcaaggaagagctgggagatgtcgcagacacagagaaggatgtggagagcatccgccgcaggcttgcggaagagccgtatccgcagaacatcaaggataaggtgagcgaagagctcgcgcgttatgagatgcttcctgccgcaagcggggagaccggcgtcatcaagacatatatcgactggctgatggcactgccgtggtggcaggagaccaaggacaacgaggaccttcaggctgccagcgacatcctggatgaggatcattacgggctcaagaaggtcaaggagcgcatcctggaatatctggccgtcaagcagatgaccaattcgctcaaggcgccgatcatctgtctggtcggacctccgggcgtcggcaagacctcgcttgccagatcgatcgcacgcgcgcttgaccgcaaattcgtgaagatctcgctgggcggcgtccgtgacgaaagcgagatccgcggccatcgccgcacgtatctgggcagcatgccgggacgcttcatccaggcgatgaagaaggcaggcacgctcaatccggtcttcctgatcgatgagatcgataagatggccagcgattacaagggcgatccggccagcgcgatgctggaggtgctcgatcctgaacagaacgccatgttctccgatcattacatcgaagagccttatgatctgagcaaggtgctgttcatcgcaacggcgaactatctggaaaatattccggccgcgctgcgcgaccgtttggagatcatcgaactgtcgtcctatacggaactggaaaaggtgaatatcgcgaaagagcacctgatccctaagcaggtggcagaaaacgggctgaagccttctcagctgaagctcgatgatgactgcatcctttacctgatccgttattacacgcgggaaagcggtgtccgccagctggagcgtacgatcgcgaccatctgccgcaagacggtgcttgccatcctgaaggataagaagaagagcatcaaggtgtcgaagaagctgatccgcgaatggctgggcaatgaaaaggtcgaatacggcaagcgggaaaagaaggatcaggtcggtacggtgaccggtctggcctatacgtcatttggcggcgatgtcctgcagatcgaagtcaataaattcgaaggaaagggcaagctggtattgaccgggcagcttggcgatgtgatgaaggagagcgcatcgatcgcgctggattacatccgggccaacgccggacgattcaagatcaaaaacgagatctttgagaagatggacatccatatccatgtgccagagggcgcagtgcctaaggatgggccgagcgccggggtgacgatgaccacggcactggtgtcctgcctcagcgatacgccggtcagaagcgatgtggcgatgaccggagaggtcacgctacgcggcaatgtgctgccgatcggcgggctgaaagagaagtcgctcgccgcacaccgcagcggcatctccaccgtcatcatcccgaagggaaatgtcaaggaccttgacgatattccggaatcagtaaaggagtccatggagttcgtgcctgtagagcgtgtgacacaggtgctggacgtggcactggtgcgctgagatgcagtttcagaaggcagagctggtgatctcggcaccggacagccgctcatggccggatacagatcttcctgagatcgtgctggccggccgttcaaatgtcggcaagagcagcttcatcaacgccatgtgcgggcggcgcaagctcgcttatgtgggaaatacgccaggcaagaccaggctgctgaactttttcaacctggatgaccgttacatgttcgtcgatgttccaggctatggatatgccaacatctccaagcagcagctgctgaagttcggggcaatgatggaagagtatttcaatgagcggaaacagaaaaaaggcgcggtcatcctcgtggattcccggcatatgccgagcgaagatgatcatacgatgctggagtatgtccgttattttgaactgcctatcgtgatcgtcgccaccaagacagataaagtgcctaagaccaagctgcagcatcagctatcgctgattcgcaaggatctgcagctgcgtgagaatgaaagactgtttgctttttcttccgcaaacggacaggggatcgatgaggtatgggcatgcctgatcccgatctttgaagggcgatcctgaatatgaacgacagaccgctgtgtggatctgatatccgcagcggtcttttttatgggcataagaaagacaggagcgtctgcccctgttacatgtcgtcgatcggtttctgatagaaccgcccgtaaaagctgttggtccggtaagtgttgatgatgacggcgggatccacctggcgcagacacatcaccacatcatgcacttcataagaggagaccacggtcttgcagatatagacacgcttatgggaataagcgccgtatccttggatgaccgtcatcccatgacggaaatgttcgatgtagtgatcgctaagcagctccgcattgccggtggtcgcctcgatggtgatctgctcatagcgatggtggaacgtcgagatcgtctgtgtggagatgaactggaagacgatggaataggcagcgtgttcccagccgaacatggcgccgaagacgatcaggatgagcacattgaagacaaagacgtaattccatatggatttgtggatgcggttcgagacatacatcgcgatgaagtctgtcccgccggtcgatccatttgccttcagggccagggtgatggccagcccgttgagaaatccgccgaacgcgacgttgaggatgatatcgtccaggatcggctcaaactgcaccgcgctcaataagaaggaagtcaggcagaactgcagcgtgctgtagatcgtgaaccgttttccgaccgagcgataacatgccagcgcgaccgggatgttgagcacgagaatgccgatggatgtcggaaacatgccgccgtaaagctgtgcgatccgatcgagcaggatggccagaccggtgaacccggcagaaagcagattggccggattgatgaatgactgaatgacataagtct

SEQ ID NO: 3930 - DNA, 32759 bp, Unknown
  16S sequences of unknown bacteria
gggatgtatatcagctttcattcttatcacctcgctgtttcgtgtgctttccattcagatgctttcccattataacgctttttttaccctccgtcaactgtttttgcgggaatttgcaaaaaatagttgcaaatttaatgcaaatgcgctatactgatttcaagcaacgtttttgccgaagttttttttgcggcaaaaaacaaggacggaacggttcatgaaagtttggcaattaaattccccccataatttacagcgcgaggaagcgcccgatctggtgcgcggaaaagacgacgtaaaagtcaaagtgaccaaggcgctcctttccgaagcggacgtcgccgtcttttcgggcgcaacgagagtgaaataccccgtcgtccccggaagattcgccatcggtcaggtcacggaagcggaaaaggattcctatctccaaaaaggggacagggtctacctcgcgtccgtcaccgaggacgaatgcgcgcccgacggcatccgcatcgcgggcgaaaccgcctgcggcttttaccgcgatttcgctctcgcggggaccgaggacgcctatgcgctccccgtttccgtttccgacgaggccgctttcctcatcgacgccgtcgccatggcggaacacgtcgtcgacgagctgcatatctccatcggtcagcacgtcctcgtcatggggggcgggctttacggcaacgtgctctgtcagatcctcatctaccaccgcgccgtacccattctcgcggacaacaacgcggaacggctcagcagagcgaaaaagagcgggatttattatacttatcccaatgacgaaacgttgaaggagcatatcctgcaagtgacgggcggaaagctcgcggacgcggcggtgtatctcgccttcgccaataagagcgagccttccacgctcttttcgctcgtcgcgcgcggggcatacgtcgcctattgcgcgcccgtgggaaaaaatctcgccgtcaatctcgaaaacgcgctcaaaaacaatctctccatcaagggcattacggagagcagggaattcgtttccacggcgatcaatatcctcgccaataaggcggtgaatttctcggagttcccctatcggagcttccccgaagaacagctgcccgaaacgctcaaaaagtacgcggcgctcgtggcggagggcggaaacctgcccgaagagatagatattttcaaatttattttctgattgcagaaaggacggcgccaccgaaaaggggcgccgtttgaaaatgccggagccgcaggagggaagtcaggcgccaaacgttataaaaacgcgaggggcgaatccttttcacaacgggttacggcgcccaaggaaagcgggtacaaaacgtcatcgaacggcgcaaagagaagctttttttgcggtcttgtcgtcccttccaagtcaggcataaaacgttccctcttagaagcaggacgaattttccgcgacgcttgttgcgcgcccgccgcgaattgacggcaaagaggtcctttttacagagtaaaacgtatctttcctcaacgcctgctatgcgtccgccgtgaatcggatgcaaaacgccctttcttacggagcgaaatttgccgtcggacgtaccccctcaaagcttctgtctgagagcttcccgaaatcaagaccgtcggcttatcgccgcgcgcttttaaaaaatcgaaatttctctttctcgctgcctatgcggggcgaaaaaaggtcgggtgcgggcgtccgcatatgcggcgcgccgcaagcgcgcctctttcccctctcttccccttttttcggcaatcggccgcaccgcggcagtcaaggactttttatgatcaaatttatcgccaccgacctcgacgggaccttgctcgacgaacacggcgctctgtccgaggagatctttcccttagcccgacgcctttttgaacgcgggattctattcgcgcccgcaagcggcagacaatacgcgaacttaaaaaaattattttttcccgtgtgggaaaaactgctcttcatctgcgaaaacggcgcgctcgtcaagcggggcggcgagatcgtctatttaaatcccattcccgtttctctcgtcaaggacgcgctcgacgctgtgcgcggcgcgggaggtctttttcccattctctgcggagcggaaaacgcttacgtcgaaaacgcggaggagccgttcttttcccgcgcccgagccgcgtatacccgctgcgtgaaggtggacaatctcgatgaatgcatccgcacagagcccgtctgcaaaatttccgtattcgacgagagcggcgccgaaaaccacgccatgcgggtgcttcccgccctcctgaacggagtgaaactcactctgtcgggcgcctattggtgcgacgtttccgccgcgaccgcggacaagggcgaggcggtgaaggaaatacagcgaatgctcgggttttcgcccggggaatgcatggcgttcggggaccacatgaacgacgaggggatgctgcgcgcctgcacccattcccgcgcggtggaaaacgccgttcccgccatcaagaaaatcgcggaagagatcgtgccccgcaatgcggacaagggcgtgttgctcacgatcggaaatctcttgaaaaattttcaaaacgcataaaaaggagaatccaatgtcgaaaatcgatgaaaaaataatgatcgcgtcggatatacacggttcggcgcattggtgcgaaaaactcgtcgccgcctgcgagcgggaaaagtccgagaagcttctgctgctcggagatctcctctatcacggaccgagaaacgaactgcccgacgggtacgcgcccaaaaaggtggcggaactcctcaatccgcttaaagaaaaaatcctctgtgtgcgcggaaactgcgacgcggaagtggatcagatgatgctggaatttcccgtcatggcggattacgcgctgttgttcgccgcgggaaaagtgctgtacgccacgcacgggcacctcttcgacgcggacaatcccccgcccctctccgcgggcgaaatcctcttaaacgggcattttcacgtcccctgccataaagagatcaaaggcggcgttctgtatgcgaattgcggctccgtcgcgctccctaaaaacgatacgccccattcctacctccttttggagaacaacgaactcctttggaaagacctcggcgacgaatgtaaagttttcgaccgcctcaaactgtaatcgtataccgttctgcgtttgaatcgagaaaaatattcgatgttcaagacactccccgaccgcctttgtacggtcgggggattttttgcgttcgtcgctgccctgccccctttgttattttcagaacgcgctttttcgtcggggaatgggagattttgtcgcttttgatatgccccgccgcgcatacgacgaatttcgacgcccgaattttgtcagatgcaccgcggggcatattgtcaaagcaaatttttgacgcttttccgaaaatttttttgaaaatttaagcccccgccgtaaactacggacggaggctattgaaattctctcttttttcctttaaactattctacgattatttttaaagagaaaggagaaaaaagaatggaacgcgaatttcgaaacgttttagcagaatttttaaaagataacggtatatcgcaaacggcttttgcaaaagcaacgggagtcaaacaatcgcaggtagcggaatggttgataggaaaaaattgtcccaattatttcaccttaaagaatatttgccttgcatacgacatttccgccgattactttttgggaatcacagaggattatcgctaaaaacgagtgagggacaccgttacggagtatttaaagaatccgtcttcgaatcctttgcctgccgctttctttccgtttccgctttcgagtatttacagccgcaaaaatcctgacgatacaatccgtatgccgccgacaattccaaagagcgataatacccgccgcgctttttgaagtcggagggcaaaaagcggacgccgtatttttcccccgccgccgcccccgcttcgttcacccattccgcgtttttatagggactcaaagacagcgtcgaacaaaaccacttaaagccgcgttccttcgccgccttcgccgtcttttcaagacgcagacgatagcaaagatagcagcgcgcgccccgttccggctcctgttctaagccctcggcaatctcctcaaacgcctttgcgtcgtgatcgcagtcgagaaagtccgcccagcccgtttccttcaagaggcgtatctgttccgatttgcgctttttatattcctcttctgcgtcgatattgggattataataaaagacggtcactttaaaaacgtccttcaacgcttcgaggcacgccgacgaacagggcgcgcagcagctatgcagcaaaagcggcgtgcctttgggcagaactttgaaaagctccgtcattttcttgtcgtaattttctttcatcgacctattcccgtacctcttttttttatgcccttattatacccttccgctcgggagttgtcaatcggcggaaagccgaaaaattcttttgggaaaatttttccaaaaccattgacaaaacgcgcgaatcgcatataatatagatgatggattttgtccgccgtcgaatgaaacgcgcgaaagcggcacaaactccaatcggaagaaattttcggaggtatcgacatgaaatacgtttgcacagtctgcggatgggaatacgacgaggaacaaggcgttcccgaaaagggaatcgctcccgggactccctgggaaaatgtacccgaagactttgaatgccctctttgcggcgtcggcaaggatatgttcgaggcagaataaggcttcgccttcaaaagcgtccctttcccgtctttaaaaaggcgtccgttgcggcagacgttttcttttgcgaaattttgcaggagatttcaaggcgccgccgcttcgtcgttcgcaaagaacagggcgtcttttctcccatacgggaaaaaatgaatttttcccgcaacaggcgacgggactaaacaacgctttttcaatcgccgcgcgccgaaggcggacgctttcgccgcggacggcaggacggaacaaaattccgttcctttgaggcaggggagagaataccatgcagttttgcgagaattgccgttttgttttcgaagggaatcgctgcccgatatgcgacagcaaaaaaagccgtccggttcaggacgacgacttttgttttttaacggaaaagagcgccgcttactccgcagcactgacggaaattttccgcgaaaacgatataccgtgttccgccttgtcccatacgcgcggcatagaaacgtattttgccctgccgcccgaaaataacagactctatgtgccgtttcattccctcgaaaaagcaaaagctttcctgaggaaaacggagaacgcggaaacggaagcatggagagagtgtttgctgcgaaacgcaggcaatcttcacgcctcgcaaaaatttgaaaagaaagcccgaaaaaaaatcaggctatcggaagacggcgattttttcgggtattttgtcgagattattcagaccgcgaataaaattgccgacgaaggcgcgattacgtcctgcacgaaaggcgggcattatttgttctgtttttccgatacggcaacgatctccgtcaattcggaaacttatgaaattttatctttgacaatccctaaaacaaagcgctgatttttaatcggcgcttttgttttggactctataaaaaaaccgcctgttgcaaagatcgcttttctatatttccctcttttccgtttttctcccgataagtttttataaaagtattgacaattccccgattcggttatataatagcatagcaaagctatataatagggcgcgaaaatgccgacaggcacttttattttgtgtttgcgcattttcgcttccatgatagcggcatacggcagtcacagaacgcatataaaaaatagggagaagttttatgaaaaaatgtaagagctgtgaatttgaaaataaggacgacgcgcgtttttgcgtgaaatgcggcgccgccctcgacaagcgctgttcgggatgcggcaatatcctcgacgaagacgaagtctattgtcccgtttgcggcgcgagaacggacgggaaacgggtctgtccttcctgccgcgccctcaataagccgcagagcgttttctgctccacctgcggtacgcccctcgtccgcatacagccgcccgcgaacaaagcagcgaccaaagcggcgcacgttccgcctccacccgtcgccgccatgcaaaacggcgtacccatggctgcgccgaaggaaaaaggatatgcaaaacaggcggcgcttcggatcctcaatatcgtccgcgccagcgccgttctcgcttttgcgctcctgatgttcatcatgtcctttttcagcgtgcagaagatagaggcgcccgatctgggcgacgatctcaacctcggcggcatcaccgagatcgtcgaggtcaacgtgacgccgatcgacattatcgaaggcagttttgcccgtctggatccgaaaacgcaaaccgaagtcgcaaaagatttcatgaaatacctgctcaacgacctttccgacagggaaaagaaaatcatcaacggcgtcattaacggctcttcttccgcaaactatatggaggcgctcgacctcatcaaaagcaagctggaaagttacaacgtactgaaattcgctgccgtcgaggaagtgacggaatttacgccgtctacgacgttcaatctgtggctcagttccgcatacgcccttctttacataggcgtcgccgccgccttcctcgttctcgccatcctcgattttatcaacacgctgcgaaagaaggaaaaccgcttcaaaccgctgatgacgctgaacgcgctgggcgcagccgctgcgctcggctatgcgtttttgttgaaaatgctttttgaaggaagcatgggtttcggattgacaagcgtgcttgtctttgccctcctctccatgcttttgaatatcggctatcgcatttttgcgggcgatattcactttgaaaaggcaaagcttcccctttatatctccacgggcgtgggcgccgttttctcgctcctgatgctgttctttgcaggctcttccgtcatgaggctgttttgcgaatacacctccggatcgatgtcgaaaagctttcgcggcggatacggcgctttcgatttggcaggcgcctgggacgccttgaaaatctccgccgacgatcccacgattctcggctccgcggcgaaatacattccccaagcgttcatgagctataacggagaacttctaaggattgcgctgtccccctccatgatgggcattttgggggatatgcagatcgaagtcgtcctcaccgttctcggcatcctcatcaacctgatctccgcagcgttcgtcgttacgcttgccctctctttcgtcgaccatattcaggcgatcggaaaagaacggagtgccaagctcgtctacggaatcctcaacgtctgttttgcggtggttctgctggcgcttacgatcgtttatgtagtgctcgtcaacaagacgatggaagtattcgaaaacatcgaatacaccgtcagcgtttcggggcttcttatcgccgccgtcgtcatttccgtcatcgacttggtgcagagaatcgtctgcaagtcgctctcgaacaagaaaacgcccgacccggcgcccgtgccgatcgaaaatcagggattctaagcaagcgcaaaaaatgactgatctatcgaataaaaaaagcagggaaacgcgtttccctgctttttttcaacgaatcggtcttcggcgggcgcaccaagcgccctttttcggcgagcctttcagttttctatgttttcaaatctcacctcgggaaaaaaatatttcaggcgcgtttccatactcggcgtatcatcgacgaacaagtacttcgtttcaaaatccgccctgccccgaaaagcctctgtcccttcgacaaatctgccgtcgtcaaagagcagtacgccttttctatgacattccgtaaaactatgccattgaaaaacgcagtcgttatggatgcggacgatacggcaaagcttttcccttttcatggagcggaattttcttccctttttatacacagcgatttccgcgtctgtgacgacgaggtaatagcgggcgttccgccagaggaataaaattcccgcgctcaatgttgccgccgtcgaaaaagccgttgcgcaaaagaaaacaaccacttcctttttaggagccagagcaaatctcgtccccgtatagattcccattgccgacagaacaacgcccgcgataacgagtaaaacaattccggcggcaaattcctcttcccgcactttacagcgaaaaactatttttccctcgctcatctccgccctctttctcagacatttttgtttaaaggcagcgggcacgatttcaacatccgctttacggcaagcgcctgcgcaatagttttaacgaaagcgccgcgcgttccgctcaggacttactttcaattgacgctgaaccaaagatcggcataggtggggaaaggccaatagtccctcgcgcagagtttttccatttcgtcggcatagccgcggatccgttccatgtcgggaacgacgacgtgcgccattctctgcgaggcttccgtttccccttcgggcatatccgcaaggtcgctttccagcttctgcaccgccgccatcatgttgtcgtttgccgtagccagggttttgatgagcgcttcttcggacgcgcagggaatgcaatcgcagaccgcccttttcgcgccgagattggcgcacaattcgcccacataggcggacacggcgggatagatctgcttctttgccatgtctagcatggtcagcgcttcgatgcggatggtcttgatataattttccagctggatcctggcgcgggcgatcgcctccgacttcgtatagacgccctgattgacgaagacgtcgatgttttcttttttgaaaagttcgggtaccgcgtccgccgtgtttttattgttgagaagccccctgcgttccgcctccggctcccattcgggtccgtagccgttgtagttgaaaatgactcggtaatgagcttttaacagcttttccgtatacgccttgcagtccttttcgaaatttttggatttctccaatttttccgcggcttcggaaaattcctccgcgacaatcgtattcaaaacgatgttgggatccgccacggaagcggaggaaccgagcatacggaactcgaatttattgcccgtgaaagcaaagggcgacgtgcggtttctgtccgtcgaatcgatggggaaaataggcgattcgggaacgccgatggagcctttcacggcggcggaaggcacgtaatccttgccgttgacgatactgtccaccaaagcgcccagctgatctccgagatagacggagatgatggcgggcggcgcttcgtccgcgccgaggcggtgatcgttccccgcggaagcgacgcaggcgcgcagcacgccctgatatttatccaccgcggcgatgacgcaggcgaggacgagcataaagcgggcgttgctttcgggatgatcgcccggctccaaaagattgagtcccgactgcgtggaaagcgaccagttgttgtgtttacccgagccgttgatcccctcgaagggcttttcgtgcagaaggcagacaagaccgtggcgctgcgctacttttttcatgatctccatcgtcagctggttattgtccacggcgatattggtggtgttgaaaacgggcgcaagctcgtgctgggcgggagccacctcgttgtgcttggtcttggcgaggatgccgtaagaccagagcgttttgtccaaatcgtgcatatattcggaaatgcggggcttcaaaacgccgaaataatgatcttcaagctcctgtcctctgggcgcgggagcgccgaacagcgttctgcccgtcagaatcaaatcttcccgttgttcgaacaccgccctgtccacgaggaaatattcctgttcgggtccgaccgtcgtcgacaccttttggcagtcgatgccaaacagtttgagaatacgtttggtggcgcggcctatcgcggtcatcgatttcaaaagcggcgcttttttatccagcgtttcgcccgtataggaaacgaaaacggtgggaatgtagagcgttccctctttgacgaaggcgggagaggtgggatcccaagccgtatagccgcgcgccgcgcaggtggcgcgggagccgcccgaaggaaaggacgacgcgtcgggctccccgacgatcagcgattttcccgtcagctgcatgatgacgccgtcgccgccgcaaggctcgataaagctgtcgtgcttctccgccgtcagattggtgagcggctgaaaccaatgggtgtaatgggtggcgcctttggaaagcgcccagtctttcatggcgtttgccaccgtgtcggctatggacatatcgatgggttcgcccgcgtcgatggtcttgcgcagggatttgtaaacttccttgggaagtgaactccgcatcacgatgtcgttaaagacgttttcgccaaaaatctcgggaatgttcatatgtttgactccttaaaagggtttattgcaaaagaacgtagggacgggacgacgcgtttgggaaatccgacgcttacccgtttcgatcgattacaaaaattatatgaaaagaagccgagaaagtcaaataaattctccccgtttttcaccgaaaacagtttaaaattgtttccgcggacaattactttataaactatcgtttttttcggctttcactttaaaaaacaaacctatgtagccgtaatatatgcttatcggcggtttattacctgtatttaacaagaaacgagcgccgttacttgaaaaaacaaagtttaaaaaattcgcacgaaacagttttttccctcttcgggtcacctcggaagacagattttctcccgccggccgcgagaaaaaacgctcttgaaaaaaggccccgttttgcgttgccctgctcccctttgcatataggaggacgaaagcgaacgatgaaacctcctctcttttcctctcttttcctctcttttccctccgtccctttctaccccctgcctttttccgtccgccattccttcccttcgaaaacttccgaacggaaggaatgacctgccccttttccccgttcgttgcgttcggggcgcgcgcccgccttcgtttaccgctctgcccgctcgggtttcttaccgaaataggcgtatagcccgcattcgagattggcgttacagagttttttctttctgtccgcgctcttgccgaaaaagcgttcgaattccgaaaacgaagtgagcacgtaggcgctccaatcgggaagggcgcggaaagtcctgccgaaatcgcggtaaagactctttacctcctcctcgcctaaaaggcgttcgccgtaaggaggattgcagatcatcacgccgtaaggaacagtgcttttaaaagcgcgcatatccgccacggaaaatacgatatttttttcgacgcccgcccgcttcgcgtgatagcgggcgacagagatcgcttccgcggaaatatccgagccgtaaacgcatacctgcctgccccgtttttctccgtcgcgcgcctcttcccgcgcccgttccaaaattcctttcggagcgcattcccaaaagcagaaatcgaagctgcgattgacgccgggggcaatgtgaagcgccttcatcgccgcctcgacgggcagcgtgccgctgccgcaaaagacgtccgcgaagggcttttcgggatcggcatcgggattataaaaggacagatcgacgagcgccgccgccagcgtttctttgagaggcgccgtgtaggcgagagaacgatacccgcgcttatgcagtccctcccccgaagtatccaatgtcaccgtcgccctgtcccgatacagggaaaagccgaccacggatctggcgccgctctcgctcgccgtgcggcggcccgttttctttttatccatcagacggcggatgatcgcctttttcgccacgccgcccgccgctttcaccgccgccagcgcgctttggacgcttttgccgtccatgaggattttggaatcgacgctcagccaatcctcccaagggatggcgtaaaaattgtcgtataattcgtcgaacgtgcgggcgggaaattcgcgcaatttgataagtaccctttcgccgctgcgcagaaacacgttgaggcgggcgacgtcctgccaatccccttccgtttctatcctgccgttgaaagcgggcgcacgctcgaagccgagcgaaaaaagctggcgcttgacgatttgttccaatcccgccgcgacgggtatcaaaagctgcaagttcttttctttcatgcgttcgtttcttccctgccccgttcgttttcccgctgaatctttttcgcccacgcggaagcgatcttcacctcgtcgtccccgacgtccaccgcgtcctgaatatccatatccagcttttcctgcttcttatagtcggagcagagatatttcttggttttgtagccgaccagcacggtcatgaaagcgctcaccgttccctgtacggcgctgtccacgagggtgtcgaggaagggaatcttgcgcgccagccccgtaaaaaattttccgaacacgttgaaccaattgacgttctgcatcccgtaggcgatcagcgaattgcgcaggaccgcggtgtagacgcggaagagtttggcgtaagaggggcgatagccgtaaacgcccacgatctgcttgaccaaagagaggttgacgagcagcacggagagggcgtcgatcttgtcgctttgagaaatggaagtggtcaaaaacaccttgcccgcgctcttccaaatcagagcgtttgcgcaggaagccacgtccgtggcatacacctgccgcatcgtctttttcagctcgtccttgtccccttcgtcgagcgcggcgtcaattttttcggcgttttccgaagaaaggtatctgaatttataatttctcggattggcatgatattccacgagcgcgcgcgccgtatctttcagggcgcggtaatttctgcggcgcgccatatcgcatttgtccgacgtgatatcggtgatgaaaaaccgcgcgccaagcactttcgcgatcgggcgcaccacgaaaagaaggatgaggagcgccgtcaaagcgaccatcaggtatccgaaaacgcggtttacctcaaaacagagggagagaacgtttgccaaagcgccgatgatcagaatgacgatgatcgccaccgccgccaaaatagcggcgaagaaatttttttcgtttttctgtttgaaggcgtcggacatggaatccgcgaagcccgtggaatcctcctgcgcccgcgccgcatattgcttcgccttgggcgtcgtcaccgtgagagaaacgttttcctccccgttttttttctttttctttctcataggtttgtttccttatcccgtccgacgcgcttgtccccgccggcgtatcgagtgctaccattgtaccacagcgccgcgcaaaaagcaagcgccgccgaagttttgagaaaaaatccaaacccgctcgacaaaaaagaagaattttcctctgtaattcggtttgaattttcgctcgtttggtgtataatgaaatcaggtcgtatcgacgcagaggcggcatcagcctcctttttggaaacgtctgccgctcggcgggaaaagtatactttctctctttttcccttccgcgctcagtaaaagtttctctttgcccatgccctgttttgcgtcggcacaccgcagaaaaggcggcattttttaaaattcgccgtctttcgggagaagccgtttctatgctcgattatacgaaaatggcgatcaagcagacgatatccgacctgaaaaaaacggattatatccgcaacgtcgccacacaaatcatttacataatttatcttatctataccttgatcgtcgggacgggctacctcgccctgaatatcgtgctcctggtgatctccacctcgtatttcgtgttcttcctcaccatgacctcgctcgggaagacccccgaaggcaaaaccgtcaaaaagacgggcacggcggtgtacgtctggtgcaagcggctcatcaagctgtttacgctgggactgaccgtttacggcatctgtaccgccgtggaacacgtttccgccctctccgtcattttggcggcgctgatgattgtcggatggtgtttgcagatcattttcgaggtactcatcaagattttaaccaatcgcgtcaattttattttggaaggattggaagcggatctcgacaatatgttgaagcccgtgcgttcggtgggaaatttctttaaaaaggtgacgggcaaggaagtgacgcctcagaaagaactgacgaaaaatcagctcaaactcaaagagaaagtcgaggcataccgcgccgaacaaaaacggaaaaaggcggaggaaaaaatccgacgcgaagtggaacgcacggcggcgaagcagacggcgaaagaacaaaagcgggagcagaaaaattccgtgcgcatcgaaaccaaattattaagggatgcggacaagcagaaaaaggcggaagaaaaagccgcgcggctcgcggggaaaaacgccgcggaagaagacgcgaagtatcttccttccgccgatgccggggcgaatgcggaaacagccctcgccctctccgacgcgcccgaaacggacgcgcgcaagaagccttccctctttcgacggctcaaagcgaagcttacgggcggagaggaaaacggcgccctgtcccccgacaaagaggtgttcgaagaggaagaaaacgagaacgccgactttgagaatacgaatttttacgagctgggcgaggaggaaagcgcggactttttcgacgaggaacagatcccctttcttttggcagacggcgaaggcgacgaggaggacggcgaggacccggaggaagaaaacggatccgcctttccccaaagcgaagaggacgccaagcggcaggcggcgcttcccgaaaaaaagagcaagcgaacgctctttccctggcggcgcaaaaagggaagctgacgctaaaaataaaaacggacgggaaggcgcgaatgcgtccttcccgtttttgatagaatctccctgcgattttcgcgcggaggatttcccgcctttttcctttccgcatttttcaaaaaccaatgcgtaaggagataagccgcgttttttatttttgccgattttccaaagcccgactcataaggaggcgatagttttccaaaaattcccgtttgcgtttatccgtgagaaatcgacgctgtccgatcccgtacggccattcgacatctccgtttttgaaaatcccatattcctcgtccccgtcgaacagaaattttaacgcctcgaagcgggcgtattcctgcacggaaaaaagattgggagaaacccacattcttttcaatttgggcagggagataaaaggacttatctccccgtcgaacggaatcgtaccgctgagaaccacctcttccaaatcgggcagacaagcgagcggcgcaaaactttccacccgattcggatttatctgcgaagtaatcggacttatctggaaataccgcaaagcacgcgcctcggaaagtccgcttaaatcggtaatattttttccgccctcgatttctaagcattgaaaagagggcgttttcttcatattccacagttttttgacccgcggaggatagagataggccatctccaaatcgtaaaatttttccacacaagtcaaatcctcgaagcggccgcccaaatatacggcttttaagcgcggactgcaacgcccgacaaattcttccagctctttctgatttttcaaatagaccgccacaacggcgacctgcttttcaaaatcgtcggtatattcgcccgaggaaaaatacaacccgcaattttgataaaaattttcgcagcttttacagcgcagacagtattcttcatataaagacgcgccgtccgtcttttgataaaaatactcgtcgcatttcaattcctgacgaatttcgtacctgcatcttttctcgaaatattttttctcgtacttttccgcgagatccatttccaatttttctttcccctttccaacgtttttcctattcagaatttttccaagagtcctttgcagccgcggcaaatgtcccgataggtggcctcgaaatcccgcgtataccacggatcggacacgtccgcgtcgcttcccgcaaaagagagcaattttctgcacttctgtgcgccgccggcgccgagaatgcgttttgcgccccgcaggttgctatcgtccatacagagaaacaaatcgtacttttccgtgtcggacgctttgagctgcaccgcgcgcttgccttcgcacgagatgccgagcgcgtttaacaacgcctttacgggcgggtagacgggattgccgacgccattccaaatttcctccgaggaaaccgcggacgaggccacgaaaaattccttttcccttcccgccttaccaagcatatctttaaagacgaattccgccatcggcgaacggcagatattgccgtgacagacgaacataatcctatacatgggtatctccgatgtcctgatttatctctttcaaacggcttttcgcgcgtcgcttctgcctttgaaaaacgctcattcgcgaaactgatagcggtaaagttcggcatacaaaccgcctttctccaccaattcctcgtgagtgcctctttccgcaatcacgccgtccgtcaccacgagtatctcgtcggcgtttttgacggtggaaagcctgtgcgccactactagcgtcgtcctgcccttggaaagctcggcaagcgaactttggatctgcatttccgtcatgttgtcgagcgcggaagtcgcttcgtccaaaatcagcacgggcggatttttcaaaaaggcgcgggcaatggaaatgcgctgtttctgaccgcccgaaagcttgacgccccgttcccccacttccgtttcgtaaccgccgggaagccccatgacgtaatcgtggatattggcgcgcttggcggcaaggatcatttccgcttccgatttgtcgggggagccgtacatgatattgtcgcggatgctccccgcaaagagaaagacgtcctgggcgacgacggcgatcttgtcccgcagcgtttcgctggaaacgtcgttgatatccgtgccgccgatggaaataacgcctccgtccctaagatagaaacggggcaggagatggcaaatggtcgtctttccgccgcccgaagagccgacgagcgccacggtttccccctttttgacggtgaaggaaatgcctttcagcaccgccgtgtcctccccctgtcgatttttatagccgaacgtcacgtcgtcgaagacgatatcgccgtcgagagcggtttcgacgggacgttcgggttgatactcggaaggcatatccatcaactcgcagaagcgcttgaagcccgtcatgccgtcctggatctgttcaaacagcgtcaccaaggtgcgcaagggagtcaaaagcatggtgatatagagaatatacgccgtaaagtccgcgcccgtgacgacgtcgaaatagaacagcaatccgcccgaaacgagagccagcagatacaaaaagtcgttgaacgcagacatacccccctgaaacattcccatcgcgcgataggattccgcgcgcgcttttttaaatctgccgttgacgacgtcaaactttttctcttccgtgttttcggcgttgtaagccttcgtgatgcgcacgcccgaaacggaagactcgatttcggcgttgatttccgccaccttctttctcgattcctcgaacgctttgttcatgcgcccgcgcgccttgatcgcaaaaaacagcataaagggaatgtaacagagcacgatgagcgccagccagccgttgatggtgcagagcatgatcagcgcgccgacgatggaaataaaagaattgaaaacgtcctcgggtccgtgatgcgccagctcggaaacctcgaaaaggtcgttgatgatgcgggacatgatgcctcccgtcttgttctcgtcgaaaaaggaaaagggctgcgtttcgatatgtcggaacaaatcccgccgcatatccccttgaatgcgaacgcctaagacgtgcccccaatatccgacgatgaaagtaagcacgctcttcaccgcgtaaatagccgccaaaacgatcgcccagacgatcagcagccgcagattctgattggggacgtaatcgttcatgatattccgcgcgatcatgggataaaacagattgcagacggaaatcgtaaacgaacagatcaaatctacgataaacagccgccgatgcggccgataataggaaaaaaatctcctgatcagcttcataaccagctatgcctcctactctataaaaactccgacccaaacggcgcggcgtcccgacgttctcccttcaagacgcgccgcgtttttaaggggaactcttgggcgaaacatctttaacgcgcttgtccgccgcttgtccgccaaaaaaagaagagccgcgcccgtaaaaaaggcaaacgttatgcgcctatccgaaaaaacgcccttttctccgcgattgccgacgacttttcgcgcgaaaaaggattgatcggccgcgttttatgcctatctttcgtccgccaaacggacgctctttgcggcgttcccgcctgaaagaaagctctttttcattctttcgtcttccgttcccgcaaaccgccgcaatcctttaaagaggaagccgttttcaaagaacgcctccctttcccgatttgggtctttcgatttataatattgaattttcccctatattctatcataaatacgcataaaacgcaaccaaaacgacgggaaagcgcgacaaaaaagcgaaccgtatcccctatgagcacaaggagaaaacgcccgctttttcgtcaatgaaatagagttatataaatcggtaacgtatgaacataagaatcagggtttccgccggcgcaagcttaaaaagcggcgccgcttacaaagaaacggaacggaagggttttcgcccttcctcccgcccgtgaaatttcttttcgggaaggaacggaaacggtcggtttatttattcggcttagaaggcttttttgccttacgggaagcgcacgcgccggaatgcggacaggaagaacagccgcagtcacagcccgacgatttgccttgttttttacggataatcgcgcatacgatcaccgtcgccacgatggcgaccgccgcaattacgatgatgatttcgatgggtttcatgacctcctcccgatagaagaatgccgagtgcaagaaaaattttttccgaccgaataagccgcgaaacaattttgacgttttttccgctgccgcggcggggaaatgctgtctttacacaggcgatgaagaatttgaagcgcgttttatctttccgccgccgtttgccccgcaaaaaccaatgcggcggacaaaaatcgataggaaacgctttttaaaaactgaacgtttaaagcgacgaaagaatccgagccgcacttttgcgttttcaaaaagtttacgggataagcgccccgaaaacaggcgttccgcttactttccgcttctttcaaaaacaatttatcaagcgaatccgacaaaattttccaaagctttttcccttcgtctttcggtcgcgttttttatgcgccaaaggcgcccgcgctttcctttcagttccgggcatccgacaagcgcggacgtccggagccgaatttttgaaagtttcagtccctttcaggaaagccgaaaggaagagttttgagaggaaggggaaagctttatcaagccgcctgcgcctttgcgtccgaatcggctttcaaagcgacctttttgtcggatttatttttgagcacgatgatcgccgtgacgatcgcggcagccgccagccagaggaacgccgtccaccaccagctgccgatggtgtataccgccgccgagatggcgtaggaagaaaccatccagaagagaatcgtccacttcaattttcctgcgggcagttcggcttttgccgtcgccaccgccgcgaagcagggaatcgtcgtcatattgaacgcgatgaaggaaagcagcgcgggaacggtgatacccgtagcctgaatcatcgccaccgcttcgaggacgccgtcttcgctggcttccccgccctctatcagcgcaaggatttcctgtaaagtttcttcgggaagtcccgcgagcgcgccgtttccggcagccgccacgatacagcaggcgagcgtgaagaaggtggcgatgacgttttccttggcgataagccccgtcaccgccgccaccgcgaacacccagccgaacgcagacaattgcgaaccgaagccgagcggcgtgaaaatgggttgaatgagtttgcccaaagaggcgagaatggaactgtccatatcgtcgccgatataatgccaatcccagccgaatttggacaggaaccagatgacgatggtagaagcgagaataatcgtaaacgccttcttgacgaaatgttttactttatcccacaagtgcagcatcagattgcgcaatctcggcgcgtgataggctggaagctccatgatgaaaggaggcgtttctcctttcatcgtcgtgctgcgcatcactaaaagacaaacgacagccgccgccatgcccaagacgtacatggaataggtgatggcgtccgcgttgccgacgccgaatttcgtgacgataccgcccgcgatagccgtcagaatgggcagcttcgcgccgcaggagaaaaagggaatgacgcggatggtggcagtccgttctttctcgtcggacagggtgcgggtattgatcatggcgggcacgctgcatccgaagcccatgatcatgggcataaacgctcttcccgaaacgccgaagcgacggaaaattctgtcgagaatgaacgccacgcgcgccatgtatccgctgtcttccaaaacggagaagaagaggaaaagaacgaggatctgcggcaggaaggaaagcacggagaacaagccgcccaacacgccgtcgcagacaaagctgaccgcccaggcgctggcgttcgccgcttccatgccctgccccgccagctccgtgagcgtatccgtcaaaagccccagagcattggcgagaatgacgccgggagagttcaagccgtccgaaaagaagatgccgcccgcggcagtttctttgatcccgcccgcccattcgccgaaaggtctgacgatggcgccgagatagaaaaggtcctcggaaaaagtaaaatggaagattgcaaacaggatgaggagaaagagaggaatccccgcccatttatgggtgagcactctgtccgccttatccgatttcgtgatcttgcccttcgacgacttcgacgattttttcagtacgggcgaaaagttttcggatatgtattgatagcgcgcatccgcgatctccgcttccgtatcgccgctaagttcccctttttgaccgccgctttctttaagatatctttgcaatttgtccgattccgcgggactttccgcgatttcgagttcgtccttttccaacagtttcaccgcatggaacaaaggcgcgcgcttcttttctttcagcatttcctccgcgtaagcgatcgcttcgcccagcttcgaacgagtgaggacgctcgtcgccgtcctcggtttctttgccgtttcgacggcgcgcttcatcagaagatcggtgtttttgtctttgagcgccgaaattgccaccacgggcaaaccgattcgttgttccaaaacgtcgacgtccagtttatccccgttcttgatgagcacgtccgccatattgagcgcgacgatcatcggaatatccacttccatcagctgagtcgtgagatagagattgcgttcgagattggtcgcgtcgacgatattgatgatgcagtcgggccgctcgtcgaggatgaaattacgcgcgatgacctcttcgggcgtatagggagagagggaataaatgccgggcaagtcgacgatgtctaccggttcgcttccctttttataggtgccctcccgcttatccacggtgacgcccggccagttgccgacgtgcgccgtgcttcccgtcagggcgttgaacaaagtagtctttcccgagttaggatttcccgccaaagcaaatttcaacatattccgtttgccgcctccttccgcatcgactccatttccacgcaggcggcttccgccttgcggagagtaagttcatagccgcggatcgtgatttccagaggatccccgagcggcgcttttttgcggagcacgacgtccgccccgggcgtcacgcccatatcgaaaaggcgcctgcgaatcgcgccgccgcccgaaacggaaaggatttttccgctctctccgacggcaaagtccgataaaaatttagccattattttcaatctccttatacagattttgacgggacgcgactttttctttaaagcaaaaatcggtcctgtctttttaacgaagtaaaaggcgctgtcgccgcatacctgccccatgtcttttctcaaagaccgtttcgccgaaatctctttggcgacaaaaatcgcaaattttccccctttcggctctcttttctcgaatccgcgttttctatatcctgtccgcgcgttttacgcaagaccgcgcaccatcgttttaaaatacgattgcttatcgatatcggctccgccccttcccgtaagccccctttttccttttttcataccgacgatgcgccaagccgcggtttccgtctttttccaacggtttcaaacggcaatccgaaaaaaatgccgaaagcaacggagctatgtaagagtcaagccacaaagatccccgcggacatctgtctgtcgagagccatacgcccgtccttgactttgaggatgacggcgcccccttccgcgctcaaaacggtgatcttctgtcctacggcaagtcccagattttccagatgcctttttaccttatcgtccgccgcaagcctcttgatttccacttcttcgcccaaaggcgccatttttaaaggcatatcttttctgtcctccgctcaatttattttaaccacggttaattttatttcggaaaagaaaacggcaatttgccgcattccctcttttataagttttttgcccgttctgtaaagtcccttctcttttcgacaaccttctctttcgcaaaggcaaaattatttttaaacctcagttaagttttattgtattatatcatcattttatgccgatgtcaagaattttttaaccatggttaataatttttttgaattttttttacgttgcggattttattttcctttcccctcgtgcggggcgcttaaaaagtttttgtcaaagaagagcacgtgatcgattaaatttaaaaagcccccgcaaagtttcctttggggagaagagttcgttttaaaaagatgaaattaagaatacaggaaaatctattgtatcaaaaatattctattgaaaaatttattgacaaaaaaataaaagaatgctactataaaatatataaaatatttcccttataatctgaaatattcgtaaaaaaaattgtttccttactgctttcttgtagctttttgttttttatcaatgggacaaaattctatcattgataatgctcctttcgtcgataataaaattcatctgattaatactataaaacaggaaaatagtgagaaccctactgccacatatatgccattgaacgataacaatgaagcggacgatcgcgaatctttggcttatgatattttactatattatgggatagaacccggataagttgatatggaagacgatggctttgctatgggcttttatagccactatcatgcttattatagaagtggcaatgaatttattaagagatatgtatggttagatggcgccgaagtatctatccatggtttttatggatatccgtggtaaggaaaaatgagaaataaaaattacagtaatgagcaaaatagcaacggaatagaggttgcctttcaaaaaattcacaaacaaaaaaacgataaagtccaaaacagacaagagttattacgacaagcgcatgaaaatattgatagaattatcggaaaatcaaagtatatagaatctattgaaattagacgttatacctatgataatgcgatagattatattaaagaaaaatatgcggctaacgaaataacgtttgcggagtgtttggattatattcctaacaaatatcatttattagaatcttgtataagcgcaaaagaccctgtagcttatctgaccgacggatatatcttagagcaatacttatccgcagtattactattgcccgctttaaatgatccagacagtaaatttgcgacaaaaaagaacggatgcattcttttgctttcgaaaaaagaggatgtattagattcctggtggatgggaggcaataaaaagggttatactccgttatataatggagaactgtatattttaaccaacggtaaaaaagcagtgcttgactgattattaccgagtatcaaagacaaaaaatcgttcttttacaacagctactacaatactcgcggtaatagcggaggacctgtgataaataatggagaataaattgcaggaattatctcatttacgttataaagagtaaaacggaaatagcgttgatggaatgaggataggttgttccagcgaatgaattacaaatggtttggaattcatttccacaatagttttcattaaaccaaaaatgttgaaggctaatagacaaaatcaatttaaaaaaaccgcttaaagaagaagtcgacgtcggatccgttttcctcgccggttccgtgggcgtcaaaatttctctcaacggcttccgacggcggaaatatccaagaataaacaaaagggacggagaaaactccgtcccttttttcgcgcgttgtaagtcggcaagaagccgacgacagaaagcgattattttttttcgacgcattttttcatcatctcgaaagtttcgtcgccgacgaggtgctccattttgcaggcgtccgtttccgccgctgcgggggaaacgccgtatcggatgagaaaatcgcggatgatgcagtgtttttcatagacggcggaagcgtaaactttgccctcttcggtcagatagagatgtttgccgtcttcataaacgtaatttttttcgcaaagcaatttcacggctttattcaccgcggcctgggaaaccccgagttttttcgccacttcgatgcggtgcacgaagggcagctgcccgctcaacagaaggatactttcgaggtagtcctcttccgattgattgctttttttaaattcgccgttcataaatttcccctccccgcgtcaaataaacgcttctcttttgtcctgataagcggcacattgatcgccgcgaagctatagggcataaaaatccgcagtttcgccccgcttttaaaaataccgccgaaatcggccgttttgcatatcgggaacggcgtttacgcaaaagccgtttttctcgtccgaaacattgcctgcaatcggctctctggcgcggccgcgaaaaagtattctcctgcaattttgcaaggtttgccgctcaaagccctctttccacagttgccgtttccacggcgcttttgtcctcctccgcgttccctgtaataaacatcgcgtccccgaatattatgggaagcgggattgcctgttttcagaaacgagcaggtcgcgaagcgcgcggcttttccgacgggagtttactatgcgtaaatgagcaaggaaaaacgtaagcgcgacaaagagatgcgaagtttataaaatcaggcaggcgtccccgaaactgaaaaatctgtatcgatgttccaccgcgtaccgatagacgtttaaaatttcctgccttcccgtcatacaggcgaccagcatgatcaaagtgctttcgggcagatgaaaattggtgatcaaggcgtctacgcacttcattttatagggcgggtaaaggaaaatttccgtattgccgctgcaaggatgcacgaatcccctttcatcagccacgctttccagcgtgcgcacggacgtggtaccgacggcgatgatccgccgcccctcccgtttcgcgcggttgatagtgtccgccgccttttcctccacgcggtaaaattccgaatgcatcttgtgctcggtgatgatctcctcgcctacgggacggaaggtgcccagtccgacgtgcagcaacacctccgcgatttccacgccccgcgccaaaagctcctttaaaagcgcctcggtgaaatgcagccccgccgtcggcgccgccgccgaaccgtctattttgctgtaaacggtgttgtagcggctctgatccgccagtttttccttgatgtacggcggcagaggcatggtgcccgcttccgagagaatatcctcgaaaacgccgtcaaaatgaaattcgacgatgcgctccccgctttccgtaatccctttcaccgtcagagaaagcttgtcgtttatcttcatcgaaacgccgatttttccctttttgccgggcttcatcagcacttcccaggtagtcatatcgtaccgtttcaaaagcagcacttccaccagaccgccgtgttcagtcagcgcgtacatacgcgcgggaatgactttggtattgttgacgacgaggacgtcccccgcttttacatattctttgatatcgcggaaaatcctgtcctctatttttttctcgttcctgtcataaatcaacaggcgggaggaatccctcggctctgcgggcgtctgggcgatcagttcgtcgggcagttcgtaataaaaatcgctctttctatattgtgtcttttcttccataaccataaaagccttccctttggtattccgtcatctttccccgccgtttttcgatacgattcgccccgaagggttctccttttgttgcttctcagcgattttattcgtccggatcgaagagggaaaactgcttttccgcctttttgctgaattttacgcccatatgctcgtacccgtctttgaggcagattcgtccccgcggcgtgcgggcgataaatccgagctgcaaaagatagggctcgtagacgtcctcgatggtgttgacgtcttcgttgatcgtcgccgccagcgtttccaatcccgcggggccgccgccgaatttctcgatgagcgcgcgaagcagactcctgtccgtctgatccagtcccagcttgtctatttccaatctttcgagagcgaagcgcgcgtcggaaagagtcacttcgccgttgcccttgacggcggcgaaatcccgcacccgttttaaaagtcgattggcgatacggggggtgccgcggctgcgtcgggctatctccgccgccgcgtccgcgtcgatggcaatatcgagcgcccctgccgaatgggaaataattttttcgagctctttgggcgtatacatttccaaacggttgatgatgccgaatcggtcccgcaagggagaagccagcattcccgcccgcgtcgtggcgccgatgagggtaaactttttcagggaaaaacgaatgttgcgcgcggaaggtcccttgccgacaatgatatcgagcgcatagtcctccatggcggaatagagaatttcctctacggaatgattgagtcggtgtatctcgtcgataaacaacacgtccccctcgttgagattcgtgagaatggcggcgagatcgcccgaacgctcgatggcggggccgctcgtcagcttgatctgcacgcccatttcgttggcgatgatatgtgccaaggtggtcttgccgagtccgggagggccgtataacaaaacgtgatcgagcgcttctccccgctgctttgccgccgcgatatagacgttgagattttccttgactttctcctgcccgacgtaatccgccatcgttttggggcgaagcgcgttttcctccgcgtcgtattcggttttggtgctgacgatcagattatcgccctcgtagtcctcgttttcgaacatagtaaactccgtgtttttgtattttttgccttttcggacattcgcctcagccctgcccgtcccttttctttatcggttccctatccatgccgtcaaagacggcggcgcgcacgcataaaagccgtcattttaaaatcccgtgaacgtcaaaacgcatttccccgcccgataaaaagcccggcattttcccgctgttcttctatggaaaaggctccctgcgtttttccctttcccgtccttccgcgcctatacgcccgattgcaaggctttcatgatcacgtcctcggtggtgttcgcccccgtttcgtgcgcccgctttacggcccgcacactctcggcgcgggtaaatccgagtcccatcaaagccgccaccgcgtcttcgtccgccgccgacagcctgccgttttcgcctccttccgcagccgcgcccgcgttcagaccgccaccgcccgcgctgatgacctccgccgcggaaatcttgccgtgaagctccaaaataattttttccgcggtcttctttccgagtcccttgacggcggaaaggcgtttgacgtccgcggtggcgacggcggcggcaaaatcgtccccgctgagcgcggacagcaccgcaatgcccattttcggccccacgcccgatacggaaatcagtttcaaaaacagttccttttctttgggggaagcgaagccgaacagcgtcatgccgtcctctttcgcctgcaaataggtatacagttcggcaatgtcgccgttgcccacctttgcgaaggcgccgcccgaacaatatacctcgtagcccacgccgtttacgtccaggatcatcgtttcggcagtcgtagtcaaaaccctgcccctcaaatatgctatcaaaaccgcgcctcctcgttacttttcgtttcgttttctcgccttttccaaatccagagcggatttgaaatagctgcccgtcaccgcgtttttacccttcgtgcgcgtattgttttccaccgagaataaagtgccgaaccggctggtaaacgcatggcacaaagcgattgccagcgcgtccgcggcgtcgtcgggacggggaatgtttttcagtttcaaaagggaagccaccacctgctgaatctgttttttatcggcgcggccgtatcccgtcagcgcctgcttgatctgcatgggcgtgtattcgtacagtctgccgcactttttgacgcaagccaaaagggtcacgccgcgcgcatgggcgaccgcgatgcccgtcgtgatatttttcgtgaaaaacaattcctccaaagcgacttcttcgggagaaaaacggtcgatgatcttattcacgccctcttcgagaatggcgaggcggacgggcagcgtttcctctttgggcgtttgcacaacgccgtaatcgacggcgcggcagttgccgtttccgtccttgtccactaccccgtatcccattgtggcgatcccgggatcgatacccaatataatcatatttcctcgctttacgccccgaaaagacttgataatttcatcgaaacatagtaaaataaaagtaagaattgaggataaccccattcttgtattctattttaaaccaatgcggtaaaaaagtcaagcaaacaaaaggacggagaagggaatcatgaaattatgggaaggaagattcgccgcgcctacggcggcggacgcggatgcgttcaacgagtcgctttcgttcgacaaaaaactctataaagcggacattacggcctcgctcgcgcattcggagatgctgggcagatgcgggatcatttcccaagaagataaagcccaaatccacaagggactcaaagccattctctccgacatcgaagcgggaacgctgcccatgcaaggacaggaggacattcactccttcgtggaaaacgaactggtgaaaaggatcggggacgcgggcaagcgcctgcacaccgccaggagccgcaacgatcaggtagctacggattttcggctttacgcgcgctcgtccgcggaggaggtcgtgcgcctcttagcggagctcatctctgccctggtagggcttgccgaaaaaaacgtgcggcatatcatgcccggctatacccatttgagaaaggcgcagcccatcaactgcgcgcagtatttcaacgcctacgcggagatgtttcttcgggacgcggcgcgtttttcggatacgcttggaagaatcgacgtgatgccgctgggcagcggagcgctcgcggggacgagctatcccatcgaccgcgagattacgcgggaactcttaggctttaaagaaatttcccaaaactcgctcgacgcggtatccgaccgcgactttgcggcggaatatctcttcgattgttcgctcgtgatggcgcacttatcgcggctgtgcgaggacaccatcctgtatacgtccacggaattcggattttgggaaatgccggacgcctactcgacgggatcctccatcatgccccaaaagaaaaaccccgacatctgcgagctggtgcgcggcaaaacgggcagagtctacgggcatctcacggcgcttctgacgacgatcaagggcatccccctcgcctacaacaaggacttgcaggaggataaggagggctttttcgacgcggaaaagacggtcaaagactgccttgcgatctatacggagatgctgaaagagatcgctccgaacgtaaagcgcatggaagaagccgcggcggaagatttcacctgcgcgacggacgtcgcggactatctggcgaaaaggggggtccccttccgcaccgcgcacggcgtcgtcggcaggatcgtccgctattgcctccaaaacggcaagacattggaaatgctgactttggacgaatataggcggcacagcgacgttttcgaggcggacattctcgaaacggtgaaggcgcattcctcggcggacggcagaaacagcgtgggcggcagcagcgtcgccgcggcgcgcgcgggaatccgcagcatcaaaaaacgcctgaaacagtttttggccgtttaaaattatttcctattccgcaaaaattttacattcgggccgccttttttcggcggctcgtttttttgatgtaaaaagcgtccgaaaacggacgaaaagggggaaaagacggggaatcaaatacccgattgtttcaaatgatagtaaaagttagagcgggacatatcacagtgcgccaaagcttccttcaacgtgatctttttttctttaaaagcctgcgcggcgcttaaaaactgcggcgtgtgttcttttcggggacgaccgaagcgtaccccctgccgcttcgccgcggcgattccctccgcctgccgcgcgcggatgttcgccctttcgttttcggcgacgaaggagagcacttgaagcacgatgtcggaaataaatttccccaccagcgtgtccgctttggtgcgggtatcgagaaggggcatatccaaaacgagaatatcggcgccgagcttgttggtgagaaaactccattcctctatgatcatctgatagttgcgtcccaggcggtcgatggatttaatgacgagcagatctcccgtctttaattttttcgtcaggcgtttgtattcggtgcggtcgaaatccttgccgctctttttatcggaataaatatttttttcctctattccgaaggtgaaaaaagcgtgcagctgtctttccaggttctgatccgtagtggatacgcgcgcataagcataaatcgtcatcctattatctcctcttcgtaagattataaaaatttattgacaaggcggtgccgttcgtgatataatataagaaatcattgataattcgacaacattataatccccttgtctattaatttatacgtttttaggacataaaaaaagccctgcgaaacgctttcgcaaggccgaaaaaaatcgaaaaatattaaaaaatgtcgtttatgttcctgttaggaaaattataggttttcgggacgtttttcttcctgtcgctttcggaaaaaagagagtttttcccgaaaatcgcccgatttccgatccctttcacagattccgaaaacgtccgaagcgccgatacgaaaggagaaaatgagaaaatgaaaaacgatcagcacgatatattcgaagacttgcagcatctgttagccctcgattatctttccgatttgagatttcatccctatcggaaagaagccgaaagacttttggtatctctcgatttgacgaaatattctctgcgtgcgctctgcgaaatagcggagtatctcttttcaaaaaaaatttccttttccacgtatgcggacgccgccgaattttttgcccgagggacggtctgcggcgaccctgaaagcgaaacggaagaaacaaacgagcctaaataagggctttaaaagcttcacgggagaatgtacggcgcggcaaaacgcgtaccgcaaaagagcgtcggcagacgcgaaataaacgcgatataaaaaacaagggcgcggcgaacgcgcaattttcataaaaattgtcgctccgcgcgaagaaagtcaagtacgtcacgcccgcgttttttatgaaaaacttttattggaaaggcgataaataataagggaacggcggcgacttttaagagaaaccattatccggaaggaatcaaaaaaggta

SEQ ID NO: 3931 - DNA, 3085 bp, Unknown
  16S sequences of unknown bacteria
ccgccgcaggcgggcgacacgagctgcgctcgtgtgtttcggctttgccgaaacgggctgcgccccgggagcccgcggtctctgcccccacgcacatttttgcagggggtaggggagagcgggccgcaggcccggcggcgcgtagcgccgccgtcagcgggcgaagcccgctgaaaccgtccgtaggacggtttggcctgcggcccgagctagccccctgcaccatccatacccaaaccaaaaggaagtgatccctatgccatttgacggcggatttctgcacaagataaaacaggagctggaaccgatgatcggggccagagtggataaaataggccagcccaaccgggattgcgtggtcatccacctgcacaaccgggggccggtgcgccgcctggtgatcctggccggtgcggccccacgactgcacttttcggccatccccattgaatacccggccaccccgccgatgttctgcctgctgctgcgcaagcacctgggcggcgggcggctgaccgctgtgacccagcaggggctggaccgtgtcctcaccctgcactttgaggcgaccaatgagctgggcgaccgggctaaattccggctggtgtgtgagctgatggggcggcagggcaacctggtgctggtgggcgaaaacggcaaggtcattgacgccatccaccgggtggattttgccgccagtgaaagccgtccgctgctttccgggctggagtatgcctacccgccgcggcaggagaagctggacctgacggcagtctccccattagatgccgccgaccggctgctttttgggccggatcttcccctcagcaaggcgctgctggcggtgctggagggggcttcccccctcatttgccgggagctttcctaccgcattgcccccggcgatccgacggttagcgccctttccccggtgcagcgggccaccgtttccgccgtactgggggaatgggcggcggcactggcccccggcggcggcaccccgctgctgctgggcggcgaaaagccggactttacctttctgccgcaaaggcagtatgagggaacgaatatcacgcagacgccttaccccacctgcagcgagctgctggaggaattttaccggctgaaaaccggcagcgaaggggtaaagctggcgggggagggactgcgccggcaggtcacctccatccacgagcggctggtgcgcaagcgggcggtgcgcctgcaggagctggaaaaaagcgccggccgggatcagctgcggctctacggcgacctgctgagcgccaacctgtaccggctggaaaagggcatgaccgccctgacctgtgaggactataccgccgatccgccggtcaatgtgaccatcccgctggagggacgcctgacccccagccgcaatgtgcagaaatactacaccgaataccgcaaggccgccaatgccgaagcggtgctgcgccgcctcatcaccgaatgcgaggaggagatcgcctacatcgagtcggtgcaggaggcgctgcgccgggccaccaccgaaggcgagcttttggagatccgggaggagctgcggcagcagggttacctgaaaacgctgacccccaagggccaaaagccgctgcaaaagcgccggggcggcaccctgcccccgctgcggtaccgctccagcgatggatataccatcctgtgcgggcgcaataacctgcaaaatgaccaattgaccctgaaaaccgcccatggcagcgacctgtggttccatatccaaaagcagccgggcagccatgtgatcctgcttaccaacggcaccccgctggaggagctgcccgaccaaaccatagaggaggcggccatgctggccgcctgcaacagcagcgggcgggaaagcagccgtgtgcccattgactacacgctggtgaagaacattaaaaagccgaacggtgcccggccgggcatggtcatctatgaaacctactacaccatgctgaccacccccgaccacgccgctgcgcagaagttgctggagaagtaacatctgtgccgggggaggggagcgcgggccgcaggcccgaccgccgaaggcggtcgacgcagtgtttcggcggagccgaaacggcctgcggcccggatcctgccccctgtgcaagcctgaataaaacagcgggccacccgggtcccgccccagccgggcccccatcccatcccgccaaggaggaaccatgaagccatccctttctgcgtccgccctcaagtatctggcgctgttcaccatgctgctggaccatatggcctactacctgtacctgccggagccgctgcgctgggtggggagactggctgcacccatcttcctcttctttgtggtggagggctttggccggacgagaaattataaaaaatacctgctgcgggtctatgcggtggcggcgggtatggggatcaccaatgccctgctgcggcaatatgccgggggtctgcggccggatggcatcacccctaccaatggcatctgtgctaccttctttttgctgctggtgatcctgcaggggctaaagcggatggaacagcgccgctgggatgggatcctgctggtggcagggccgtttgtgctgccgctgctgctggaagcggtgctccccaccgcagcagccagcctgctgaccactacattgctgcccagcccctatacctgcgagggcggcatcgaatttttgatgatcggggtactgctgtatttcttccggcgggaaagaagcatgcagctgaccgcctatgtggtgtcctgcttggtgctgtaccttacccccatcctgctgctgaacggttcgccggtaacgctgctgttcacctattaccagtggatgatggtcttcgcggctatcccgctggccatgtataacggggagcgggggaattccccgcgctggctgttctactggttctacccggcgcatgtgtacctgctgtgggcgctgggggccctgctgctgggataagagtaggtgcccggtatggaggtggtatgatccagcctccggcccggtttggggaaggggagagcgcgggccgcaggcccggcggctccgccgcc

SEQ ID NO: 3932 - DNA, 2241 bp, Unknown
  16S sequences of unknown bacteria
cgtgaaaatgtgtctgctgtacgacggctttttttcttttgccgtcgtgcggcagatttatttaataagaggtaatacaatttcgccggataaaaccgcataaattgatacggcgctggcgatacacaaaacgataccgattaagcggataataattgaaaaccacttatattttgtgcaatttttaattatcccaaaaggtaagaaaagaagcagcaaaccaataattaaaacaaccgaaaacaaaataatatacatttttcctcctatctaatgcttgatgaatagttatgttatttaacaacaactgtaccattatcactaccgatttccaaattattatctccggccccaagcgtgccttgtctgcaagatgaagtttctttgctataagccgccccattaaagctggctgaaatgtctttagagccagaagtaatgctaaagctaagattatctggtgaggtctgatagttcaagtttatatcgccggaaccagtttgtatgcttatattggtttgagggctgatttcagacatatttacctcgccggattttgtaattatttctgtaccgctgaaaatggtattattgagttgcacatatcccgacgttgtaacaatctctgcactgctaacttcactgtccttaactgtaatgtcgccagatgaagatgatattttcaagctatcggctgcaaagtgagaaaaggttacatatcccgcgttattagcaagttgaaattctgttgcagatatgctatctatatcaatgtcgcctatttcgttgttgatacgaacgggaataatacagtcagacggcagatataacatgatttcgccctttttccctaatgcgatttggtcttgcaattcttcgtcgctgcttttttgcacgatagttacaattccattttgcagtgaaactgtgggcttatcgtccttatccgaaacgctaccgtcaaggcttatacggatattatcatctgatgaagccataatgttgatcttccatgcgtctgcgcttatttgcaattcttttacttcatttgctgaatatgtttcacttcctgtaattttgttttttccgcagccacataggcagaacataagcaaagtgactatacctaaaatcaataataatttttttctatccatattccctcctattacattaaatctttcgtttcagctccgcatatagagagaaaagcgaaaacgagtgagattaaagttaagataacagggaaaacggcattatttgccattgtcaagtcgcctatatttgcctgtgtcaaaacaattaacaggaaagaggcaatgatcgtggcctttgaggatttcattgccataccaacaaacaaagcaataaagctcatggtaacgataacaacggactttacaatcagttggatatagaaccctaaacttgccatattgaagtcaagcgggaatgacgataccataaaatgtgaaccgaataaaatgcagccgtaaagcagcagctttgtgagtaccagcgccacaaaattaaaaatccatacggcaagcatttgtgaaacaagaattttttgtcgcttaatcggataagaaaacatcaaattcatggtcttattcttgtatgcgctgacgataaatgacgacagcattacgctggtaaaaaccagaaaagacatactggtaaacagctcaataggtgaagatatggcattattgccgggagctgcatcgggtacgcctgtgtccgggtcattcgcaattccaagataggcaagtgcaaacatgaacaggccaaggacagccgccagtatgatagcatttcttacatatttgccgatattgttttttttccactccagcttaatcaatttcaacattattctttcacctccgcagtcattttcaaaaagtaatcttccaaagtttcagcctttcttcccagtgcgataacttcaacatcatttaatgccaaaaccttagataattcctgcgtggaaacacgggtatcataaatcctgatcttgccgtcctcaataattttgaagtttgaaagctcaagtttttcactcaatacaaaggatgcctttttggtatcgagtacggttagttcgatgtaagctaaactcatttgttcaatggctttcatactgatttctttcatcatcatcccatgattgattacaccgacagtatcagcaatgctttcaatctctgaaagaatgtgactggaaatcataattgt

SEQ ID NO: 3933 - DNA, 16723 bp, Unknown
  16S sequences of unknown bacteria
aacagggccttgaggaaggacgtaaggaaggccttgaacagggtattgaacagggacttgaacagggacttgaagcaggaattgcacaaggcgaggcttccggcagagcagagcgtgaaattgaaatggccaagaccatgaaatctgagaatgagcctgtagataaaatcatcagatatacaggactgtctgcagaagcaatagagaaattatagaggagacagaacagaatacttttaatttgtgattgaggagtgcctgtacggtactccctttgctatctttgaaacaaaatatcacctgctccttgaaacagacagagaaaggcgatataattagatgttagattaaaaaaggcggtttactatgcacgaatatccgattacagagcagatagttaaaatagcagagaagaactgcaaagaagcaggagcctcaagagtgataagcgtcaatcttgttgtaggcaactattcgggacttgtgcccgagtccattcatatgtacttcgaccttatagcggagggaaccgtctgcgagggcgcggagataaatatgaagcggattaaacccaagctgaaatgcccttcctgcggcgctctttttgaaagagctcccatgtcctttgcctgtccttcctgcggcactgacggagagccgaccgaaataggcaaagaattttatattgaatcaatcgaggtggaataatgcacgatataaggaaaataaatgtaatggaaaacataatggacgaaaacgaccatattgcagagcatgtcaatgagcatatgtctgcccacggagtccttgtaataaacgaaatgggagcgccgggagtcggcaagacaactaccctcagaaacataatctcaagacttgacggcatcaagccgtatgtaatagagggagatatcgagtcagaccttgacacacagacactcaaaggacttggcattgacacacatcagataaacacattcggcgcgtgtcatcttgatgcgcctatgatagatcatatgatagaccatatgcactttgaccacagcgagcagagagcggcactgtttatcgaaaacataggcaatctggtatgccctgccgaattttcaataggcgagcacatcaaaatgctcatatccacagtgacagagggcagcgacaagccttacaaatatcctctggcatttgaaaaagcagacgttataattctcaacaaggtggacttaattccctaccttgactttgacgaggagttctttatgaaaggcgtcagagcattaaacaaagacgtgcctgtattcaaagtatcgggcaaaacaggagagggctttgatgaagtggcagagtggataaaatcaaaggcgcttgctcttgaaaccagagagcatcaccacgaccatgaacacgaccatcatcacaatcacgaacacaaatagtatgaacagggatgttatcaccgaaaaaattaaattatggggaattgtccagggcgttggcttcagaccctttgtagccaaaatcgcagacagactttcgatgaaaggcgaggtgcttaatatcggaggtcttgtagagataaaggttacagacacaaagaaacgcatagatgaattcatacaggctatatgcgatgagaagccggagcctgccgagatagtccatattgcaagatatgagcaggactatacggcatttgacagcttcaccatacttcacagcggagagggcaatgatgaggttgcaatgatacctgcggatctctcaatctgtcccagctgccttgcggagcttaagacaaaggacaatcccagatacagacacccgttcatatcctgcatggtgtgcggacccagatatactataattgacagaataccctatgacagagataatacggcgatgattgactggcctatgtgcgggttttgcgagggagaatacaccagccttgcagaccgcagatatcacgcacagactatatcctgccatagctgcggacctgtacttttgtgcaggcggcaaaacggagatatatgcgacagagagcgggcagtatcggaagcggcagagcttcttgcagcaggcagggtcatagctttcaagagcacaggcggctacaatctgatggcagatccctttaaccccgatgccgttgcagccttaagggaaatcaaagcaagagagcagaaaccctttgcagttatgtttagggacatagatgaaatcaaaaaaatctcatatgtaaacgaggtggaggagagacttcttgagtcctctgcaaaacctataattctgctggagagaaaaccggcagagcagatagaaactcccgcatatgccaaaagcaaagatgagcttttaaagagcagatttgtcggctctttcctgccgtctatgggagcgcagcatctgatacttgaagctttcggcggcccccttatagctaccagcgccaatgtgtcggatatgcctatgattaaagacgacgggcagatgatgcggcttatgaaagaccggccgcagattgccgcaatgatatacaatgaaagagacatacgggtgagagcagatgactcggtggtaagagttatagacggcaatccccagatgataagaagatccaaaggctatgcgcctgtacctctgtttgttgaagctgactgtgacaaaggcgatatgatatttgcggcaggcggacagctcaaaaattcatttgcgcttaccaaggggcagtttgtatatatgagccagtatttcggtgatatggatagccttgaaaacagagaaatatatcaggataatgtaagcagaatggaggaacttttcagaataaagccggatgtggcggtatgcgatatgcacccggcctatgcgccgtctctctttgcgcagaagcttggaatagaaacagttaaagtccagcatcaccacgctcacatagcctcggttatggcagagcataatatcgagggagctgtgataggagtaagctttgacggtacaggctacggcgaagacggcaatgtatggggcggagaaattctcatatgtgagggcagcagctttaaacgcagcaggcacctcaaatatatccgtatgataggcggcgacggttccatgaaggaagcgtggaaatcagccctgtgctatcagtatacctatgaaaacgagaagagggatacagaggccgatgagtttgaaataaggcttgataagattatggaatacgctacagggcatcggagcgagcttgcagagaagaataaagcgctggtatacggcgcgctttcccataggataaacaacataaccagctccagcatgggcagactttttgatgcggtttcggcattgcttggaattaaggagtacaacgactatgaggggcagtgcgcgataatgcttgaggacgctgcagccagatgtgaaacagaggccgaaaagctggcatatgattttcatatgcaggcggcgcggagcgtgcttgagcagtgcataaacgtcagaaacgaaacaggaataaataaagcggctctttcgggcggtgtttttcagaacagaatacttaccgaaaaatgtctggagctgcttagagataacaacttcgaggtttactgcaatatatcggtaagccctaacgacgggggtatagctttaggacagagctatataggaatgaagattttggaggagagaagaaatggcaattgacaaggtaagagaatacttcaggcagtttggattagaggacaaaatacttgaattcgatgtatcaagcgcaaccgtagaccttgcggcgcaggcaatcggagttgagggggcaaggatatgcaaaaccctttcctttaaagacaaggacggcggctgcatactgatacaggctgcgggagatgccagaatagacaacaggaagtttaaggataaatttcatctcaaggcaaaaatgcttacggcagaggaagtggttgaatttacaggccatgcaatcggaggcgtatgcgcctttgcgatagaaaacccgaatgtaaaggtttatacagacgagtccctcaaaagatttgatactgtatttcctgcatgcggcagctcaaacagcgcaatagaatttacctgcgatgagcttttcagatattcaaatgccatagagtgggtagatgtatgtaaacttccggaggaggtaaatgaataatgtgtatagcaataccgggaaaagttgaaagtatagacggcaatatggcaaaggttgattttaacggcaacctcgtaaatgtcaataccggaataatagagcctgaggtggggcagtacgtgctggttcacgcaggctgcgccatagaggttatggaaaaagacaaagcgcaggagcttatagacctgtttgcagagctggaggcataacaatggaaatacagaaggttgttgaatacctgcaaagctatgacggcagacccctcaagcttatggaggtgtgcgggactcatacatcaagcatattcaaaaacggaataaggtcgctgatttcacctaaaatcaagcttatatcaggaccgggctgtcctgtgtgtgtgacacctgccgcatatatagacaaatgccttgaatatgcaaaaaaagataactgcgttgtgctgacgttcggagatatgattaaggttccgggcagaaacggaagctttgcagaaagcaaaggcgacggcgtcaatgtggaggttatgtattctccttttgaagctgtcgaaaaagccgaaaagaaccctgaaacaacctatgtggttgcggctgtgggctttgaaaccacagcacctgcatatgcgctgatgcttgaagaggcgcacaggagagacataaaaaatattaagcttgtgacggctctcaagacggtaattcccgctcttgaatggatatgcgaaaaccagcaggatatagacggctttatatgccccggacatgtcagcgtaataatcggaagcgacgcctacagaggacttgtggacagataccataagccttttgtggttgcaggctttgagggtgagcatatacttgcagttatatatgatatagtaaggcagatagaggcaggcgaaagtcaggtcagaaattactataccaatgcagttaagccggagggcaatctcaaggctcttgaggttattgataaatattttgaagcgggaagcgccgtatggagaggccttggaccgatagcggattcggggatttatcttagagaggaatacagaaactatgacggcggcagtttcgggcttgacgaggatatagagcttccaaaggcgtgcagatgcggagatgttatagtaggcaggataaatccggatgagtgtccgatgtttggcaaaagctgcaatccgctggagccttacggaccttgtatggtttcggcagagggagcctgcggcatatggtacagaaacgggagataatatggaaaaaataataatggctcacggcgccgggggcaaaaccggcagcgagcttatgagcaggattttcggtaaatattttaataatgatgtgcttgaaaaaatggaggatgctgcggtggttgaggtcagcggtaaaatagccttttcgactgactcctttgtagtgacgcctctggaatttaagggcggagatataggcaagctgtgtgtgtgcggtacctgcaacgacctgcttatgatgggtgcagaacctaaatatcttacctgcggctttattcttgaagaggggcttgatattgagcttctcgaaagaatagtaatatcaatggcaaatcaggcaaaggctgcgggagtcaagattgtggcaggcgataccaaagtggtagagggaaacggcggcctttatattaatacatcgggaataggcgttataccggagggcagagatataagcgctgccaacgcaaaaccgggagatgcagtcatactgtcgggaacccttggcgaccaccatggctgtatattaagcgccagaatgggaattgaaaacaatatatcaagcgactgcggatttctgggtgatataacagacgcattgtttgataacgatatagaagtaaagactatgcgagatgtgacaaggggaggtcttggcacaataataaatgaaatcgcagatacctccgggtgcagaatagagataaacgaaactgccctgcctgtaaatgaagatgtcagaggctttgcggatattctggggcttgatcctgtatatatgggcaacgagggcaaaatgattgcaattgtgccgcaggctcaggcagacagggcgctggagcttatgagggatacggagcacggaaagaatgctgcgataataggaagtgttgcagagggctccggagtagaagttataacaaggcttggaggcaggagaactctcgatatgctctatggcgaggggcttccgagaatttgttagaaacccgaaagggtataatttaatacttgagaataaaaacagaccctatcgggtataattaatgcgtaagagattgatattatacccgacagggtgttattatgctgttatgaataagattggacaatatataaaaagagaaagaaaaaaactgggtcttacccaggaggagtttgctgtaagggcaggtcttggcatcagatttgtaagagaactggagcaggggaaaacgactgtcaggcttgacaaggtcaatcaggctttgtatatgtttggcatggaggcggttcccggcagaaaggagggttagaccgtggcttttgaataccgaaggggatatgtatttattcaggacaattatgcaggaataattacagaaactgatgaaggctatgagtttgtgtatgataaacagtatcttgacagagaagatgcggtggcggtcagtctgactatgccgcttactgataaaccatataaatgatgaaaataaagaaaaaataaaagaactgatatgccaaagaattaaaagactgacaggcgggcaacaaatatgatatgaactcctctgcaggtaggttgcggaggagttctttgcaagatgattatctgacctttgcaggtgagagcttgtttactgccatatatgacttgtctattagcagagagtatgccttttgcgcaggctttcctgaaagcagtacagttacagcaaagcttatgacaagcaggcatatgagatacagccattcatagcctttgaagtcaaaatacccgaaagtgaagccttttaccttaaataccagtacaaacagcatatggaatatgtaaatcggcatggtgttcatacctatgtgtgcccagaagccctgttttgcagacagtatgctcagaagaaacagtatccagccgaaacttacggcaagcagagcagctctgaataaaataccctctgctattgacatatgggtagcgctgaaagatgccttgagcttgattgcctctgcaatattttcaggacagaagcagacagccaggactgttatggagcagagaacagcgccaagcagaacaatctgccatacggaacgcagccttagcttctcgactctttctattgtcatatagtagcctgccacgaacgggaagaaaaatgtacacattctggatactgcaaagccgctgctgcttagaggttcaaatatacctgacagcagataaattccaagagctatagcaggcagatgcggtattttaacatagaatttctgaaaaaacttatagacaaacagcactacaagaaaccacatagcgtagggaagacttcctgcctgaaacatctcggcagccttgtcaaagccgtagtaatatgcagcaagaggccagaaaacaatccccacgattataacgggccaaagcagtgagccaaacagcttatccctgtttttgcccggatttttactgaacattcctgaaaggaaaaagaaagcctgcataacaaatatatcaattccgacataaatcagactgcctgcattgtcggtaaactcataaccgcctttgaatgtgaagtgctgaagcacaatcaggaacatacatatgcccctaagtgcatcatatctgtaatttctttctttaataatctctcccataaacaattaccccttattaaaccttgaattaattttaagtcgctgtgaaatgcattatatcacagaaaaatcatatattcgggctgttaataaaagcttaataaagtttaataaaattataaaccggagttatgcaaagatgaaaaaatcatctgcaaaagttaatcttacagatgattttgtgtgggtaatattaatagtagtattcggaactgcccttgtattcctgtatggtgttgccgccgtcaactatgaaatcctgccctgtgatatatgaggccttgtctgagcagaggaacactatcatatttgcaacctcctcggcggtgccgcttctgcctgcgggggtatttagtcctccctgatattccgcttctgtctgtgaagaggtctgtatccagccgggaagcacattgtttatcgatatgttgtcctttgcggtttctatggcaattgacctgctcataccggttactgcggattttgcggcgctgtatgaagcctcgcagggattgcttacgacaggacctgtgacagatgaagtgtttacgatgcgaccgtagcggttttttatcatatgaggcagcacctgacgggtcacgttaaaaggtatattgaggtttcttgcaatgtcgttatcccagctttcgtatgacagctctgcaaatgaagtgaaatcctcctctgcgactcctgtctgcaccataccggcattgttgacaagcacatctattctgccgtctgccgcgataatgtctgaaacaagagtttttacctgctccctgtccataaggtctgcaacgcagcctttcgagtctatcccaagatgtctaagttctgcttctcttttgaatatacgatctgttgtagataccatatatacccttgcgccaagctctccgagtattcgggctgtattaaagcctatgccgttttcactgcccgcaccggtgacgaggcatattttgttttcaaatgttataaatgggttcataaatttctcctgatgtatgtattgctaagtatattttaccctaaaataaagtttagtcaagaattgtaaaaagggaaaaaatgtaatgaaaattgtgcataagcattaaaaaaattaaaaatatctagtgaaaagaaataaaaaatatttttttgtttcgtaactgatacgtccgaaattacatactaaattgttttcaaagcaaaatagttaatttaaagatagaaaaatgacaaaaagcggtgttaaaattaataagcttgctattttgtggtgaattttgtatattgtattaagtaaggtacaatgttgacatatcatagtataactgatacaatattttgtattacatcaatacaaaaaagttaagaatttgttaacaacaatttgaacaattatttatctggaggattaatttattatggccaatcgcagaatgaaaactatggacggaaatacagctgcggcacacgttgcgtatgcgtttacagacgtagctgctatttacccgattacaccgtcttctccaatggctgagtctgttgatgaatgggcggcatatggtaagaagaacattttcggacagactgttaaaatcgctgaaatgcagtctgaagcaggtgcagcgggaacagtgcacggagcactttccgcaggagcgcttactacaactttcacatcatcacaggggctgcttctgatgatacctaatatgtacaaaatagcaggtgaattattaccgggcgttttacatgttgcagcaagaacagtatcaacacacgcgctctgcatattcggagaccactccgatgtaatggcgtgcagacagacaggatttgcaatgctggcatcaagctcagtacaggaagtaatggaccttggcggtatcgcacatcttgcttcaatcaaatcaagagtacctttcgtacacttctttgacggcttcagaacttcacacgaaattcagaagatagaggttctcgattacgacgacttaagaaaaatggtcgactgggacgcagttgcagagttcagagcaagagcgttaaaccctgcccaccctgtaatcagaggtacagcacagaaccctgatatctttttccaggcaagagaatcttcaaacaagttctatgatgcagtgcctgaaatcgtagttgaatatatgaacaaaatcggtgagcttacaggcagaaaatacaagcctttcgattatgtcggcgcacctgatgcagagaacgtaatcgttgcaatgggttctgtatgtgaaacaatcgaagaaacaatgaacaagcttatatcagagggtcacagagtaggacttatcaaagtaagactttacagaccttttgttaaggaatatttccttgatgtactgcctagaactgttgaaagaattgcagtattagacagaacaaaggaaccgggcgcgctgggcgaacctctttatcaggacgtaagaacagctctttacggagagaaaaacgctcctgaggtatacggtggcagatacggtcttggctccaaggacacaactcctggaatgatacattcaatatttgacaatctgtatcacaagagacctaagaacaacttcacagtaggtatcgaagatgacgttacaggtcactcacttccgttcactgaaggtatcgcaagagaacctgagggaactatcaagtgcaagttctggggacttggctcagacggtacagtaggcgcaaacaagactgcaatcaaaatcataggtgacaagactgacctttatgcgcaggggtatttctcatatgactccaagaaatcaggcggagttacaatctcacatctgagattcggtgaacaccctatacagtcaacctaccttataaatcacgctgactttgttgcctgtcacaatcaggcatacctgagacagtacgatatgctcaaggacctcaagaagggcggcacattcctgctcaactgtctgtggactcctgaggaaatcgaaaatcatctgcctgcaaaggttaagagagatttagcaagaaaggacataaacttctacattatagacggctggaagatagcatcggaaatcggtctgggcggcagaatcaatatgataatgcaggctgcattcttcaagctttcagaggttatgcctttagatgacgcaatcaagtatctcaaggaaggtatcgaaaagacatacaagaaaaaaggccaaaagatagtagatatgaactgcgctgctgtagacaagggcattactgctatccataaggttgaaattccagaagaatgggctgatgttcagaaccctaaggaaaaatacgaagagcttcctgaattcatagaagaaattcttatccctatgaaccatcaggagggtgacgatcttcctgtaagtgcattctcaggcagagaagacggtacattcccgtcaggcacaagcgcatacgaaaaacgcggtgttgcaatcatgcttcctgaatggaaagaagaaaactgtattcagtgtaaccagtgttcatttgtatgtccgcatgcggcaatcagacctgtactgcttacagacgaagaaaaagcaaaggctccacagtcattcagaacaatccctgcaatcggcaaggaactcaagggacatcactacagaatgcaggtttcagctcttgactgtcttggctgcggcaactgcgcagacatatgtcctgcaaaggaaaaggctcttgtaatgaagccttacgcagaagaacttcaggaagctgacgactggaagtatgcaatgagcattcctcgcaaggataagcttgttgacactcatactgtaaagggaagtcagtttgcaaaaccgtacattgaattctcaggcgcatgcgcaggctgcggagagactccgtacatcaagctcataactcagctgtttggcgacagaatgatgattgcaaacgcaacaggctgctcatcaatatggggcgcttcagcaccgtcaatgccttactgcactgacgaaaacggcagaggacctgcgtggtcaaactcgctgtttgaagacaatgctgaatttggatacggactgttcctggctcagaagcagatgagagaaaaaatcgaacacgacatgagagcgctgctccagcttgacgttgacgagtcactcagagaagctgtcgttgaatggcttgacaatatgaatgacggttcagtatcaagagaaaagagcgaagctgtactcagagaaatcgaagaccttaatacaaatgacgatataataatcagactttgccagcgtattgcagagaagaaggattaccttgtaaagaaatctgtatgggctcttggcggtgacggctgggcttacgatatcggctacggcggacttgaccacgttcttgcttcaggcgaaaacatcaacgttcttgtattcgatacagaagtatactcaaatacaggaggtcaggcttccaagtcgactcctacagcagctattgccaagtttgcggcttccggaaagagaatccgcaaaaaagacctgggcaagcaggcaatgtcatacggatatgtatatgttgcacaggttggaatgggcgcagacaagaaccagcttatgaaggctatcacagaagcagaaagctacgacggaccttcacttataatctgctacgcaccttgcatcaaccacggtctttcaaagggtatgggcaaatcacaggaaaacatcaaggatgctgttgactgcggttactggcagctttacagatacaaccctatgctcaaagaaaagggtgaaaatccgtttatcctcgattcaaaagagccaaacggcaaattcaaggaattcattatgggacagacaagatattcatcacttgcaaaggaattccctcaggttgccgacaagctgtttgaactgacagaaaaacaggcaatggaaagatacgagggctacaagaaactttcagaaatgaaataaacaactttgacatactaaagggactttcgcatttaagcgaaagtccctgagtcttttttgaactatctgcccgctacatgatttttgattgcctcaaatactgtgtcgctgatgtcatgctccattttgcatgcatcatctgctgctgtttcctcatcgactccaagtcctgtgagaaaatttgtaagcagagtgtggcgttcgtagattttctccgcgatttcgcggccggcatcggtaagagtgatatatccgtctttgtcaactgtgataaattcgccttctttgagaagtctgacagcgcggcttacacttggctttgaaaaattcatatattctgcaacatcgagagatctgacatctccaatctgtttagaaagcacataaattgtttcaagatacatctcaccggattcgtgtaaacgcatattgaaacctccaatctgataaattacagaaatattctatcacttacaaatgtgaaaagtaaggaaatgacggcaggacagtgcgatttttactggttttttaaaacaaatccccggttatatattgaacagaaaaaacgaatgttgtataatgaaagataatattttttaaaaaagttattacatttacatatagttataaaggagaattaaatggcgcagtatataaatgaaccatcaagaaccttcaatgaattcctgcttattccgggatattcatcaaaagaatgcagagtagaaaacgtaagccttaagacacctattgtcaagtttaaaaaaggtgaagagccggcactgagtatgaatatacctctgacgtctgctgtaatgcaggccgtttcggacgacggtatggctatagctcttgcaaaggagggcggagtttcctttatattcggatcacagtcggttgaaagtcaggctgcaatggtaagcagagtcaagaaccacaaggcaggctttgttacaagcgattccaatttaagacctgaccagactctgagagatgttttagagctcaaggagcgtatgggacattcaaccatagcgattaccgatgacggtactgcagacggcaaaatacttggtattgtaacaagcagagattaccgtatcagcagaatgagcatggatgataaaatagaaacatttatgactccgttttcagagcttgtatacggacacgagggaattactctttcggaagcaaacgatatgctgtgggatcacaaactcaatgctcttcctatcatagacaaaaaccagaggcttgcatattttgtattccgtaaggattacgattctcacaaaaacaatcctaatgaactccttgacgaccacaagagatatgttgtgggggcaggtatcaataccagagattatgagcagagagttccggctcttgtagaggcgggcgctgatatcctgtgcatagattcttccgaaggatattcggagtggcaggcagatactattaaatatatcagatataaatacggcgatgaagttaaggtcggagcaggcaacgttgttgatgccgaaggcttcagatatctggcggaggcaggcgccgactttgtcaaaatcggtattggcggaggctccatatgtatcacaagagagcagaaaggcataggcagaggacaggcttctgcggtaatagaggttgcgcaggccagaaatgaatactttgaggaaacaggcatatatataccaatctgttcagacggaggtatagtatatgattaccatatgacacttgcgcttgcaatgggagcagacttcctgatgcttggcagatacttctcaagatttgacgagtcacctacagccaagctgaatataaacggcaactatgtcaaggaatactggggcgagggctccaacagagcgagaaactggcagagatacgaccttggcggagatgcgagaatgaaatttgaagagggcgttgattcatatgttccgtatgcaggctcacttcacgataacgtaaacgtgtcacttacaaaggttaaatccacaatgtgcaactgcggcgcgcttacaatcagagaattgcaggacaaggcaaagctgacaatagtatcggcaacctcaatcgttgagggcggctctcacgatgtaattctcaaggatacttcaaacaatgtaatcaaataataggaggaatagatttatggcaatctcaaaagaaaacttacgtccggaaacactggaaagaattataacccctgatcttgctcagaaatttatagatgagcagatagcggaaatcaaagcacaggtgggagataaaaaggtactgcttgcactgtcaggcggtgtagactcatcagtagtggcagcactcctcataaaagcaataggcaatcagcttgtatgcgtacacgttaatcacggactgctccgtaagggagagcctgaacaggttatacaggtattcaagaacgaacttggcgcaaaccttgtttatgttgatgcggttgacagatttttagacaagcttgcaggtgttgacgaccctgaacgcaagagaaaaatcataggcgatgagttcatcagagtatttgaagaagaggcaagaaagcttgacggtatagaattcttgggacagggcacaatttaccctgatatcttggagtcagacggagttaaggctcaccacaatgtcggcggtcttcctgaagacttacagtttgaactggttgaacctgtaaaattcttatacaaagacgaagtaagagttgtaggtaagcagcttggacttcctgacaatatggtatacagacagccgttcccgggtccgggacttggagtaagatgcacaggagctattacaagggacagacttgaagccgtaagagaagcggatgctatcgtaagagaagaaatcggcaagctcaatcctgcgccttggcagtacttcgttgcaattcctgatcttaaatcaacgggaattaaagacggcaagagatatatgggctgggctgtagtaattcgtgccgtagatacagttgatgccgtaacagccaaggctgttgaaattccgtttagcgtattagctacaattcgtgacagaattatggctgaggttgacggagttaacagagtgctttgggatatctcagacaagcctttatcaacaattgagtgggaataatatgatttgacggacaaaatgaaagataaaaaaataccggcgcgtgtaacagtgctgctagttttcatagtactgctgtttacatcggcaacaggcggatatgcacagacgcaaggaagtgcggcagcagtacaggaatatgacaaaatcagtatagataagtttacggttgttcttgacagctatctggttatggcagacggctcagaagtaacgcctgaggttctttacgtcagcggtaagattgacagtgcagacgacggttcccaggaagaccttgttttagagcctgatgagtatgtggtgaaatactatcgtatacatagcttcagtgaagaaatttatgaagaaacagaaactataagtgagataggagaatacaaagtaatagttactgcaaaggatacagataagtacacaggggaggcttatgcgcttttttcggttacaggcaaacctcagaagcttacgattgcaaagacaaagtatactttgacggtgggaagtaagggaccgctgcttcagcctgaggcagacggagacggc

SEQ ID NO: 3934 - DNA, 21919 bp, Unknown
  16S sequences of unknown bacteria
tcattggcgagaaatgggaagtacagcaggcgtgggataaacaaaatgagtttatgaaggcgcaggcccgtgcacagagtgagctgcgggcgctgatccggcagtatgatgagatgctgcataaagactgggcggcagcgactgaggagcaacgtgcgcgcatcgatcagatccgggcgcagactgaacgcctggcgaatgtatctccggagtcagatgaggatggtgtagagattatcaatgacgcagaccaaaaagcaggtgcggatatcggacattgtgatcccgaaatatctgccgatattcaatgataaacagcataaacatattattctgacatctggccgtgccggtacaaaatccagctatgcagcgatccgaacggattatcagatcatagcggatccacacggatcggcggtggtccttcgtaagcatcataataaactgcggaagaccgtctacaaggagatgctccgaggcatcaacaggctgcaggttcccaaaagtcggttttacatcactaagagtccgatggagatcacgtataaaaagtacaacacgaccatttatttttccggatccgatggcatcgatgacacgaagggcatcattgacgaagacaagccgatcaagctggttgtgcttgatgagctaactgagttcttcgaggatggagaaggtgaggatgagctggccaacatcgaggcgacgtttgtcagaggaaataaagcagggttccagatgatttatctgtataacccaccgaagaatccgaatgcgccagttaacctgtggtgcaagaaaatggagcagcgtccggactgcatccacatccatacagattaccgggatgtgccggtcagatggctggggcaggatctgattgattctgcagaggcaatgaaagcggtggatccaaagatgtaccgttggacatggctcggagaaccggttggcgtggatgaactgatctattacatgttttcggaccggcatcggagcaaaccggaagaggggcgcggctatgaacgggcatatatcggtggcgactatggccagcagaacgcaacgacctatcaggcgtttgggcttgatacatatcggcgcaagtttccagggctgggcgagtattaccacagcggtcgagaatccgggacgcagcgcagcccgtcagaatatgctcacgatttggtgacgtttatggaagagctgcatgagcggttctggataaaggtgttttatgtatgcctggatccgtcggcaaagggactgcaggaggagatccgccgggcgaccaggatcggactggactatcaggtgttgatccgggatgcggaaaatgatgttgcacttggaatcagtcgggtgcagaaagctttcgcttttgaggtcctgagcatttcacctgatcaggagaatctgatcggggagcttggaatttatgaatatgacaaaaagtcgatagaaaaaggaaaagaagtgccgatcaaggagaacgatcatgcctgtgatgcacttcgctatgcggtaatgacggcgtggaagcagatcaggcactggcttccggctgagacagaagaagaagtgtctataacggatattatgcggaaggaggtcgaggacgaaaatggatattttcagctatttccagcggcgcggaattgataccgtcgatcagtcgttttatcggatgattgctctgtgggagagctggtacaaaggaagggtccggaacttcacattctacagggtttatagtggaaaaggaacttatgcgagaaagcagcgaaaaagcctgggaatggcaaagaagctgtctgaggatattgctgatcttctgctgaatgagcgcgtacagatcacactgtcggatgagacgacgggggattatgtaaatgaggtgctgagagagaaccagttccttgtacttggaaatgactaccaggagcggaaggcgtattccggcacggtggcctatattccgtatttgtacgatgcagaggccacagaagatggcacgatcctgtcaggcaagattggcattgattatgtgagcgcatccaatatctttccgatcagctggagcaatggacgggtcacggagtgtgcatttacttttacaaagaccgtagcccgtaagaaatacgtccagatacagatccatcggctgcatcaggggcagtacatcattgagaataccgtcctggagtgccaggcgggaagccgtgagggaaaggagctcacagaagcggaatggaaacatcttaagccatttcagaccttattcgcacgggtcgagacaggatcgccggaaccacagtttgtgatcgaccggctgaatatcgtaaataatgcggatgaagatagtagcaatccaatgggaatagccatctatgcaaacgccatcgatgtgctgaaaaagctggacattgaatatgattcctattcgaatgaatttgatcttggccggaagcggatttttgttgctccggagctgctgaagaatgcggatggctcaccggcatttgatccggaggatacggtgttctatcagctgccggatgattatgataatagtcaggaagggctgatcaaagagataaacatggatctacgggccgatcagcacagcaaagctatcaatgatgatctgaactacctttcactgaaatgcggctttggaacggagcgctataaattcgacagttcaggtgtgaagacggctacggaagtcatatctgaaaactcagacatgtatcgcatgattaaaaagcatgagattattctcgagaatgttctgaagcagttggtgcggatcattatccggcttggaattgtgcttggcgagccgctgaatccggatgctgagatgacgatagactttgatgattccattatcgaggataagcaagcggaacgacagtctgatcgtcaggatgttagtatgggtgctatggctctatgggagtaccgtgcaaagtattatggcgaaaccgaggaaaaagcaaaggcagcagtgcagcagccagagaatgcggtgattgaatgacacagggtgaaatcgagaagctcacagtaaagacccagaatatcttttcacgtctggagatccggatcatgcaggatatcatccgccggattaaggagaatggatttgtcacagcatctgcagactggcagattagccgcttgaagcagcttggcgagtcagagcagacgatcaggcagctgattcaggatgcacttggagccagcgatgaagagctggaacgtattttttcagatgaggtctatgaggagtattatggtcatgcgcatgcttatgagattgcaggcgtgcagcagatcccgtatgaagaaaatgaggcattgcagcggacagttgaagcaatgaagctgcagcttcgcggggaatatcagaatctgaccggttcaatgggctttgcaatccgtggagcagatgggctgattaagtattcgccggtgatgaacttttaccgtaccacattagataatgcagtcgcagacattcattctggagcatttgattacaacacagttttaaagcgcaccgttacgacactgacaaattccggcctgcggtatgtcaattacgaatctggacacagcgaccgggtagatgtggccgtcagacgagcagtgctgaccggtttccgacaggtgcagggaaagatcaatgaacaggtggctgcagaacttcatacggatatgtatgaggtgacctatcatgtaggggcgcgcccatcccatcagccatggcagggcagggtgtggagtatggaacagctgcagtctgtgtgcgggatcggtaccggtcctggactgtgtggctggaactgttaccatgattaccggccattcccgccggggtcggtaagaacctacacagatgagcagctagaagcgatgatggaacaggagaacgcgccaaaggagtacaatggtaagcagtataccacttatgaggctctgcagcagcaacggaagatggagcgaatcatgcgggcacagcgccagaagatcaagcttttgaaggaaggcggcgcggatccgaatgacgtgacccttgcaagggcaaaataccaaggccagatgcagaactatgcggcattttcaaagaagatgaacctgccggagcagaaagctcggatcatgcaagacggtctgagggggcggtttatgccgacgaagacagagctgaagcaaatgacggctctgggattgaaaaatgcagcgggaaagcctataattaaggttaagagggctacgttaattgcagaaccaaatagcattactcaggtgacgaaaaagaagggtggagtcgaaagaaattattacgatcaaactggtagacagtataagcagatcagtaataataaccatgggaacgcaaagcaacattcgtacggagtaaatggggaacatgcacatgattatgtgtatgaagaaggagaactggttgatcgaccaactagagagctgacagaagacgaaagaaaggagaacgaggatatattatgacagcaatagaattacgagatagaattaaaagcttatgcacacacgttctgtttgactacaacggaaaagaatgcggtgttgatccgtttaatgcgaaacacttcgatatgtggtatggagatacctttatggaagcgcacagcatcgacgaagttatgaaaactcctttcttcggagggaaggctttagagaacattgtagatcagcttgagaatgtggagggcatgtagcatgtatgcgcctgattctgttatgtgtcctctggtggatgaagaaattgaagcgattgactgcattgtaaattcggatgcagtagataggatcttaaagaaagacgtaataccggaaaagtttaagaagaagccggattgggaaaagatatgtgaaaagtgtaaatggcatggatattgacaccactgatcagaaaatgattggtagtgattttatatgagaatatcaatacagttatgaaaacaatgatggcacgccaaaagacgtgttatttttgtgcagatttttaagaaaaggaggaagaagccatggaaaagataagtatccagagaaaagcgacaatagcagacacggaattacagtttgatcttgttgcgatgggattgaattatatggtgcctggtagttacctgataaaaaacttcacggatggcgatatctatgtcggtttcgtgtccgacagggaaaagatgagtctaattccggcagaaacagcacaggtcttttcgggtacaatgttggaggggaatatcttatatatcctcccaacggaaacgtccgacaaaggagtggaagtacaatgcttacgataggacaggacatcatatccggcaacatgggctatatcggcaccgaacccggcaggctgtaccggatggggccacaaagtaaggtggcagaagcttccggggaaccgccggtggtgttggcagactgcaagaagaagccgttgaagggtttgacaatctacggccggagcaagcaggtaactaccaccggggcgcagctatttccgcctcaaagtctaggaagccaagaaaaaaatggcataactattgattgcatgtatgatggaaaaatacgtatcagtggaactgctgaaatactaacggatttttacgtatcgaggctacagttgtctgctgggacctatacttcttctgcgggagttaatattgatgcaagtgtattaagatatgcgcttgttacgcctggaggagtgccatattacgatgtgaaaggtgactatacaacagatacgatagctgaaactattgatgtatcattgttgttgagagtatacgctggaaaaacaatagatcttaccgtccagccaatgctcaacgccggctccgccccgttaccctggcaaccttatacaggcggcaaacctagcccgtcaccagattatccacaggagattgagagcgtgggtcaggggaagacaattgggattaatgtgagagggaagaatctgttaaactatgaactgttggctaaaaatgagccacgcgcgtatacagttacaaacggggaattcttcgttaatttcaataacggaatttcatggaagaatgtgccagtatacggtacattaaaaaaaggaatttatacaatcttcggggaaacgatagaaatcaataaggcatttgaaaatgaaagcattggatatatctcgaacccaagcaatagtaaaacctttgaactcacagaagatacaacagtcaaaattaaagtaggaactggatatagtgattatccacgaatttcgtacccaatgttggttgctggttccgcagccactgcctacgaaccctaccacgaaccgcaatccatggacatatccacgccaaacggattacctggcattatagttaggtctggcggaaattacatagacgtagctggacaacaatggatctgcgatgagattgattttggtcgtggggtatatgtgcaaaatattaaagtgagtaagagtctaaataagctgggatggtttacatggggcgctaataagggtactaatggcataactggcttttttacatatgacattgatatccccaaaatagataatgctatttccaatattgccatttataatggcgatatatatggcgggaaaaaggcaggcatctgtacatcaacaataaagccaacgtctgcaatagcatatatgatgttatgtgtccgcaacgatacaatatcggatatttcaagcgataatgcggcgataaaatcatttaaggagatgctggccaaaacagatgcttatatgatgtatgttctcgccacccccatcgaaacaccactcacctccgaccaaatcgccgcatacaaagccctccatacctacaaaggcaccaccatcatagataatgacgccggggcatatatgacgatcaagtacaacacatagagatatgtgttatttttatacaattttttttaagaaagagaggataaaaaccatgaaaaagaaagtaaccaaaagaattgcaattttaatggcacttgtggtgctggtatgcttcacagctactggctgtacggaagcagatcaggtgagtgcgaacatctcgaaagaagcggataatttcaatgtgaccaggaaactcaccgtcctgaatgccaggacagacacaatcctgttggaacttaccggtacatttgcactgaagaataattcatcaaatgagctggaagtaatcattgagaccgcagaaggtaagtaccagaaagactatgtatacctgaacgattacaccatgtacgtagtggaggatgtctctggcgcttctgtggataagtatcattacgagattaatttcctgccgcagtggagcctgaaaattactcacagtgattgatttgcgccggcgcaaaaaggaggtaaagatgatagaggtaatgattacttctatgggaatccagatgaacggtcacgccaacagatctgtaaatggtcaggacattgtgtgtgctgccatttcagcactgacctgtaatctgatcaattccctggaagaattgacagataaccggatacgtgccgatactgattccggaaaaatagttattgagtgggagcgtctggatgagagaggaaagctcctggtagactcctggtttcttgggcttacggccattaaccgggaatacaattgcatagagtttgtttaaccgcctggaattacagacggttttattatgcccaaaacatgaaggcagtaaaagctgtgggagcctgtcgaggctatacggagggaaaacatgcgaaacaaagaaattatgaatttacacattttcgatgaaggcggtaacggcggatccggtggagctgcgggagccaacgggaatgctggggctggcaacggcggccagggtggaagcgccgggtacacatttgagcaggccgaagagatcgcgaacagcagagcagaaaaggcgacgcgcgcagcgctggcggattatttccggaaacaggggctgagcgaagaacagatcacgacggcgatcgctgactttaaggcaaagcagaaggcacagcagccggatgtggaagcgctcacacaggaacgggacgcagcgcagaaggagctgctgcagctgaagaacgagaaggttcttacggcgaaaggcgtaaaagcagatgacctggactatgtgctttttaaggtcagcaagctggtagatgataaaacagattttgcgaaggcagcggagcgcttcctgaaagaaaacccgcgctataccggggcagggacttatcgggtgagcacgtcaactggcgaagataaccagagcggtggaagcagaaacagttccatcaatgatgcgattcgcgccgcagcaagaagataaggagatgatgcaatgaccagaaacagaatgaatttaagaatttttgataacgatgcatctttgatcgacagatccggtgcagagtccctgatttcagttcaggaggcgaacgagattattcagggggtggtcacccagtcggctgtactgcagagaggtcgcaagctggcaaatatgactgcgcgtcagtataaaatgccggtactggatatgctgccgatcgcatactttgtgaacggcgataccggtcagaagcagacgacaaagcaggcatgggacaagaagtttattgtcgctgaggagattgcagttatcgttccggtgccggaggcggtgttggatgacgctgactacgatatctggggcgaggtacggccgcgaatcgtagaggcattcggaaagaagatcgacggagcggttctgttcggaaccgataagccgtcatcgtggagaaatgatatcgttgctacagcgacagctgccaatgcggttgtcaccctcggatccgctgacaatctgtatgacaagatcatgggagaggatggttccattgcgctggttgagaacagcgggtactttgtaaatggccatatggcagatatctccatgagagcaaagctgagagggctgaagaataccaatggtgatccgctgtttaagagcgatatgcagagcaatactacatactcgctggatggcagccctatgaatttcccgaacaatggttcttttgacaagagcaaagcattgatgatttccggagatttttcgcagttggtatattcgatccgccaggacatcacgttcaagctcttcaccgaaggtgtaatacagaacacggatggctcgatcgcatacaaccttatgcagaatgacatggtagctctgagagctgtcatgcgtcttggatgggagattccgaatccaatcaacagcgtgcaggagaataagacgaagcgctgcccgttctctgttttaaaagctggcgtgtaaggatgtgatcagatgtatgcagactatggctattacatcagcagctacctgctcggccgggatccggtcattccggacctgatttttccgtattgggagaaacaggccgagcgtgtattaaatcagcatacccacagtcgtctggtggcggactgtgggctgatcacagacgaggtgcgggattgcacctgcgagcttacagagctgctgtatcaggcggatcagcgtgcacagcaggatgcggcacagggcggcccgttgcagtcgtactcgaatgacggggagtccgggacatttgcgctggctgagtccatttatacggaatccgggaagcagaagaagatccgggagatcatccggagacacctttctgacaccggtctgctgtacgcgggggtggagtaatgaaccagaattataatcagacgatcaccttatacaaccggatccggtcagcggacagttcagataagaaggagcactggcgcaggacagtgctccggggctgtttctggaaagccaatattggtacatacttttcagataagcaggcggcagtacaaaatacctatgtggtccgtatcccggagagcgaccggtatgcagtctatgcaggatttttgaaaagcgccggagcatttacggtatcgaaaggtgacattgtggtgcatggcgagtgcaaagaggagattacaggagaagccggatacactgctacagagctcctgaaccggtatgcaccggaggctttccgggtgactgcattttcggacaatacgtcatttcctgtagcaaagcattatcgaataggtggttaaatgaaggtatcattttcatggaataagtcagaggcgcagatcgtaaaggagaagacgggcggcaaggctggccttcttttttttgcaaatacagcaaaacggctgatggatccttatgttccggcggacaatctggttctcgctcagaatgtacaggtgtatgtggaaggggatgccggcatcgtgcattacacgtccccatatgcgcattaccagttcaagggcgaggtgtacgggccgaattacccgatctcagacggcggtgcggtggtagggttctattcgccatcgcacaagtcaccgaccggagcaagcttgcattacagtactatgcggcacccgctggccacatccgagtggcataaagcgatggcgacagccagaggtcaggagcttgcaaattcgtatgagaattatctgaagggaggcggcggtggatgacaaagcacgatgccatgaaagtgttttttgaggaaaaggtgcaggaactcgcaggagatttcctgcattttaacttttcaccagaaagccccggcagtattgcatttatcacgaactattcggacaaggtgcggaagaagtacatccggatcggcgcggaaaaggaatatgctttcacgattcttctgacagagccgtattctgctgatggggatgatatcaacctgcgggcaatgaattttgcccaggcattcatggattggctggatgcacaggacaaagccgggaactatccggaatttccggaaaattgcaaaattaagaagatggagaacctgcagaacatgccgaatctttccggagtcgatacgaaggcatgggtggcacgatacatgctgcagggcagaatcatttattttgaggaggacagagcatgaagttaaatgaactgatgaaaggtgtcacgccggatcctgcgtatgagggctgggtgacgaacgatgattttgtatttgcgatcgacctgacaccgggcgcggagcaggcaactgaggtcaaaaattttgcagtcgtgcagatgggcatcgaaggtcttgacgcacagctgaacccgatcacggtggataagacttacatccgtgccggaaagtcgacacagcggacaggaacgcagcgaacttttaagatgtctggtgaccgctatatcggtgatgaggcgcaggattacatcttttctcatgcgatcaagtacgggacaggcaatgcagttgttaccaactacgcttattttaatatcctgaccggaaagggcgagacggggcaggtatcaattatcgtcaattcagagggagcaggaaatgccggtgagtcagcatccgtagacgtagagttcaaaaagatcggatcggtaccggcagagtatacgtggtcagcaacgtaaaggaggatccatatggttgtaaaagggaaagaaatcaatttcaaaatttcaaataaaaatcatgcaagaaattttgaggaagccttgaaaggaatggaaaaggcagaaaaagagatcaagagcaagacggttgatacaacgaagatgtctgtggtggtcgactatgtcattgaaatgttccgggatttcttcgttaaggctaccggggaagatgtacttgcggactgtgaagacatggacgaggccaaggaagcctattatgagtttctggccggaattaagaaacagaaagaagcattcctgcagccgttcagccttgaccgcgtgaaatgaccgagaatatcctgatcgatccgctgccggacagcgtggtgatcgacggagagcggattccggtgaatccgggctaccgggtacatattctgatcgagatatgcatgttctccgatcgggatgacgagcagaagctgctggatgcgctgcatttgttctacggtatgcggattccttcgaatatagatgcggcgctggagcagctcctgtggttccaccgctgcggagtggatccggaagaagaaaagcggggtgggcatggggcatatcagaagcagctccgtgcctactgctttgagcaggacgccgggatgatctacgctgcatttcgggcgcagtacgggatcaacctgaatcagactccggatgcggatctgcattggtgggaatttaaagcgatgttcgagtccttgcgggaagatctgctgatatcgagagtcatgtactaccgcacggcgaacctttccggaatgagcaagaacgagaaagcatttattaagaagatgcggtctgtctacgcgatccggcagccggaagtcagcatggacgcaagagcaaggctggctgcaagaaataaacacatgctggagtatgtaaggagccggacatgcagaaaagaataaaatgtcctttctgtggatatgccatgccgattttttacagcgaaaaggcgacggcaaaagggatatccgtgaagtgtaaagggcggaactgtgggaaaatgttcgaaataacaattaaagagggtgatcagatcaagtagagccattatgcgccgatgatctcaactcatgaaagaggtggggatattggcagatggtacagtaaagatcagtacggagcttgatggcaaaggaataaagacaggcttatcagaaagtcagaagaccgtaagaaaaacgttcgaggagctggcaaaagaaagcggaaagaccgttgaagaattaaaggctgacgcaaagaagatcgcggaagaatatcaaaagcagggctgtgacatcccaaattcatataagaaagcttataaggaaatgggcgtgtccagctcgaaagcaagtaaagaagttgtcgatgacgctgagaaaatggcggatgcgcatgaagacagctctaaaaaatctaagactgcttggaaaaaagcgctttctgcgataggaggctttgccaaggaaggcctggtacttgctggaaaagtagcagcaggcgctatcagtgcagttgtaggtgcatctattaaggtcggtgctgcatttgagtcagagatgtccaaggtgcaggcaatttccggcgttaccggagatgagctggcgcagttgactgcaaaagcaaaagaaatgggtgcaaaaacaaagttctctgcttccgagtctgcgcaggcgttcgaatatatggcaatggccggctggaagactgacgacatgctgaacagcatcgacggcgttatgaatctggccgcggccagtggggaagatctggcctcagtctctgacatcgtcacggatgcgatgaccgcgatgggtcttgcagcagatggaacgacgaatatcgtaaaagatggatatacgaaagaggtatccaatgcgtcgcattttgcagacgttctggcggcagcgagctccaactcgaacacgaacgtcgcaatgatgggcgagaccttcaagtatgcggcacctctggccggagcgctgggttatagcgttgaggatctggcacaggcaatcggcctaatggcgaattcaggaattaaaggatctgaagccggaacggctctccggagcgttctaactcgcctggctaagcctccgaaggaagctgcagaggcgatggagcagtacgggatttccatgaagaattccgatggaaccatgaaatcactcatggaagtcatggagaacatgcgggattcccttcaggggcttccggaggatgagcaggcggctgcagctgcggcgattggcgggcaggaggcgatgtccggattgcttgcgatcgtcaatgcgtctgagtcagattttaagaagcttgcgaacgcgatcgacaatgcggatggaagcgccgagcagatggcggacatcatgcagaacaacctgactggtcagcttacaatcatgaggtctgcagcagaagcgcttggaattgagatctatgaatctatccagcaaccgcttacagatattgtaaaagccgggacgcaggcgatcaatgagctgacagaagcatttaagaccggaggcgtgcaggggcttatagcggcaggtacgcagatggttacggagtttatttctgttatttttaacaggattccggagattgttacaacgggaattgaagttgtaggcggatttctgaatggattgctttcagccgcaccaacagctattcaacaggcttcgcaaatgctttcgtcatggacaaataatgttttgtcgaagcttccggcggtaatttcagcaggcggccaggtaattttaagtttgctgaatggtcttgtaaataatgccccgaagattatccagcaggcggcgcaactggtaattgaatttgcacatacggtattacagaacctgcctcagattttgcaagccggaattgaactgatcgggaaattgcttgcaggaattttacgggctgttccgaaaatcattgcagcgattcctggaattgtttcgagcattggaaaaaaattcctgtcatatgactggctttcgattggaaaaaacattatttcgggtattgcatctggcgtggcaaatgcagccggaagtcttgtggatgcggcggttaatgcagcaagtagcgcgattggagctgtcaaaaattggcttggcattcactccccatcacgtcgagcaagggacgagattggagtccagatgatcgccggtatcggtgagggtgtggagcaggagacacctcagctggagcaggcttcagaagacagcattaagtcatcggtcaaggcgatgaagcgggcatccgcatcaaagtttgtggcggatatgcaggccgactcattccgggcggcagagaacaatgagatggcagcacgggagcaggctcggaccggtggatacggtccggagacggaggacgacggagagatcacgattgtgaatcagttctatgtggatggagacaagcttgtggaaaagacagtgaagaagactaagaggcagattgagaaagagacgagagccgcgcggctcgcgaaaggggatgtggcatttgcctgatttttattttgaagaccaggacagaagaagatcaaccgaatacgggatcctgctggaatcttacccaacgattaagactgggcagccacagaaggactctgttgtgattccgggacgcgggacactgtatctcgataccgggacgtacagcgatacagtcatcacgctgcagatcggcatgacggaccgaaacctgaaaagcctggatatttctataccagattatgcggtaaatgaaaatatatctggtttgtactttgatgtgctggaatacatttccgcaatgaaagagatttcattttgtgataatccggattacttttacattgtgaaaaatgtggagctttcggcaacggcgcaggattcagatgtttccgtggatttcacagtgacgctgacctgtgagcctggtgcatatctggtggtcggaaagcgggagcatgaagttcccgaggtgcttcagaaccggtacaacgttgctcatccggtttataaaattaccggtgaagggaactgcaccctgaccatcaatcgccatattgttacagcgaatgtagcgcagaatctgacgatagataccgacagaatggtagcataccgggaagatgggacactgcagaacacagcggtgaccggagactatgaggacatgtaccttttgcctggacaaaatgctattaccctgacggaagggttcacattaaaggtgatcccgaactggaggcggctatgatacagatctacgatgcagacaatacagaatacagcaaaaatggagatacggtgttgcttccgtcgcaggcgtatgtgcatgcgatcctaaacgggacatgggaggccgtgatcgagcatccgattgatcaggaagggcgctggaagcatatcgtggatggcgcggttgtaaagatgccgagcttcaacggccagcagctcttccggatcaagaagagctataaggcagactccgggatagaggcagagctggatccgattttttatgatgctgcagacgactgctttttggtcgatatccggccaacggtaaagaatggtcagcaggctctggatctgatgacagcgccaaacgcaaagtatacagggacgtctgatatcacagatgtttcgactgcgtattatatgcataaaaatttgatcgaagcaatcaacggggacgaggagaacgcattcacgcagcgctggggcggcgagatcatttatgataattttcatgtaaccgtcaataagcgtgtcggtggtgattatggcgtttcgatccggtatggaaagaacatcgaacaggacggcctgacagaagaggtcgacatccgtgacgtggtgacccgtatttatccgaaatcctacaatgggcatttactatctggtactggatatgtggattctccgttgatcaataattatccggtcatcaagacgaggacgattacttttgaggatgtgaagctgcgggaggatgcatctgacggggatgaggaagagggcatcacggtatgtgacacgcaggatgagctagatgcggcacttatcaagaagtgccaggatcagtttgcacttggccttgaccggccatcagtgacgatagaagcggctgtagtgctcctgaaggggacaagcctatacgatgattattctgagctggaaaacgtctcgctgggcgataccgtgcattgcaagcatgtcaggctgggcatcacaacggatgcgcgggtatgtgagctgcagtatgattcgatccgaaaaaaggttcagtctgttaagatcggggatttttcgaattctgttttcgaaaagctggcatcatcggccagtcggatcgagaaagtgattgatgcatccggaaatgtagttgctgatcgtgtcgcaggcattctgaacggtatccggacgcagctgcggattcagtcgacagcggcgaaaaaggtagaaggtcgggcgttttgcattgaggatctggatccggaaagtgaactgtttggcgcaatggtctgggggacacagggactgcagatatcgaccagacggacgcaggatggcaaggactgggactggactactgccgttacggcaaaagggattgtcgcggatgcgattttgaccggattactggcagataagacggggacaaattactggaatctggataccggtgaatttgccctgacctctgcagcgaagatacagacaacggaaggcgaggtcagcctggcggactggatcaagacgcagtctgaagcatcaaagaatctgcaggttattgtcacgcgggatctgattggaatcccggtcggagcggatggccagcatgattttgaaaatgcatctgtgacggtgcgggcgatgtacggggatgaggacgtatcagatcaatgcacatacagcatcacagaatccggcgtgagcggcgcatgggacaagacgaatgcggcatataacgtgacttccatacagacagaatccggaagcattcgattttcggtatcatataaatctgtgctcactgcgcagcgcattgtgcaggtgcaaaagataaaggatggaaaggatgcgggatacaggtacctggcgctttcggtgcaggtggcaaagaaagcgggcgggaagatcgttccggagtttgtcgagatatcggcgctgcagcaggacgcggggactgcaaaggcatatgaaggccggataaagattgagacgaccagtgacggaggtacctggactgcagcgtatgaatcggcgggcgatgaatcatcacacacctatacgattccggatgtagatgcggttcgcgtgagcctgtttgctgcaggtgggacggagcagctgctcgatgtccggaatatttcgattgtgcaggaagcggatgcgcttacatcagatgatgtgtttaatctgcttaccaagggcggccagatacagggcctcttccggatcggggatcagatctatatcaacgcatcgtatttgcggtcggggacgtatacggtcgggggatctaagaatgaacgagggtctatacagatcctcgatgaatacgggaatgtgaccggacttattaatagcagcggtgtagatgtaatgaacctgcagatcggcgaccggattattgtgtacgatgccagcaaaaagaaaagcgtgtcgattggatttgaaaacgatacgggtaagttctggatcagcggcgtgcagatcacaatgcaggatctgtacagcgcagcggcaacgcttaaagatgcgacgataacatctgcgacaattcagaatttgacagtatcgggggatctgatttcaaatggcggtgcacagtttgtgactcttggagcatctggtgaagcaaatctttcagataccaacgtagtcggaaggctggttgcgacacaggacattgttgcaggtgggtatcagtcgttgttggatcatacgcatcaatatttgaagcatggaacaaggcaattgatattggacaatacaggaagcgtgcagcatgtgcggacgttcaataatggcagtgtgacaacaaatgatgtgaatctggggtcgaatgcatcaaagttcaaggccgtctatgcgaccaacggtacaattcagacatccgatgagcggaaaaaggacatcactggtggcatggataagcggtatattcaactgctgcagcacctgaagccgatcctgtaccgctggaaagaagacgacaacgggcttcacgccggatttggcgcacagcaatttgagcaggcattgaaagacagtggcttcacaaaagaagaggaatttgcggtgatcaacgaggaaggcgagatgggactgcagtattcggaagtgataccggtgctggtatatgcggttcagaagttgatggaagagaggagagaattgcagtgaaaaatataaatgcgattgcaacagcggtttttttgaataactcgaagacagccatggcggcgacggtctggcagtatgactatggtatgaagctgcgcttgcagggattacagctgcctgcggcagtggagatccatttttctgtgcaggagaccagaggtgaagcaataaccagagtcggtacgacgcaggacggtgtgacagacgtcacgattccagattccttattagaaaacgacgatgcaacgcgcaactatttagtatatgcatttgtatacctcacagacgagacttccggtcagaccgaatacaaagtgacaattccagtcaacagccgcccacgcccaaacgggcgcaataagccagaggatcaggaattgttccggcaggcgattgatgcagtaaacgcagcagccagccgcgcagaaacagccggcaccacggcgcagtcgtgggcagtaggcggcaccggcacgcgggacaaagaagataccgataacgcgaaatattatgcacagcaggccaagaaggcggtggatgatgcagcagaggcgtttaagggatcgacagagcagatcgagacgaacaaaacggatattacggcgctaaaggaagatttaaatgcaatttcggacgagagaaacttcattcctattaaactttctttttccgataatgttggtaagtatattactactaatggtacaatttcaacgaataaatttttcagtatctctgatttaatccccatcgaatcagaaaagaagaaaatgaggattacttttaagaaagcaaatccaagcatcgcaagggttgcttttttgaaaaagaatgtattatctaacgataatgtgattagtttttttgtgaacggagatagcggaacatttgatgtagaaattccaaaaggcacaaaatatgtcgttgtaaattccgatactgatgaacgagggttaacagaaaatggatatcctaaagctagatttttcccgtcttcggcaaatgtggacgagttagctaaaagtgtaaatggtttaaatgctaaagtaggtgaaatttccgagaaattggttgatagtattgtggaaaccggaattgaaccaatatacgaaaaatatttaggcaaatatgtaacaccgaatggtggaattagcagtaatgtttattatcatacatccaatcctatcaaaattgatgaaatggttgatagaattaaagttgaagttgatacaggcaacaaatatataagccgaatcgtttttctttcatctgattcgctcacagtaagtaatatgatatggttttcagtagataccacaaaaccagttgcagaatatgaagtcccgaatgatgccaaatatttttgtgttgctaaagatgttgacgaaagtggaaatgcacatgatggctatcctcatgtcattactgtagcaacgaaaaaaagtgaaatatcagacttgcgtgatgaaattgacggcatagaaaaaagtaatagaaaacctgcattgaatatcggttctaaaatttatgctgttgtcggggatactttacagattttcaaaaaaagcattgttgattcacttggtattccatatgttatgaaaattgagtccgctaaaggtcgtgcatatccgagatattgggagtatacaccgaatgctgatgatgtaggaagcagcgaaataaagttttcattactgaatgtagatggttctgcaatagatgaaagaatagtatcactcattacagtgaatgcgtcaaatacatctaaaaatgtattaaacattggtgattcaactatggcaaacggtgaaattccaattgaattatcacgaagaatcaagggaacgaatggtgtagcaacagcccctacagcacttgcattatctaacattgatgtggttggtagaattaaaaacggagataaaactgtcgggtgggaaggtactggtggttggacttatcaaagctatacatcacaaggttcaagggctgtgagattccaagttgcaaatgcacagagcataacagttaaagacttgataagaattggtgctactaattcatatggatattatcaatttgaagttacagaagtaaatgttacaaacggaactggcaatatcagagcagtatttagctatacaacaccttattcatcaaactttttgaatgaagtatcggcaagcggaaatctgacgaacgcaaataactcggttgtaggctcttacttgtcgttcaccgaagaattttatcagccgttttggaactcaactgcaaatcagtttgatattaaaacgtatgtgaaggattattgtgggaacaaggtcgattatatattcatcctgttaggtattaactctttgtatggcactaaacctttcacaagtgttgatagtgttttagactcttgtaaaaatttattgagaaaaattcatgctgatttgccaaacacaaagatattgctttccacaaaccatcttatatcgcaaaatggcggtcttggttttaattataatgcgcaaacttattttggtcagtatgatgtgacagtgattaatcatcttatttttgccatgaataaagcatattacacacttgaaactgacacggagtttatgcagtacgtcgaggttataaatacccatgcacaatttgatgcagacaatgcatttccgattacaaccaaaaacgtaaacacgaggtctggtgaaaccgaaagtgttggaactaatggagtgcatcctacaaataatggatattggcagattgcggatgcggaatttagagcattgcttgcgaattaatttgctaaagaaagccatcgaaaacatgtaagctaaata

SEQ ID NO: 3935 - DNA, 25608 bp, Unknown
  16S sequences of unknown bacteria
aaagccctgcggtttatttctgttgcactttccttgaagtcgccttcacctgacgttatcaggcaccctgtcctatgctgctcggactttcctcatggtcttaaaagaccccgcgaccgtataacaaactcaaatccttatatattatagcatatcttgcgaaaaaagtattgcttttttacggaaaaaatagtaaaatataattagaaattttttatcaaggaatcaaatatgaaaaagacgaaaatcgtatgtacgttagggcctgccagttctaccaaagagatcatttccgccatggcggacgcggggatgaacgtcgtgaggctgaacttttcccacggtacgcacgcggaacacgccgaaaaaatcaaaaccatcaaggaagtccgtgcagaaaagcacgtcccgcttcccatcatgctggacacaaaaggtcccgaattcagaataaagacttttaaagagggcaaagttcttttgaacgagggcgatacgttccgttttacgtccgaagacatcgtcggcgataaccggcgcgtgggcgtttcttacgaccggctctgcgaagaaatgcatcccggagataagattcttttaaataacggacttatggttttccgagtcagggaagtgaaagcgccggacgtcgtgtgcacggtggaagtcggaggcgaactctccaaccgcaagtcgatgttttttccggataaggagttgaatctcacttttctttctcagcaggataaggaagatttgcttttcggaatcgagcaaggcgtggactttgtggcgctttcctttgtttccaaggcgcaggacgccatcgacgcgagaaactttctgaacgaacacggcggagagcatatagacatcattgcaaagatagaaaatcgggcgggcgttaagcatttgaacgagatcatggaagttacggacgggatcatggtggctcgcggcgacctcggcgtagagatcccttacgaagaactcccggacattcaaaagggtatgatcagcagctgccgggtgtacggaaaacgcgtcatcaccgccacggaaatgctggaatccatgattcacaatccccgtcccacgcgggcggagatctccgacgtcgcgaacgccgtttacgacggcacctccgccgtcatgctttcgggcgaaaccgccgcgggcgcgttccccgtggaatcggtgagggcgatggctaaaatcgtggaacgtgcggaaaacaacgtggaatatatccagaccatcgacagctatgccataaaaaattcctccgaagcgctttctcattccgcctgtactttggcaaaagatctgaaagcgaaagcgatcgtcgtctgtacccgtacgggcgcgacggcgagaatggtatcccgtttccgtcctcttattcccatcgtaggacttacgacggacgagcgcgcttaccgccagcttgcgctcagctggggcgtcgtccccgcgatggcggacgaatattcctccgtggacattctcttttacttcgcgaaaatcgcggctttaaagagcggattggtcaaaaaaggcgatcgcatcgtcatcacgggcggaacccccaacggcaagagcggcaattcttcacttataaacgtcgaaaccgtatagagcgatcgagtcaatagaaaaacgggcattcggaaaattccgaacgcccgttttttatccggggatgcaacgcttttcgcgcttttttttaataaaccttatcggaagccgaaaaaagcgttctagttctttctgtttacggcgcttaaaatcgcttactttttccaacgctgcaaggaaggcagatattctttcaaagcggcccgcgcttcttccaaagtaaaattcgtccccatttctttattccattcgtttaaaaacccaagattcttttccgccatttcttccacggtgcaattttgcgtgaactgtccgtcccgatagcaatagaagcagaatgtatccgatttctcgcctttcttttccgttcctttttgcgtttcgtcttttatgagcattccgcagctttggcaaacgacgccttttctttccgtcgtctttcccgtcagataatccatcgaaaactgaaaggtatcggaaatttttttgagaatttccaaatcgggcgtaccttcgccgcgttcccatttagatacggcttggcgcgtcacgtataactttttggcaagctgcgcctgagtcagtccttcctctttgcggatattcgcaatgatctcctttatctccatctcacgcctccacagccattatacggcgtaaagggagaaaagtcaatgaaaatcccgtttggaacgcgcaacgaaaagttgcgtgttctcaatcgtccccgccgagcgttacacgcgcggtcaggcggatatcccgcgaagaggcgccgacgagtatctcgaattctccgccgaagatatgccagcctttgtgaacggtggaccagacggcaaacgcctctcttccgagccgaaaggtcaccctcctcttttcgcccttttccaaagctatcttttcaaagcctttcagttctttttggggacgaacgacgggactgtgcctttggcggacatacagctgcacggtttccttccccttacatactcccgagttttcgagagaaaacgtcacgtccaggccgtctttaccgcgcggctcgatttccagatccgcgtattcgaaacgggtatagctcagtccgtgaccgaagggaaaaagcaccgttttttcctgttcgtcgtaccagcggtaccccacgaaaatcccttccgcatacctctcggcaaagccgttgccccgctcgccttttgtcggcgtatcttccagacaaagcgggaaggtttcggagagctttcccgaaggacatacttttcccgtaaggatctccgcaagcgcctcgttcatacattcgcccgcaaaccccgtatagatcaccgccttcaccttgtcgatccagggcgtcatatccacggcgctccccgcttccaatacgacgacggtattttcgttttcttcggcgacggctaagacaaacccttccaattcgggcgaaagccgcagagaactcctgtcatagcactccgtttccatcagctgattcgtgccgacgacaacgatcgccgtatcggaaaaataggcaagttccgccgcttcccgctgtccggacacccaaggcagggcgatcggcaaaatgctgctggcgtaaacatacccgccgcaataagagatcgtcgaagcgggaagcagctcttggagcgtttcgcgaagagccctcgggctttgtgagggaatcacccgcgcgctgcccccgcctgcgacggacggattctcggaaagggaacccaaaatcgcgactcgtcccccgtctttcaaaggcaatacgccttcgtttttcaagagaacgacgccttccctcgcgccgtttaaagccgcctccctgcgctccgcgacagtaagcgccttaggagtctttcctcgcgccttttgcgcctgctgttttttatcgagcagtgaaaggatccttccgacgctttcgtttacctgctcctctctgatctttccgcccgaaatcccctctttgagattttcaagggaagcgggatgaaagggaaactcgatatcgagcgtcgcgttcaaagcgcggctcctgtcgtgcaccgcgccccaatcggaaataattacgccgtcaaagccgagtttttccctcaaaacgtcttttaaaatgtatgcgttttccgaagcgtaaacgccgttgacgggattatatgcgcacatgattgtccagggcgccgactctttgacgacgatctcaaagggtttggcatagatctccataagcgtgcgttcgtccagttcgctgctttggaagcacctgtcccattcccggttattggcgcaaaaatgctttaaagaagcgcctacgccctgcgactgcacgcccgcgacgtaagccgcggcaagtgtgcccgcaagatagggatcctcggaaaaatactcgaaatttcgtccgcaaagcggcgtacgcttgatattgacgccgggggcaaggatcatatccacccccttatcgatacaatccgcagcgagcgcctcgccgatatttctcgccgtcgccctgtcccaggaatttgcgatcacctgcggggcgggataacaaagagaaggctcccctttcgggaagctttcgctttcgatacgcaagccgcacggaccgtccgaagcggtaatactcggcagtttgccgtccagatcgtcggtcgtgaagccgtctttcgcggtgagaagccgaagcttctcctccgtcgtcaacaaaaatttatctttcatattcgttccgttgaggcgtttacgcttggttctccgcgggtttgtctatcgcggtatacagctgcatggcgacggggaaagaaacgttgcgataatcctcccaggggaacagatattcgtaatagagcgtttccccctcttggagataaaacttctgatcgggatagaaatccgccgccttttcgttagaggaagtatacagcgcggtgatcgtgccgtccgcggcttttttgtaaatggtgaccgtcgaatccttggtatccacccagccgcccaaagcgctgtctgccgctgcgtccaggcagaagtcgacaaacatttcctgcttggcgcggacttcgtagatgacggcgtcgttaaagcccgtatacatacgccagctttccatatacgcgcctttttccagatctcccagcacattggcagtgccgtccgccgtttcccgcgttcccgctttaaaatcggcaaccgttcccgtcaccttgccgtggcggaaaccgtagtcggcaagagcgttctccgtaatcatcgccccgtctgccgcccttaccgcgttgaacatcgccgtatagccgagcgtcgtcacttctccggggattttttccactacgggaggagcgggcttttcgtcgtattcgtctacctcgtcgccttcgggcagaaggcggatctgatcgagataaaccttgacgcctttggcgatgacgttgtttcccgtgtccagattccaaagcccgaagaaaatcttaaagccgtacagggaatccgcagccgagtatccctcgacgagcggagcgttcaaatcgacgacgacgcgataccaagtggcgccgttaaattcgtgcttatcctgccaattcgtagccacttcgtccccgtaaacatcgtagacttccatatcgtaatattgaccgtttacgttcgatgtaccgttgtagcccgcgccctcgaagtcgtaatacatccaaaaggaaaccttgcggcagtcgccgacgattcccacctgaccgagcatggagaagtcgtcgaaccaattggtatgctcgtcgaacaaaccgatttcataagacttttccccgaaacgggcgaatttattgctgatctggctggcgtaccactcgttgagataataaatgtcgtcctccatggtggcgaccgtctgaacgtaaaaattcttccgggcggtgttttccgaagaatcggaagcggtcacggagatcgtatacgtaccctgttccgaagcggtgaaagttttgtcggtgcccaccgtcacttcgtcgtcgccgaagtacaccttgacaataggcgcaatctcttctccgctgttgtcggaaacggtgattgacgtcaaatccaccttcgtgccgggtacggtcatgttatagccgagcagctcttccgactcgatttccggctccgtcatgtccccgacttccagcgtatacgatttgctttcagtctgattattgccgaacgtgactgtataggtaaccgtatagtcgccgagcgcttcgggcgtaaatacgttctgcgtcaaagacatttcctcgcccgccgcattggtcactttgacaacggccacataccagtttcccgcgctgtcttttgcgctgacgggcgaacaggtatacgtttcgccaagttcgacaaaagcggattcagggatcttgaactcttccagagtcaatgcttccgcagagcttgcgggcggattgccggagctgttctcatccgaactgtggacgggattcccgcacgccaccgcagcccccatcaacgcgacggacagcgccgccgcggcagtcaacaacaattttctcttcatacttttcctccatactatttattttttggcgggggaaagcggaaggaatccatccgttccccgcgcattttacttcttcacctgcggcgaatccgtcgcaaacgtattttttctgacgatccattttccgtccgtaaaatcggggaaagccacgctctgtcccgtcgcaatcgactgctcggaaagcacagaaatgctcatccatgtcgccatatcgtacacgtctatcggcatgggctttttctcggacagcgcgccgaaaaacccgtcgagcatcagcgtatccatgccgccgtgcccctcgctgccgggatgatagtcctgccaaagaggatgctcgtatttttcgtaatagcgaccgacgttgttatagtgagcgctccaatcgtaacattctcccgggttgtcttcttcgagatatacggaagaattttcctccgcgatgagtcctttcgtaccctgcgccaaaaaaccgcgcgaatagtatctcggattgcaggtgtcgagcgtaatcgttatcgtttcgccgttctgacatttgatgagcgtcgtgaccacgtccgattgattgaaccgcacacccgccaaagcctctatctctttatcccgggcatatttttccatacccgcggacagagagcccatcgaggtgagcgttaaaaatctgttgccgcagttgatatccaaaagtttggcgatgggtccgatctcgtgcgtcggataattttcgcagttgcggcagatgtattcccaaaggcgataatgcccgtttttcgccccgcccgaaatttcttcccgaagatcgtggcgatagccgccctcgcagtgcacaagccgccccaggacgcccgagcgcttcatattcagagccaaaagctccaatcggccgtaacagcagttttccaatagcataatgggcgtgcccgtcctttcgtagcagcgaacgagctcccaaagactttcgaggctgtacgcgccgcccacttcgcacgccgcggcgattcccgattccatggcgtacatagcgattttcaaatgcgcttcccaggcggtggaaatgagtacggcgtccggtttttcttcgccgaggcaccttcgataatcctcgtatgcggagggacgaacccgtccgtccgcctcgatcagcgacgcaagtttttcgctcttttcggagcaggtgtcgcacactgcgacgatttccacgtcgcttcgctttttcaagtcggctttatacaacgccgtacagcgattccccgctccgatcagagccaaacgcaatagtttcatgttttccctctaaattgtgactttttcgttttaaaagggtctttcttccctttctccgtcctttttagccgatttttgattatttaaccgattcaggaaagcgttacttttattttcaacgcttctcccaatacgccttgattggactccggctgtacgatatagtagaacgttcctttgctttcgggagtgagcgtgaaagaagtcgttttggtttcgcccagcatcttgcgataggatacttcttccttttcgcctacggcaaagacgttataatgccaaagatcgcctttggacgccgtccaggaaagagtgagcttgccgtctgcgtaagccgcctttgcctccgcaggcgcggaaggcgctccgtcgggcgtatattcctcataggtggcgccgacgtcgcgaagcgcccacgagggaaatttaccgtcgaattcatagggtttggcgccgtcggtataatcgatatgggcatactcggtgtaatcgaagcacttgaacacggagagatcggaactgtaatacttattccccgcaaatttgtaccagggaatcgcctcgtccacataattccaataaaaatctttttcctcgcccgtatagacgacgtgattatccttataagcatttcccgaccaattgtcgtcgccgttggactttttcgccgtaaacattcccttgaaatcggtaggcgccgccacgatgagattttcttcaacgcgaagatttttcaccgtgtgcatactttcgtccaccgcagcatagcgggaagtgaaatccccgacggagatctgaccgtattgattggtcgccgtacggttattctccacgcggttattgagaatggcgcagtctacattcgccatggtgccgataccgccgcccatacagtcatacgtatggttatactgcacaatacagtttttcgtgttccagtcgatgtcgatcgccatcgcgtcgtagccgagcttggaatcgtaattgttgtacgattcgttgaatttgatctcgcaggtatcgaggctgatcgccatgatgccgcattcgccttccatcacctcggcgacgtcgtacatacccgtattgtagacgaggttccgattcatcgtcgaattagtggcacagccgacatacagtccgatacaccccacgtcgtgcaccacgttgttatctacgaacacgttgcggaaaagggtgtgaagtccgttattctgattaattttttcgtttgccagccagccgtgcgcgtggattccgctccgaccgacgtcgtagacgaggttgtttttgatatatacgtttgtgaggacgtcggagggacaggaggcaaaagtgctttcgacactgcctaccgtaattcccatgacgttgctgcgcgtgcccgtcgaacgcaccgtattgttgataatatagatatttttatatttactcgtaccgacgtaatcgtaattgccgataatgcccgtcgccgcgccgccgtcgccgtccccgcggtccttccacttgacgttgatatccagatcgcggataacgagattggagcatttgttaaataccagcacatccctgacgtcccgcccgttttcgagcacgggtttcgcgtccgccgtaccgtaagaagcgatggtgaccggattgtcgtccgcgcccgaaacgttttcgagcaagagctgtcctttaaaagtatcgcccttttttaaaagtacgctgtcgcccgcgcccagagtcagggaagaaatcttatccagcgtgacggggtcgttttccgtcaagccagaattggagtcctttcccgccgcggcgacatagtaggtctttccgcccctcgactccggatacagcgccacgctctccgccagagccgcgtccgtaaaggaatatgccgcgtcctcttttttatccgccacaccactgtatttggcgtatacggagggaccttcgcctccgcttgcagactctccgcccccagaggaggcgtccgtattgccgccgcagcccgcaaaactgcccgcgacgcccagcagggccgccaaaaagagatagattgccgtctttttcattgtctttctccctttatctcatctttctttacaaaccgagctgcgttttcgcggcatcgttcatcgccttgatatacccgtcgccctgtttgagatatttgtttacatagctgttccaaatcccttcgcgcgtttcttttttcgccgccgcgttgccggaaatgctcgtcacgatttctttgaacgccttatccgtcgaatcccccagctgagagatcttcaacgcgtaatccgtccctacggaagcgtaggcgagttcgtccatatagaaatagtcgctcttccaggccgtgagaagctgcatttgttcggtgtagtgttcgatataatcgggaatgggcgtcgaccaggaaaccatacctttaatgcgataaataccgggcgctaccgtttcgttatagagagtcttgggaaaccccgaagtatcgttgccgaggagcgattcgatcgttttgtccgctttcagcttataatgtttgccttcgatgccgtaattgagcaccatcatgccctcttcggaaagcatccaatccatgatcgaaagtattttctgcttcttattgaccgtgacgtcgttgttgatggcgagaaaaccgtaataatttggatatccccacatctttttcgttccgtccactcccgtcaccacgggcatcgcgcgacagacgtcggaaaggctcttgccgcccacggcgaacgtttccataagatcgaggatccccttgcccatgggataggtggcgttataggtcatcatgcccgccactccgttgacgaaatcgtttttcattaccgcctgcgtggcagtagtggcgtaattggaattgataagtccgttgtcgtacatatccgcaatccacaaaaccgcgtttttgtattcgtcggaaatacattcgggcatccattcgcctttatcgtttttataccatccgtccgtattgacgccccacatggaaagcagaggataccaccaataaatgccgccctctttcgtccccgcatagccgtaggtgtcttccttgccgttgccgtcggggtcgcccttcgtaaagccttccattaagtcgtaaaagttgagataattgaaactctccgtttcgggatcgaccagcgctctccctgaggacggcttccagttcttcgcctttaacgcttcgtaccaatccctgcgataatacagggcgtgctcgttgatgatgtcgtcgcccgtggaatcgttcatcacgatcgggtagctgtaatagtccccgcccaaaagatttttcattccgtccgcggggaaacgttcgaacgcctttttgagattgggataatcgtccagcatcctcgaataattgaacaggtacatttcttccagccagcccgaataggacggttcatccctggtgtggaagaaaatgtcgggcacgtcgccgccgccgatatattgattgagctgcgttttccaggaggaagcggagccgttcatgatcttaaacgaaacctgaaatttattttcgatcgtgtccatgatcagctgcgtatcgtcgctgcgcgattgcaaggtgtccatatcgacgccgaaatattcgacgatgagcttgccgtcgcccgtgaacttatcctttttggtgccctcgtattcattgccgctctgaacggatccgccgctgtcgctgccgttgtcctcgccgccatggttgccgcaggcggtaaatccgaaaatcatgccgccggctaaaagcaaggtcgcgcatcttttcaaaagattcctctttatcataattttttactccttattctcttattttctgcgttttcaaaaagaaaacgcatgagttcgttttttatcttttatcccttgaccgagccgatcagcacgcccttggtgaaatgcttttgcaggaagggatagacgagtatgatgggcgccgtggaaacaatgatcgccgcgtattggatgctttcgccgatgacgcgctgccccactccgcccggattgtccgtatttgtgccgcggcaggtttcgatgataacctgtaacgtatacgccatggggcgcttgggtgcctcctgtatgaacagcatcgcggaataccagtcgttccactgtcccacggcgataaacagcgctatcgtggcgagcaccgctttggagagagggatgacgatgacgagaaacaccttgaaatcgcccgcgccgtctatccgcgccgcctcttcgagttccgcgggaatccccaggaaaaacgaacgcatgacgagtacgttgaagatgctgataaagtgcgggatgatgagcacccaaatggaatcgagaaggttcagatcccgaatcaccatatagtaagggatcagaccgccgccgaagtacatcgtgaagatgaaatagaagaagatgattcctctgccgggcagcgtttttttggagagcgcgtaagccgccatcgtcgtaatcgccaactgatatgcggtatcgacaagcgtgacgaaaacggaatttacaaacgccctgccgaagttatacgtcttgttgacaaagatcgttttatatccgtcgaactgcaaattttttggaaagaaagcatacggatagctgataatatccctgtcggacataaacgactttaccaaaatgctccaaaagggatacagcatgacgacgaccagaaagacgaggagaaaataattgacgatcgtcagcgcaatgtcgagcgcgggctttttcattttcatcggtttgcccgacagagcggaagatctctttttaaaaatagtatccataatcagtaaagactttcccctcctataagttttgtgaccagattggcggaaacgagcaggacgatattgatgatattcgtgaagagtcccgccgccgtcgccagggaaaattgcccgtccccgataccgtagcgatacagaaaagtatctaatacgtccgcgacgtcgtacacctgcgtgttatacagattgtagatctgatcgaacccgccgccgatgagtccgccgacgcggagtatcagcataatggtgatggtgggcagaagcatgggcaacgtgatataccagaactgtttgacgctgtttgcgccgtccaatctcgccgcctcgtaatactcgggagaaattcccgaaagcgccgcgaggtagatgatggcgccccatcctacttccttccaaatatccgacagcaccaacatcgccaaaaactgcgtaccgtccccaaaaatattcaattggattcccatggaatcaaacaataaataaatgggagcggagcgcccgtcgagcatggaaaacaacaatcccgcaacgactacccacgacacgaaatgcggcagataaacgatcgtctgcaccgtgtttttcaagcccttcatcttcaccgcattgagcatgatggcaagcaggatgggcgcggggaagccgaataacagcttcaatagattgatgatgatggtgtttttgaaagcgccccagaatccgtccatctcgaacaacgtttcaaaatttttccagcctatccagtcgctccccataattcccttgcggaaagagtatttcttgaaagcgatcacgacgccgtacataggtttatacgcgaatatcgccaataaaacgatagcgggaagcagcatgagataatatattttatgccgccatattctgcgtccgagttccttaccccaccgaagaaacttcctcccggacgagatggcggaaaccgcgttatccgcacacgcctctttggaagcccgcgcgttttccgtatcgttatttcctctcataaaaaaagccattccggcagcctccttcgggtttttgtgctcttattatcgcacacctgaaagctttttggaatggttaatttttaggtatcctttgtgataagtttatgaatttcgtgaaaaagggaagaaacaaggacgcgttctcatccttttcagacgctttttctttcccttccaaaaattccgtctacgaaacgcgatccgtcaaaaaatacgccggcgtcaattgcatatgttttcttttcggaaattttctctcgcgtcacgtaagtttaaacgccttgtcaaagccgattttcgtttaaaaaacgcttttgaactcttttttccccaccatttttccgtctgatacgtaaaagaaacagtcctttatttttcggactgttttcccgtccgccgcagttccgcacgatattccgtcggcgaaacgcccaagacctttttaaaaattttgctgaactgaaaataatcctcgtatcctacccgggaggaaatgtcccgcatactgcgattggtcctttcaatctgttcctttgcctgcttcatgcgataatcgagcacatactctttaaaggaaacgccgagcgcctttttgaacatctgacttaaatacgaggcgttgaaaccgtacttggaagcataggcggtcaaagactgcttttccccgtaagagttgtgaatatccttcaccatgcattccacgacgctgcgcccgtcgataaaggcgtccgcagcagccgtttcgctttcccgattttccccgacgcgctccgccgcaagctcggcttccttcgccgcttttaccttggataaaagtccgacaagttcgacggcggaaataggtttcgtgagataatcccgggcgccgattttcagggctttgacggcgtattcgaaactgtcgtaagcgctcaaaaacgcaaaggatatctccggctctttttccgctattttttcagcaagctccaatccgctgagtacgtccatgcgtacatccgaaaggacgagagcgggtttcaacgctaaaatttcttccattgccgccacgggatcggtgttgtagccgcaaatttcaaaaccctgcgcattccagtcgataattccgatcagttcccgaagcaacaactcttcgtcatctacaaaatatactttaaacatcctttctcctttcggcgcgccgaattttccttatctattatgtcatattcaaaacaattttgaaatggaataattatagagaagcttgtgtttattttatatattttatagtatgggcacatatgcgcagatttaaagatttttacgacaaatcctctttttctcctttaaagtatattctcaccagcgtcactactccgcccgaagcgagcgactttacccttaccgagctcttttcgcccgcaatcagctgcaagcgcttctgtatattcagtagagcgacgccgtgcgtttcctccgcggaactcccggcgggatttttcagcgttctgaggctttcgttcacctcgcgttcccgctctttctccattcccacgccgttgtcgaggacaaacaagagcattccgcccttacgttttctgaacactacgcggatacgtccttttttgtttttcagtccgtgtatgaatacgttttccacgatgggttgaagcagcattttcggaatagagcattccagcaggctttcgtcgcagagaatatcgcattccactttcggataacgcacccgttgcagattcagataggattccagcgtacggatctcctgtttgacgctcgccgtatcctctatggtcaaaatagtgcggagaaacacgctgagattttccaaacagtaattcgcctgttccttttcgccgaggttgacgagcgagcgcaccacggccagaacgtttatcaggaagtgcttgttgatctgcgaataaagactttccaaacggaactgaacgttctccaattgcagcgaaagcgccttcttttcctgctcccgcaccaccccgtttagggcgttgacggaatcggacaaagagttaaaactttcgatgacctgatttacctgttcgtttttggtgtaagaaatatgcccgaagctgccgtccgagattttttgcctgtcggaaaactggcgatagagataatcgtaggcattggcgcttttgctgtaaataaaaatgctgaaaaaggagagcagaccgcaggcgagcacgagaatgaccgcataggtgacgaacgtggaatatcccgatttaaaagcgtaccacacgtcgtagtaacccgtgattttccaggaaaaataggaggtggtatacgttttggaataatagctttcctgcgtgcgtacggagggatcgaaagaatcatgagaagcgaacaggacggaggaggaacgctcttttacgtttcgcgcggcatcgtcccaaacggctatctcaaagccgtccagcgtgcgggcgtaatggacgatctcgcgcagttgctccccctgtacgaaaacgacacccacgccgatatttgaaaaataagtggcgggcgtgattccccgaatcacgcgggcaaacgcgagatagctcgtgagttcccccgtccagaaatatacgttcgtgtaaaaaagtctgccgtccgaaaattccgtttccttggcaagagcgacgatacggtcgatattattgcccacgtaatcgtaattgctgccgtaattgactatcagatttttatccgccgccccgtcctcgccgtaaggcacatagacgacgtttttcaccagcgcttcgtccgcgatggctaccatttcgaaataatcgacgatgcccgaaatcgtttcagacgtcccttcgcgcagttgtaacgcctgctcctgaaaagtctgagtcaggaacaaggacatactgatggtattgatgcgagtcagggcggaatcgaattcgtccgccacgcgccgcgtcagcatatcgcttttttcttttgccgattcccgctcgttatgataaatcatcgcggtggaaaaaacgaacagaatgagaatacctgccaaaagcaacacgatgctgacgatgaaattgtgtccccaacgcttcctgcccctcttttgctcactcatatttttctccttgccgttttttctcttccttcgcccctaaaacgcttgtttttgcattatactactattcttttcccttgtcaataccacaaaaaacaaaaatttaagaaaaaaatggaagagtttttctgttttccattataaaatatcggtttaaaaaaatcacggaccgaggctttctcactttttcgtctgcacccgcttgtctttttcttcctgtattcgaataaaggaaaaatacggctacttctcctctgatccttattttttccatcaaaaaacgccgttttcggaattttccgacggcgtttcctgcgagtgcatttttctcaaaagaggaaagtttataaatttttcacctttattttatcggcagcaattcgatatacccccgctctcctttcggttccagttgaatccgcggattctctttgtcccattcgtaaccgagcagggaaggatcgtaattttcgacgaccttttgcacctgtccgatcgcttcccgataattttcctcttcaaacggttcgctttggaacatcaggtatttacaggcaggcaattcgatcacgtcaaagccttcggggacgacgcccgaataatcaagcggcacctccgcgccctgtacgtattcggacgtattcgggcggatgtactttttcggcagccacagacagacgggctccccggcgggagatttgacgctcaaaagaagcccccagacgtcgcaccccacttccgcacaataggaaaagtattcgtccgctttcattccgcgtttgataagtacttttctcgcaggcttttttgtcacctgcaccaaaaccgttttgatagtttccatcgataatttctccttttctttttttgaagattctactttgtaagggttaaagagaaatatcggaacgggattttttgcatattccttgggattgcactgaaattcccgaaagaaggcgcgctgatagccgtccacgctgttaaaccccactctgaacgccacgtcgatgatttttgtgccctcctcccgcaaaagaagagccgatttcgacagccgcagacggcggatataatctgcgggagtcatatccaaccagcgcacgaacagccgatgggaatgccagggcgaatagcaggaagcccgggcaagtccgctcaatgtaatctcttcgtcgagatgggtttcgatgtaactttgcatacgccttacggcggcaatctgttcttccatttcctcttttccttacgtaaaaagtataacacgttttctaaaaaaattctcgaccgtttttgctgttttcattcgtttttctaagtgtaaagtaaattcgagtaaatttttaaacttcctccgcgcaccctctcagtcccttttattaagcgtgaattttattcttttcccgcaagatatactttaaaagtcgcagtaaaaagccctccgtccatcacgacggaaggcttccttctttttaaaacagcgaaagctgtttggcaaggggcttttcgagcgccctttcctttttgaccgccttgggcagttcggacaaaaaaggggagggatcgccgcaggtagtcaaaatcaattcctcgctcgccctcgtcatccccacatagaaaaggcggcgttcctcttcctcgtccgtttcctgcgaagaaaccagcggcagcactttttcggtgagtccgcaaaggaacacgacgggaaattccagtcccttggagccgtggagagtcgtcagcctcaccgcgcccgcgcttccgcccgcattgccgtcgggcaatagaacgtccccttcccgtcccaatctcatagcgtccaaaaattccgccatatccgcataatgcgcagcctggatcaacgcttcgaaatccgcggaatcgatatgcagatattccttccataaagccaagatctttctcggtctgcccttcatccggggcaaaaattgttccttcgccctttcgaaattttcgccgccgcccaaaaattctaacgcctgcgcttttgccgcgtcgctttgcgcaaggatcgcgccgaaaaaggcgagcgaaccgccgactgccgcggattccagaaattccgtttttgccgaagtgacgcaggggatgtcgtcccgacgaagacagcgctccaccgcggcgagctgacgatgcgtccgcgcgagcaccgcaatgtccccgaaagatcgcaatttttcctctcttcccttgccgagcatatcgagtccgcccgtcatgcgggcgatttctttggcgataaagatgccttcggaaagatcggaagcacattccaccaaccgcacgggcactcccgacggcttcatcgccgcaagagcgcggacgccgctattgttctgaatgacatggagcgcgccgttcaatacctcgggcgtcgagcgatagttttccgtaagacggacggaaacggcgccgggataatccttttgcagaagcgaaaaacaatcggcggcagcgccgcggaaagaatagatggcttgatcgggatcgcctatggcaaacaaactgccgctttcgcccagccacagacgaaccaaatcgtactgggcgggattgatgtcctgaaactcgtctacgtgcagatacttaaactgttttcccgttatttttcgggaaagcgcctctgcgatcaaatcgtcaaaatccagcacgcccgcttgtcttaatcttctattatattcctcaatcgcctctttacaatccgctttttttccgtttttaaaagcggaaacgttattgagaaattttcggggcgcgagtttgattccgtattcggcgatgaccgcgcctgccgtcttcaattcaaaagcgcgatcggcaagtgcaaattcgtcttttaaaaaagagaaacaaatggaatgaaaggtgcccaccgtaattttcgacgccgcctttttcagtttgacggcgagcctttcccgcatctcctcagccgcccgcaccgtaaaggtcacggcggtgatctcttcgggtcttactccgttttcgacgaggcgggcaatccgctccaccaacgtaaacgtcttccccgtgcccggccccgcgattaccgcggtgacgcgcgccttactgcccgccgccttttcctgatcggcgttgatgccgcggaatattttttgttcttgaacggcaggttctctttcccccgcttcggctttcgcccgctttccgcccgattttccaacctcttttggaacgtcctccgcaaccgctaagggaagctcgtccaagaaagaaagctgtccccgcgaatttttaagttcttcgggcgtaaagagcgcgatttttccgtactcgccgtcataacccgccgtctttaccacttttccttcgcgcaggcgttttatcccctcggcaatgcgttcgttccccgctcgggcgatatcgtcaaactcccgcagacggagaatttcgacttccgagccgagatcggaaagcaactttttatagatgcgttccgctttgtcgccctccgcggaaatccccaaagaagcggagatcacttcgggaagaggcatcagatgctcgaaaggtttggcgttgtcggggagataattctcttctctttgcgcgagctgttcgagccgattgagcaccccgatcgtaattttttttccgcaaatcgggcactttccgcccagcgcctttgtttcctgcggcgtaagccgaagccggcacgccctatgtccgtctaaatgatactttccctcttccgggaaaaactcgatcgttccgccgaacccctcccccgtttcgagcgcgcgtttgagcgcgggataggacaattttgtatcgagaagattgctctccctgccgagcttggaaggagaatgggcgtcggaattggaaatcatagtgtaatgatcgagctgcggcacccgccgattcatcaggggatcggaagaaagccccgtttccaaagcgcgaatctgcggggacaaatccccgaaacattcctccaacgcgtcgaaacccgaaaaggcgccgaacagggaaaagtgcggcgtccaaatatgggcgggaataaagacggcatccggacaaacctccaaagtgatcgccagcagatccttggaagaaagtcctaaaatggggcgtccgtcggagcggatattgccgatggtttccagctttaaagccagtctttcggcagcgtccaaagaaggcagcaaaatcacattatgcaccttgcgcacttttccgtcctgcttataaatgcagctgatttcccctgaaacgacgaaacgcggcgatgtggaaaaatcgcagaaatctcggatgcgattttcctctctgatgcggtatagccccgcttccgcgggctccaaagcctccgccatctcctcccgccaggcgggatgcgtaaaatcgcccgtgccgacaagcccgatcccctttctccttgcccagaggtcgagatggggaatatccccgtttttgctggttgccctcgaatatttggaatgaatgtgtaaatccgctatatacatatttttattatagcacgattttttgaatttgtaaacaattaaaagttttttttacacaaatttttaatcaaatacttcaaaataatcaggaaaaagagttgatttttttctatgaatagtatataatactaacgatgcagagatggcggagcggtcgaacgcgcacgattcgaaatcgtgttatgcaggaatgtatacaagggttcaaatccctttctctgcgccaataaggacataatccgaactctaaccgattttacgcggcaaggcgttcggattattgttttattgtgagataaaaatcattttctttcataacttaggaatacagcaaaatcagataaaaaatttatgttttagaggaaaacaacgatgtcattagataaaatgagtaaatacctaagtttgattttacgccataagccagaggtcatcggcattacgctcgatgaacacggttgggcaaatgtagaagatctgataaacggtataaacaaaacgcaaccgtttacgatggatatgcttgaagagatcgtcgcaaccgacgataaacagcgatattctttcaacaaagataaaacgctgctcagagcaaatcaaggacattccattcccgtggatgtcgaattaaaagaaatgtcgccgcctgaatatctatatcacggaacgggtaaaaaatacgccgtttccatcgatagattgggattacttcccaaatcacgactctatgttcacctttcggacaatatggatacagcgacaaaaataggcaaacgacacggagaaccgcttatctatcgcgttaatagtagagcaatgtcgttggatggatacaccttttataaatccgtcaacggcgtttggttaacaaaaaaggtaccgacggactatttagaaaaaatataaggtgttttcataaatatattattatattcataaaggcataagtcgaatcaatcgatttatgcctttgcttttcttcctactgcgattttatgttttctcttcatagagccagcgcacctttgtgctgcgttgccgccgcgcccgcctcatttgccttttgcaggatacggcgaagctctccgtccgtaagctccatcaaattctttccgtccagccccgccaaagccgcaccgtaaaaggcgtcgcccgcgcccgtcgtatccacgggtttcacggggaccgtttccacgcgtccctctctgtcgtcgatccgataataacttcctttgcttcccaaagtcacaagcagcaatctgcccggtctgaatacggattccactccgtctttaaagctttcttttcccgtaaacgccgccagctcgtcctctgagaatttgaggatgtccgcttcttcgatatacggcgcataggccctcttcgcctcctctatatcgccgtataaatccatgcgaaaattgacgtcgaagctgaatacttttcccgattttcggatttttttcaccatcgacgaagcaaactcccgtccttcgcgttcgctaagcatcagggaaccgagatgtacgatattcaaatcttcatattgctcccaattcatctcccgttcgtctatatgaaaatccgccgtatcgtggcgaaagaacgcaaactcccgttctccctccttcaacgtgacgaaagcgagcgtcgtattccgctcggcgtccgtctgtatctcacagcgttccaagcctgcccccgcggcaaattttttcaaaaacgttcccactaaatcccgtcccacacgaccgacaaagcccgccttcgcccccgcgcgtttcgcattgaccgcgacattgaaaggcgcgccgcctccgtacattttaaacgccgtcacgccgtcttgttcctcgccgatcatatccgccaaaatttcgccgatcgatactatcatgattctttttactctcccgaaagtttatctcgtttatccgcacgccgcggagtcctatgtgaagcgcaaaatgattcgcatatgcttcgcgcttttctattttcgtctttattatagcaaatattttcgcaaaggtcaaccttccccgataaaaaatttgaacgcggcaaagagagaaaaaaggaacgtttcccttttcaagaaacgttctctcttccttttttaacgatcttcttctcagaaatactttttagctttaagcctgtacttcctcagagccctcggcggctcttttggcgtcgagccgcttatttctgaaatagatgagaatgcccgcggaaaccatgacgaggtttataaaatagaaaacgaaagcgagaatcgtaagaggcttccaatagcccgctcccttttccgccgcagagcagattttgcttacgatgccgcagacgtagccgatggctatcaacagagtgaaagagatgctggtgccttttgcggtacgcgctttataggcgcgcacaatattgaaaggccaggaaatcccgaaacaaagtaccataccgatttcgagaattgttgcaaatgtacccatatataaactccttttgcgcggaaatattaattatcctttcttctgtaatcgggaagcagtcttggagagggcatttcgggacaaatccccgccgtttccaattctttttcataatccctgacaaaatccagcgtgagcgttttaacttccacggacttgcacttctcgcccgcctgtctgcccgcgttgcgtccgaacacgatgatgtcgagcagggaattccccatcaggcgattggtgccgtgaatccccccgaccgcttctcccgccacgtacagattttccacgttcgtcatgccgtctgcggaaatatccagaccgccgttctgataatgcagagtggggtagacgaggataggctccctgcggatatcgatgccgtattttccgaacattctcatcatcgcggggattcgtttttcaatggtcccctctccgttcgccatttcgatgagcggcgtatccagccaaacgccttcgccgtccgtcgttttgacgccgccgttatttttcttgcactcgcggataatggaggacgccgtgacgtcgcgcgtttccaaaggattgacgaacgccacgccttccttattgacgagctgcgcgcccaaagagcggactttttccgtcaccagcgcgccgtaaatctgcgtaggtgccgccgcgcccgtgggatgatactgcaacgtttcgggatagagcagctttgcccccgcgcgatagcccaaaatcagaccgtccgccgtcgcaccgtaatgattggaggtggggaagccctgatagtgcagccgccccgcgccgcccgtggcgatgacgaccgttttcgccctcgcgacgagtacctcctttgtttccatattcatcaggaccgcgcccgccacttttccgtccgtgtccttaataagttcgatcgcggaagtgaaatccaccaccgtgatgccgcggtttaagacttcgtcgcgcagaacgcgcatgatttccgagcccgaatagtcgcggcaggcgtgcattctctttctcgacgtgccgccgccgtgcgtcgtgaccatcgtcccgtcgggcattttatcaaacatgacgcccagacgattgagccactgtatggcctcgggcgcttcgttgacgagtttatgcagcagctcgggcttattcatgaaatgtccgccgcccaaagcgtcgagataatgcacggcgggactgtcgttttccttgtccgccgcctgaataccgccctccgccatcgcggtgttggcgtcgcccaaacggagcttggtgacgatcatcgcgtccgcgccgcagttattcgcttcgattgccgcggatgcgcccgcgccgcccccgccgataatcaatacgtccacgtcgtaatcgggactttcaaggtctacgttgagatcgagaacgcgggaacgcccttgaaggagcgccgcaagctcgtgcaggactttgccgcccttattggggccgactttgagctgttcgtaggcggacgcgatataatcggggtgataggaagcgaggacttcgtccttttcctccgcggtcattcttcggatgtcggcgccgaaacgggaagcgcgcgtcgcttctacctttttcatggacgcaatctgttcttcggtgtactgatacatacgcttctccttatttctctatttccctgtggttataaagttctttcagctccgcgagcggtttttgcatcaggttttcgataagagcctcgaatttgccttctttcacttcctccacccgcttttcgagatgcgcgctctcgggcgcgatatatttgcccgtcagccttctcgcaagctccgccacctgcggatgggagattcccgcgggacagcgggaggaacatacgccgcacatgacgcagtcgaaactttcctccgcgcatttcgcgtattcgcccctctgcgcgtaggcgatgtactgcatgacgttaagcccctgcgtacagcttttcgtgcaggcgttgcagccgatacacgaataaatttcgggatacagctgcatcatgatctgctgcgtgggcttgatcttctcgatgtcgtaaatctgtttgacgagcgggaagaagggcagcgtggcgacgtacatcccctcctcgacctgcgtctgacaggcgaggcaggttttcagttcctgctgtcccttgatgcggtagatcgtggcgcaggcgccgcaaaaaccgttgcggcagccgc

SEQ ID NO: 3936 - DNA, 2812 bp, Unknown
  16S sequences of unknown bacteria
tgccgttcaccgtgacctccgcgaacttccggaagctcttcataaacccgatgagccgcgccctgtcgcttttcccgatcttcgcgaaggcttcgagggtggctttcccgccgtcgtcccgccagaacctgatgaccgccccgagtccgggctccgggaaatggttagcggctccggtggcgaacttttcggtgaggtcgtattcctcgagcttttcgagcaccgacgcggcgacgaggtcgtggttgcccattatcgggatgatgttttcacgctccatcatggtttcgagcactccgaccgggtcgtcaccgcggtcgacggcgtcgccgaggaaatacagcgtgtcggtctcaccgaggcggattttctgtaacattttcgtgaacatccgcgattccccgtggatgtcggacagcgcgtatgtcaaacgctcatctccccgaaccgtcgcagcccgcgactgtattcagaccttttccggttctggcgtagctgtcaaggctggcgtcgatgacctttatcaggcggattctcgcggctttgctcgcccacgcgatgtgcggggtgacaacgcagtttttcgctttgagaagagggttgtccgggagcgcgggttcgacggcgagaacgtcgagcgccgcgccggagagccttccggagttcagcgcgtcggcgacgtccttttcgttcagcaccgcgccgcgagaggtgttgatgagcttcgcgccgggcttcatgccggagatgaattccgcgtcgaccatgccgcgggtcgagtcgttcagcgggcagtggagcgacaggacgtcgcacctcttccgcacctcgtcgaccgtcaggaattttacatattcggtgtcctcgtgatgatgagcggtagcggcgatgacgttcataccgagcgccgacgcgattctggcgacgcggcttccgattccgccgcagccgatgagcccgagggtcattccgtcgagttcggtgtaattcacgttctggtacggatatccggggattccggtccacataccgtcgcggacgatattccgcatcccgtcgaggtcggagtagagcgcgaggagcatctgaattgtgagctgagcgaccgaggcggttgagtacgcggggatgttgactacctgaactcccctctcgcggcaggcgtccgtgtcgatcatgtcgaacccggtgccgagggcggagacgtattttatggtcgggcattcgtcgaggagcgcggcggtgatcttcgcgcggtttgtgaagatgacctccgcgcctttgcatttcgcggcgcagtcggcgtcgggtgtcttcgcgaaaacttcgtaatcgccgtacttcgcgaggaatccccagtcgaggtcgccggggttgacggcgaagccgtcgagtatgacaatcttcattgtgatctttcctttcttttgcgtatattaatattataccacatccgcgcggagaatgcaagagtgaatacgaaaaagagaccatcggtgaggatgatctcttgattcggtttgggtggagctcgcggtatttgtaatggcgggcgaccaatggtcgcccctacaagtgtcgtgatgcgttgaacgttttgcggttacaccagaccttgtgcgattccacgcttccgaataattactcacaaaataattacgcacaaaccccgtaggggcgaccattggtcgcccgctccgaaggtttttcgcttttttcactctgttcgtaacgccacaacaggatccttccgtgccgcgctccttgacgggataatccccgcgatcagcgtcagaagcacgcttatcgcgatgagaatcaccgccgccggaatcggaagcgtcgcgctgaggttgtttatcccggtcagatggtggaggatgaggttgatcggtatgcagaggagataggtgataatcacgccgagcgcgccggaggtgaagccgatgatggtggtttcggcgttgaacattccggagacgttgcgctttgacgcgccgattgccctgaggatgccgatttcctttgtgcgttcctgaaccgagatcagcgtgattacgccgatcatgatcgacgagacgatgagcgagacggcgacgaaggcgatgaggacgtaggtgatggcgttgattatcgtcgtgacggaggacatcatgatgccgacgtaatcggtgtaggtgattttctcgatttcgtcaactccgccgttgtacttcgcgatggcgtcctcgatggtgtccttgtcctcgaacccggaggcgtagaggttgatcgcggcggggtcgtcgatatcgacataaccgagctttttcaggttgtcgtcataggtcgagtccgagaaggtgagcacttcgtcgtagtacccggcgagctcatcgtcggacatttcgttcatcttcgcatcgagcgcggcggagagctgttctggcgtcatcccggcaagcccgctcatgacctgcgcggcgtactggcttttcacctgctccgcgaccgactcccggaaggacgcgcggaggtcgtcgtcgctcatcgaggcgatatatgacgagatggttttctcatccatgccggtctcgccgctcatcgcgctgatgatcgactgttccatgtccgcgcgggtcatcgggtcgacgatggcgtcgacctgagcgttcagaacgtcgtcggacggaatggagacgattttcacatagagtccggctttaccgttgtcgtcaagcccgttcacgtgcgagcggaagctgtcggctttcgatttcgcgtcgttcccggcggcgtcgcggaactcaagcccggtgaagatatcggtggt

SEQ ID NO: 3937 - DNA, 6850 bp, Unknown
  16S sequences of unknown bacteria
ctccttcgagccctgtcccgtcgacgaaaaggcgatcgccgctcttcgctgtcccgacagcgtgacggcgccccttgtcgcctatgcgaaagaaaacggcgttttggaagagggagaggaagagtttttcacgtccgaccttttggatatgctctctccccgtccgtcggaagttttggaaacgtttgaaagggaatacgtcaaagatcccgaaaaagcgttcgacgggctgtatgaactcggcgtcaaaaacgattacgtcaaattgtccgccatttccaaaaataaattctgggtggcggaaacgacgaagaacaagatagaaatcaccatcaatctgagcaagcccgaaaagaacaacaagctgacggcgaaattgagaaacgtatccgcaggctatcccaaatgtatgctttgtagggaaaacgtcggctatgtaggacagggcagaacccgccgcaatatgcgcacggtgcccttgaaactcgcgggcgaagattggttttggcagtattctccgtacgcgtatttctatcagcacggcatcgccatcaattccgcgcacactccgatggtgttaaacggcaggacgtttgaaaaactgctcgatttcgtggattatgcgccgcagtattttatcggctccaacgctccgctgcccatcgtcggcggcagcatcctcgcgcacgagcattttcagggcggcaagcacgtatttcccatgttcaaggcgcccacggcgctggcgcttgcgtgccccgtcgagggcgtggacgcctctctgcccgattggtacaacagcgtggtgcttttcaggggcggagataaaaagactctgaaaaaggcggcggaaatcatccttgaaaaatggcttacgtattctgacgaaagcgcgggaatcatcgcggaaacggatgcgccgcacaatacactggcgcccatcgcgagaaagacggaaaaagggtacgaactgtatctgctgcttcgcaacaatcgctgcgacgaagccaatcccgacggcattttccacgcgcataaggagtatcataacatcaagagcgaatcgatagggctgatcgaagcgatgggtatgttcatcctgccgggacgcctcgaatatcaattgaaagaagtggaaaaattcctcacgggcgagaatgcggaaattgcggaaaatatgtcgatacacaaagacatggtggcatctctgctcgaagaatacgggaacaatttgacggcggatgccgcgcatgaagccgtcgtcaagcgtgtggaaagcgtgtgcgagcatattctcgacaacaccgccgtgtttaaacgcgaccaaaacggcagggcggcgtttctcaaatttttaagcgtctgcggattttccgtccgctgagcgcccagaatccgccgcggatcacagcggcttgcgcagccgcttttcgggaaaaattgtctacacgtgtgtgaaaaacgcgaagtttggcacacatttcttcattacctccttaaagcggcttctttcctgtgcggaacggagccgctttcgtccgttttttgtcctttcggacaaaacggttcgggaatcgttttctgcctgccgataaagagagatacgaataaaaatacagaggcaacaagtatgtcgaagcgcgtgacaatcaaggatatagcgtttgccgcggggataaccccgcaggcggtttcccgcgccctgcgcggcgaaaacgacatttccgacgcgaccaaacgaaaagtcagggaaatcgcggaaaaactcaattacataaaaaatgcggcggcaagctcgctgcgttcgggcggaacgaagatggtggcggtggtgtacgacaacccgatcaatctctatttttcatttatgacggcgtatctgcaccaaagcttaaaggcgcgcggatattccatgctgatgatggtggagcctgtccgccgtttttccgcagaactgtatctgtccgttttatctcgcaacgtcgacgggattttgagctttttagaacccgacgaagaggtggggcggctgatagaaaattacggagtgcccgtcgttttggtgggtcggcgttcggatgtgaaaaacgtggactgcatttacacggacgacgagaaagggggcagggaagcggcgagatacctggcggaaggcggcgcgaaaaaaatcgtctgtttttcggaagatctggacctcacttgcgcgcgcgacagattcgagggctttaagaaagaactctcccgccgcgggctgttcgacgaaaagaggtgcttctttttgtcgggaggtacgacgcctctaagctgggaaaagtttttaaagacgggcagagaatttgacggcgtgttctgtttcagcgatctgctcgcctacgaaacggtctgttttctctcccgtcgcaaaatcgacgtgcccgtggtcggatacgacgacgtcagggaaaagctccccattcctttcccgctgccctccgtcggctcggataaaaagagcatggcggaaacttccgtggagtttcttctcgacaggcttccctcgaatcgggaaaacggcgcggacagggctgagatgaacgcaaaattgccgcgcagggaaaaaatgttcgacgtccgcctggtctgtcgcaaagaatagccgatctaacgcagggattaaagaataaccggtctgtcgcaaagaataaagtaggaacgcgcgtagcggattttttcggtcttccgtttttttcatcgtcagccaaagacggcaaaaagcgcgctttaaacggtttttgtttctcaaacgggcgcgggcgcagcttttggggcgcgggcgaatttcgggcgtcttttcgttttttggaaacgggagtttcgcttgacttttgccgaaaggagtgctatgataaactatcgtggcgcgacttatttatgcgcggactttcatatagcgttccatgaaaaaggagtttatcgtatcgtttatgcagacggaagcagccaaacaggcacttacggagggacccatccgacgaagccttattcttttcgcattgcccatttttttgagcaatctctttcagcagctttataattcggccgattccatcattgtcggcggatttttgggaaaacaggcgctcgcggctgtttcctcgtcgggcaacctcatctttatgctggtcggatttttcaacggcacggcggtgggcgcgggcgtcgtcatcgcccgctatttcggggcgaaaaaatacgaggagatgcggcgcgccattcataccgatctcgctttcgcgctcgcggcgggcgcgattctcaccgcggcgggcgttctgatgacgccgacgcttttgagatggatgaatacgcccgacaacgtttttgcgcagtcggtcagctatttccgcgtgtatttttacggcgccatggcggtggtgttatacaatatttccgtggggatcttgcaggcggtgggcgacagccgccatcctttatactatctgattttttccgcctgcctcaacgtcgttttggacctgctctttatcggcgttttcaaatggggcgtgggatccgccgcggcggcgacgggaatttcgcagggcgtcagcgcgctgctctgcatcatccaattgctgcgcacgaaggaagtgtacagagtttccgtcaaaaaaatacgtttccataaggatatgctgggacagatcctgcgttacgggctgccttcgggcgttcagaattccgtcatcgccatcgcaaacgtggtggtgcagtcgaatatcaataccttcggcgacgacgcgatggcgggctgcggcagctattcccgagtcgagggcttcgcgtttttgcccatcacctgcttttctctttccctcactacctttatcggtcagaatctcggcgcaaaaaaattcgaccgcgccaaagcgggcgcgaaattcgggattctctgttcggtaatcatggcggaagtcatcggcggactcatctggattctagcgccctattgcatcgatcttttcaccgactcgcccgaggtgatcgcattgggcacgcggcaggcgcgcacggaatcgctgttttatttcctattggcgttttcccattgtatcgcgggcatctgccgcggcgcgggcaaagcgagcgttcccatgtttatcatgctcgcctgctggtgcctgatccgtattctctatatcaccgtcgccatgcatttcattcacagtatcggcgtcgttttttgggcgtatccgctcacctgggggctgagttctatcgcctttctcttctattacctctattccgactggatacacgcattcgaacgccgtgagcaaagaggcggagaacgctgcgaatcgtccgaaaccgcttccaaataaaagggggttgttttttgaatggggaacccgaaggtagaccgtattttctccacggcgcggaaaagagcattttttgggcaaaatgggagggaggtttacgggatagattgcgcgttttttgtcttattttgtaagaaaacatatgcccgacggcgcatgggagcctgttttgaggacatatgcgaaaaggggcaactgttgccgcggaaaaaattgtcgaaacgcgtcgaaaatatttttttacaaaatccgacaaaaaagccaaaacaggcgttttccgtcaaattccgacaactttgaaacacaaacgcgggaaggaaagggaggacggcttctttcgttttttatccttttaggcgcggaaagagaatacggctgaaaagaacggagaaaaacggtttttaaatatagcaaacgtttgggaaagggaggacgtttcaaaaacgagcctgtcctatacagaacaatgattttgaaaagggaggaaaggataaaatgagatacgttttggcgctcgatcagggcaccacctcttcgcgtgcggcgctggtggacgaaaagcaaaacgtcgtggcgattttgagccgggaatttccgcagatctatcccgaggaggggtgggtagagcacgacccgatggatatttggtcgagccaatacggcgtgatgatggaagtcgtggcaaagagcggcgtcgcgcccgaggatatcgcggcgataggcatcaccaatcagagggaaaccgccgtcgtctgggataaggctacgggaaagcctatttataacgccatcgtgtggcaatgccgccgcactgcgcccattatcgcgcagctgaaagaaaggggatacgaaaagaaaatcttgcaaaagacgggactcattcccgacgcttatttttcgggcagcaagataaaatggattctcgataaggtggacggcgctcgggagcgcgccaaaaagggagagcttcttttcgggacggtggatacgtggctggtgtggaagctgacgggtggcagaatgcacgtcaccgaccgcacgaatgcgtcgcgcaccatgctcttcaatatcgacacgctggaatgggacgaagaacttttgaggatgctggacattccccgcgccatgctgcccgaggtgagaagctcgggagagatctacggaacggcgaacgtagggggcatggctgtgcctatcgcgggaatcgccggggatcagcaggccgctttgttcggtcagtgctgctgggaaaaaggcgaggcgaagaacacttacggcacggggtgcttcctgttgatgaacgcgggatacgcccgtcccgtgagcaaaaacggacttttgacgaccgtagccgccaccgtaaagggcgaaaagccgcagtatgcgctggaaggaagcgtgtttatcggcggcgcggtgattcagtggctgcgggacgaactgcgttttttcacggagagcagggacgcggaatattatgcgcggaaggtggaagatacgggcggcgtatacatagtgcccgcgtttacgggaatcggggcgccctattgggatatgtatgcgcgcggcagtattttcggcattacccgcggcacgaagcgggagcatctcatacgcgcggcgcaggaatcgatcgcctatcagtccgccgatctcgtggcggcgatggagaaggacacggggaccccgttaaaggcgttgaaggcggacggcggggcgtcgagggacggctttttgatgcagtttcaggcggatattctcggcaaagaggtgctccgcccctccgtacacgaaacgacggctctgggcgccgcgtcgctggcgggactggcggtaggggtatggaaggacttggagcagatccgcgcgcttcggcgcaccgaagcttcttatctgcccgttatggaggaatctcagcggcgggaaaaactcaaaaggtggcaccgcgccgtcgagcgcacgctcggctgggatctgccttgaagagatagttgcgcccttgggctattttcattttagaaactcttgacagaaggcgtcgattgtagtataatttataaagtaagcaggggattattgcggaggtgcaaggctttggactgtatgtattgtaaaggaaaattagagcgcggaatgacgacgtgcccgcattgcggggcacccgtgtcctcgcagaacgacccggagcccgcttctatctccgattttctccgaaaagcggtgaatacggtggtgggcgacgaagaagcccgtaaaagcggcaaaaagaatcggtatctcgcggcgctgttcggaatatttctcggcgcgttcggcgtacataatttttatttgggcagaacgggccgcggcgtcgtgcagatactcctcttttggacgggaatcagcgcggtctggggcttcatcgagggattgctttgtctgttcggacagtacaaagacggagaaggtcggccgctcctttaaaaatagttgaaaaatcaagc

SEQ ID NO: 3938 - DNA, 2008 bp, Unknown
  16S sequences of unknown bacteria
tcaactgcaaactcggcgacggtatcatcaatatgcccgaactgaaaaaagccgccgacgcccaaggcgtgaaagcctatatcgtagagcgtgaatatgcctataccggagacaattacaccaccattctggcagacagagaatatctgagtgctttggaataaggaggatatcgtatgaaaatgttcattgacggccgttggacagacagttcggatggagccgtttcttccgtcatcaatcccgccacgggagtatgtgtagacaccgttcccgaagcgacagaacaggacgtggactgcgccattgccctggctgtggagggacagaaagaatggaacgacattcctcttcacgaaaaactttccattttagagcgctattgtgtcctgctgacggaaaatactgaaaaaatcgcgtccatcatgtgtgaagaaggcggtaagcccattgaacagtgccgcacggaagttgccgccaacgctgcgatctttcgcatttattgtgctgccgcatataccttttacgggaagtcgctcccatacaatgccgagcctcgctcccagggggacgtggcttttaccatccacgagccattgggcgtatttgccaatatagtccccttcaattacccggtcgagcttgcggcgcataaactggcgcccatgctcgtgaccggcaacagtgttgtgctgatgccctccagcaaaacaccgcgcagcgcgctgctgcttgtagaacttttggtgcgtgcaggtgtgcctgctaaggctgtatgctgcgttaccggggcaggcagtaaagtcggctcacgcgccgcagctgacccccgcgtagccgccgtcagctttacaggcagtacccgtgtgggcatcaacctagccgaaacctgtgccaaaagccttcgtccagtgtctctggagcttggcggcaacgatgcactggtcatttttgacgactgtgactatgcgctggctcttgatgaagttatcaatggacgtatcggcaatgccgggcagacctgctgcgccagcaaacgctttatcgtgcaacgcggtatctacgaccgctttgtccgggatctcaccgctcgccttgcaaaaatcaaaatgggcgatccgtccgacccgtccgtagaacttggcccctgcgtgcgtgaagactcagcggccgatgtggaaaagcagattcgtctgacgatcgaacaaggaggaaaattggtgtgcggcggcaagcgcaccaatgcatttgtcgaacccaccgtgttggaggtctcgcccgaaacagacatcgcacgggatatggaggtgttcggccctgtatttccaatgatcgtgtttgataccgtacaggaggccatagacattgccaacaattcctgttacggactctcctccggcgtcatgacatcggatatgcgcgttgccatgaaggtcgcgaatggaattcatgcgggcgcatgcatcatcaacggaagcggaaactaccgtttggcccaccagcccttcggcggatataagctctccggcgtgggccgtgagggcgccgtgtgtactctggaagaaatgacgcagcagaaaatgatctccttcaaagggatcttgaactgattttacagaattaagagcggcacagggccgccttgctatcaatggaggtgcaaaatgaaaggcggaaaacttcaaatcggaattattggctgcggcggtatagcaaacggaaaacacatgcctgctttggcgaagctgaacgagctatgtacgatggcagcgttttgcgatattgtcgaggaacgggccgtaaaggcaaaatcggaatacggcacgccggattcaaaggtttatacggattacaaaaaattgctggaagacgattccatcgatgtggtgcatgttctgacaccaaacgtactgcactgtccgatcaccgtggacgcattcgccgcgggtaaacacgtaatgagcgagaaaccaatggccagcaccagcgccgatgcccaaaaaatgct

SEQ ID NO: 3939 - DNA, 5677 bp, Unknown
  16S sequences of unknown bacteria
tgtactaggccctgtcagcagagctgcagggatggattgcgaatgtccgctttaccgtcacgttgctaataaacagaaagtaagaggtacaatcttatgaaaaagagagttgttgttgcactcggtcaccgggcgctcggtactacatttccggagcagcagacggcagtccgctcttccgcttccattttggctgatcttgtcgaagaaggcgcacagctgattatcacacacagcaatgctccgcaggtcggcatgatccacaccgctatgaatgaatttgccaaattccatgagacctacggcgcgccgatgtccgtctgctccgcgatgagccagggctatatcggctatgatctccagaacgcactgcgcaccgagcttttgaagcgcggcgtctaccgttcggtgagcaccgtcatcactcaggtcaccgtcgatccatacgacgagaccttctaccacccggtcaaaaccatcggccgttacatgaccgccgaggaagcagcagccgaggagaaaaaaggcaattatgtaaaagaagagccggggaaaggcttccgccggatcgtagctgctccgaagccgcttgacatcgtagaaattgacgccatcaacgcacttgcagcagccggacagattgtcatcgcctgtggtggcggcggaattccggtgctcaagcagggcagctctttaaagggtgcaagcgctgtcattgaaaaggatcttgtcagcggactgctcgccgatcagaccgatgcagatatgctgatgattctcacaaacgatgaatttgtcaacatcaaatacggtacaccggaggaagttgctttaaagcagatcaccgctgaagaggcacgtacccatatcgccaatcacgagttcggcgtcaataaaatgctcccgaaaatcgaggcatccgtcaacttcgtctgccgccgcgaggagcgttcggcagtcatcacttccatcgacaaggccctcgatgcctaccgtggaaagacaggcaccgtgatcaccgcgtaaagaaattttccagcaataaaaaagcagagtctctaccactctgcttttttgttgcttattttctttctcgtttgaacgcagataagcatcccccatcaattctttcccgtgctcccgatccctccgcgatccggtgcagcaaggcgctcctgctcctcaaatacaagctgtggctgatgttccataatacggaactggcagatgcggtcgttgacctgaatctcggtgtcgcgcagtgcgtaggccggcatataccaccagtcgttcggtccggcgtaggactcgtctacgacgcccatatggttgacctgaatgatgccgaagttcttgtaggtagagctgcgcggtacgatgtgagcctcatagccctttggaagctgcatcgccacgccgagcgggatcaggtgaaattccccctttttcattacaacgtgctctgcggatcgtaagtcaatccagtcagatttgccgccgatgtattccagtcgtttaacctcatcatttaagtactgtatcttgattgtttccataattttatttcctctcctgatttttatgcgcagtgcagcaccatcttcccactcgccagtgactccggtacttcgatcacgtgctgattcgagcttcctcgccagtgcagctgggtatcacgcagatcttttttatatgggccgtctacgaggacatcgatccagcgtgcgacctcccgcgttttcacatattcccagtcgtagccggtatacatccagatcgtctttcccggaaaacggctgcggatatcctttgcaagcgcaaggatctcagcctcattcgctgcatgcagcggatcgccgccgctgaatgtgacgccggaaatatacggctttgcaagctcagtaaagagctcctctttttccttctcaccgaacaaaagtccttccttcggatcccatgtcaccggattctggcactccggacaatgatggctgcagccggacacccagagtacgacgcgcagtccatcgccattcagcatgtcatcttttgttatgttatgatatctcatcgttgctctccccatagtaaatctctgactcgaatctttattttatcatatctttgctttttttcaacctgtttttccggagctgtaaattccagttgcagcctcctgaattttatgatacgttttccttacctgagacggtatgaagcccgtcgatcttaaacggaggaggattttctatatgaactggaatgctgtatggattcagccggaatacgacatgggggatatcgtgccggtgtatacgaagcagttttccctgcccaaaataccggtcagggcagtgcttcacatcacagcgcttggcgtctatgaagcacatttaaacggaaaacgaatcggaaactttgtgctcgcacccggatggacgagctactattcccgcctgcagtatcagtcttatgacatcacagccgatcttgcagaacaaaatacgatcactgtcacagtcggcaagggctggtaccggagcccgatgccgggctggtgcgactcgtcctatcaggacgggctgcgcagctggcctgccggactgctggcagagctggagatcacctatgaagacggcacatctgaaacgattggcacagacacctcctggagcgttgcagaaagtgccacccgattttcagaaatttacgacggcgaacaatataatgcctcaaaagatttttccgcagcccgctgcagggtacatgcgctggaaggaccatgggacagcctgattccacaggagggagcggagattcacgagcaggagcgtatttctccatccggtattttcactacccctgccggtgagacggtcgtcgacttcggcaggagctgaccggatatgtcgagctttctgttgatgcaaagtgtggagatgtcattgcgctctctcatgcagaagtcatggattgtgacggaaatttttatacggaaaactatcgtgccgcaaaggcaaagctgcattacacctgctgtgacggacgtcagacctggcatccgcattttaccttttttggattccgttatatccggatcgatgcatttccgggtggagcggcacttgcaaagccggagaattttactgccatcgtcgttcactcggaaatgaaacgcaccggacacctgagctgctctgatccgcttctgaaccggcttttctcgaatattatatggggacagaagggcaattttgtcgatgtaccaaccgattgtccacagcgggatgaacggcttggctggactggagacgcacaggtcttcgtccggacagcctgcatgaattatgatgcggaacagtttttcacaaaatggctcgcagacatggctgcggaccagcgggacgacggctacgtcgggcatgtcatcccggatcttctgcaggccccttatggcagcgctgcatggggagacgctgcagtcatctgcccgtgggaagtctacctggcctacggtaatccgcagattctgaaaaatcagtttgactgtatgaagggctggatcgactatatcaccggctccaccaaaacaccgtatctgtggaccggcggcacacattatggagactggctcgggctggatgcgccgtccggcagctacaagggctcaaccagggaagactttatcgcttccgctttttatgcacattctacggagcttctgatcaaagcaggacatgtgctcggaaaagatatggcagactatgaggctttgtatgaaaaaatcattgctgcattccgcgctgcatttccaacttatgggacacagagtgaatgcgtacttgcagcacacttccatctggccgagcatccgcaatctgcagccgatcagctcgcaaaaatggtaaagaaagccgggaatcagcttcagaccgggttcgtcgggacaccgtacctgctgcatgtgctcagtgattacggatatgccgagctcgcctatacgcttctgcttcgcaaagaatatccgtcgtggctctatccggtcaccaaaggggctactacaatctgggaacactgggacggcattatggaaaacggcggcttctggagtgcagatatgaactcctttaaccattacgcatacggctctgtcgcagactgggtctatcagaaagccgcaggtatccacaccgcagaagatgctccgggctatgcctttatccgttttgcaccggttccggatgcaagactttcctggcttaccgcttcccttcagacccggcacggtctggttgaatccggctggcgtcaggaagatggaaagtggcgctatgagatcacaactccggtcgacgccgaaatctgcattgacaaaaatacacagaaggtcgcagccgggcactatatcttttacagtcagatgtagccatcgttttacagctttacatttcataattgagcatgctataatgaagtttcttctgattaacaaagcaacttatgatatatcgggtagtataaaaaagaggctttgattaatcaacgaaaatatgagttgaaagagggataataaatggcaatacaaaagaacggcatcatcgtattaggtgcggtatttgttgatattaagggatttccggagggcgcttatattccggacggcagaaatgccggaaaagtaaaatatgttcatggcggtgtcagccgaaatgtcgtcgaggacattgcaaatatagaactgcgtccgaccttccttggtatcgtagatgactcagcacttggcgaggatgtactgcgcaagctggagcggcacaaggtaaatgtcagctatatgcagcggattccaaacggtatggggacgtggctcgcggtctttgaccagaacggagatgtcgccggctcaatttcccagcgcccgaatctggactcacttctgacactgcttgaagagaagggcgatgaaattttctccgaagcagattccgtcgtgatcgaggtcgatatggataaggacatcgtgaaaaaggtcattcagctctgtgaaaagtatgagaaaaagctctatggcgttgtcagcaatatgagcattgcgctggagcgccgggacttcctgcaaaggttcgactgcttcatctgcaaccagcaggaagcaggaatgttcttctctgcggattacagcaataagatgccgggggaaatgcagcagattctgagcgaacggcttcaggtcgcaaacattccgtccatggtcattacgatgggcggcgacggctctgtctatgccgatatgcatggaaacaggggcttctgtccggcaaaaaaggtagatgtccgcgatacgaccggagccggcgactccttctgtgcaggcgttgtcagcggcctgacatacggcaaaacgcttgcagagtctgtcgagatcggcacccggctcgccgcctccgtcatcacatcctctgaaaatgtgtgcccgcggtttttaccggcggagttggggatcgaagcgtaattctgcgttttgggtgtatcataaaaatagaaacgagaaaaattcccgtttctatttttttaccaaatcaggcacgttctttatgcttccgcccgctccccataataatagaatcccttgcactctgtcagatgcacggacacaatctgtccgataagggaggcgtca

SEQ ID NO: 3940 - DNA, 8888 bp, Unknown
  16S sequences of unknown bacteria
gtgcgatccccgccgccgtggggctatgcctgcgggataaacgcgacctgggtatccacaccgagctgttttctgacgccatggtggagctgatcgaatgcggtgcggtgacgaaccaacgcaagactttgcataaaggaaagagcgtgactacgctggcctatggcaccaagcgcgtatatgactatctgaatgacaacacgggcgttgcattttatccagtagactatgtcaacgatccccgcgtcattgcacaaaacgataactttatctcagtcaatgcctgcctggaggtagatctttggggacaggtagcggcggaatctattggcagtcgccacttttcgggcacaggcggccaggtggattttgtgcgcggtgcccgggagtcccggggcggaaaatcttttatcgccatgccgtccaccgcaaaaaacggtgcgctcagtcggattcggccaggtttatcatccaacgctattgtcaccactagcaaaaacgatgtggattacatcgttacggaatacggcgctgcacggctgcgcggcgctacagcaagggcacgggcggaagcgctgattggtattgcccatccgaacttccgggaggagctgcgatacgaggcaaagaagctgcatctggtatgaaaacggcatatgaccatagttttggtggttggctgttttaaaagaaagaaggagggtatttatggaactgaaagaatatttggtcggcgatgtgcgcgacagtgtgcgctacattgagaatatgtcccgtggggggctgagcaagctgccgccgttgattatcacctgcgctatcacaggcggcctgcatgggaaggaggcaaaccccaatttgccggaggctccggaggaacaggtccgggaggcgtatgatgcgtataatgccggtgccagcatggttcatattcaccggcgcaatccggaaaatcccatgcagatgtcttggaagtgggaagaatttgccgagatcaataccatggtacgtgccaaatgtccggatctgattattaacaatacttgtctgggcggccgaatgctgaatgaagaaactggcacaataggagaccggatgttggcttccattccggcaaaaccggaagtagccagcttggatattcattgtttctgcgaagatatgcccatgaaagcaagaaaagcgccgctgtttggacgggatgaggacgccattttaaagtttcactattcgatctcgccagacactgccaaatatgtggcgcagttgatggacgagcaggggatcaagccggagtttgaaatgtttgatatcgctgatgtcaagtacctgaatcggttggcgaaggacggcaccgcgaaaacgccgtattgggtatccatgctgtttaatggcaatggtacaattccgacaccggacatgatgctggcggctacgcgggcgcttcctgataacagtttgctgaacgtaatcggtatcggcgcggcacagttcccaatgctggcgatggcgatgattctggggcatcacgtgcgtgtggggttggaagataacgtgttttatgcgccccgtgaactggcacagggcaatgggcagatggtagaacgtgtggtgcgcttggcgcgagaattggggcggcccatcgcgacgccggaacaggcacgcaaaatgatgggattgggtgcgccgagggcgtattgagcgttgttttttccgcatacatgttcagaagggagagagaatcatgaaatcaacaacgaagcgaagcatgacagaccggtttgtggacgggtgctaccgctggatgcccaattccattgttttggtatttctgctgacagttttggtggctgtgctggccgtcattttctgcggatcgccgctggtgacatccaccgaaacgaaaacgagtttgatcgacgcctggaacggcgggttttggtctctgctgtcctttgctatgcagatgtcgctggtcatgttgaccggttatattctggccagcgcgccggtggtcaagcgggggctgaccaaactggccagcatacccaataccacggccggcgccatgctgctgtgcggcattgctacctgcatcgtctggtgggtacactggggcctcggtatgatgggctctatcgtattgggccgtctgctggctgcgcagggcaagaaaaaggggtataaactggatgtaccttggctggtggcctatctctggggcgttgaatgtgccggcgtgggtatttcgcaggcggcaccgctgtacggcgctacgccgggttatctccaggggctggtagtggatgacgcggtacgggcgctgattcctgatgtgatcccgttggccgatacggtagtaaacccgctgatcattgggcagaacattgggctgttcatcatcatcacactggttgcccggttgatcatgccgaaaaaggaagaacgcatcctggaggtaagcgacgcctttgcagaggaaattttaactgtggaggccattgaaaagccggatcgttcttcacctgcggcctggatcaacagcagccctctgctgaacattatcatcggtggtgcgggattgatctggggtatccgtctgattgcaaccagcggcatcgtcaacatttcgctcaacaattttaactttatcatgttgatgctctgtgtgctgctttgctggacgcccaatgtccttggaaagtgctgtgcggacgctattggaaatatttggggcgttgtcattcagttcccgttctatgcgggtattttcgggctgatcacacagaccggactgaatgaagtcattgttcatttcttcaccagtatcagcagccaggaaacgttcccgttgattgcctacatctattccggtctgctgaatctggtggtgccgtcaggaggctccaagttcatcatcgaggcgccgtatattatggaggtgtgtacggaacttgatgtttccatcgcccgtatcattgatgcgtataactttgcggatctgaataccaatattattcagcctttctggggacttgctttcctggcaatgttccgcatcgatttcaaacagattatcccgtatacggccattattgcgctggcggttttcatcttcaacatgcttttcatcggattcctttattgagacgtttcctgcttatgcagacgctgcggtttctgctgcattcacccccctgaagtgcatggctgccgtgtgcgcaggcatatgcaaaacacagtggaggcatccgccaaagccttgggcttcggcggatgcttccactgcgttttgcgaaaggaggagaggggatggaaaccgaatgaaaaaatgcgcgggcgattcagcgcggttctgtgggtacggtagcggcgtttttttccgaagtattcctgtcgttgctcgatagggagaaggaaaccgctccgccttctttcagtgcaggatccagataagaaacggaataagcccattcgccggggtgtttgtcatccggtgttacgaccacgcgcagcgtggtgtcgccatccgtatcttcataagtataagtgccgtcccgttccaatgcgtcagtgatatccagtgcttcctgaccaacataaagaaagattcgtccattttcctgtgttacacggacgtcggcgccgtatgtcacgatggtagtgccttcttcggtttccattacgtctttatactcgttgatttggaaggcctgggcaatatgcagttcaatggcctgggccagcgctccgtccgtggcggcattggcggcgccggcacagacacacagtgatgccataacggcggcagcggtcagcagggcgcggcggggccggcggaatcgtgctgcagtgttttttttctcttcactcatggctaaaacctcctgaatactcttttcggaagcgtgaagcgctgaaaaggtatcctgaaataatttacgttcgatcatggcttcatacctccttcaacgtctgttttgcgggaaaggactcttcagtcagttcccgtttcagtttttgccgcgcccgcatcaggcgggagcggatcgtggttggtttgacggagaggatgcaggcgatttcctcggtggtcatctcttcgtagtaaaagagatagatgaccatgcggtcgttgcgcggaaggtgcatgacggcgtcaaacagttcacgctgggcggtgttgtcgaaggcgggggcatcccagtcctcattcagggaaaagatatgcctgcgccatgcaccgcgcaggatcttgcggctttcgttgattgccacacggatcagccagttgcgcatgtgcgcttcgctttcaaaggctgtgtcgcgttccagtaggcgcagcagcgcagtttgcatcacgtcttctgcatctgcgcgatttttcagggcctgataggccacgcgataaagcgtatcggcgtaccgacgcgcggcaggttcgaaggattcccggtccgtggaagctcacctcctcagggtttgcggtatgggggaaagatatctttcgtaaggaatatccatcagccggacggattgttgcaccaggcaaaactttttttcagcctggcgaaaaagagagcccgtccccgcaggtatactttttcggccgccggcatagggtatctcagcgattgaattgcgggaaaaggagaaatgcgtgtcatgaaaatcttgtttttgcggcataaatatgtaacgctgctggcgggagcggcgctctcagtagcagtatttgcagcagcggccatgcccgcagcggtcagcgcttccacgacggaacggcagttgcccatctattgcgtaaaccgggatcagaaagtgtgcgcgatcagctttgacgcggcctggggcgacgcttccacccagagcctggtggatattttgaatcagtacaatgtgaaggccaccttttttgtgattggaaactgggccgaacagtatccggaggatgtaaaaatgctcaaagaaaatgggatggaagtcatgaaccactccagcacccatgggcatatgaaccagatgagcagcgaggagattattgcagacatcaagaaatgtaatgatcagattgaggctttgaccggggaatgtcctacgctgttccgtgcgccgtacggggaatatgacgaccatgtgattgccgccgtccgctccatcggtatggagccgatccagtgggatgtagatagtctggactggaaagaaatctccgccggcgagatttatgagcgggtaacatcccgggttaagccgggcagtattattttgttccataatgcggggctgaataccccggaggctttgccggatattctggaatacctgataggggaggggtatgaagtggtacccgtcagccagatcctgctggatggggagtacaccatcgaccacgagggacgccagtgggctgcggagtaagcaaagcatcagacctgccggccgcaggaactggcgcggatcggcccgacggatgaactggataaaaaaactggtatcggaattccgataccagtttttgctgtgtggattactgcagcgcgatcttcggcgtgcggtggataatttcgtgacgcttaggaccggtggaaaacagtttgatgggcaccccaagctcctgttcgataaagtccacataaatcaaggcttctttgggaagcttctcctcgtcggtaatgccgcggatatcgctcttccagccgggcaacacggtataaatcggtctggcgtccttaagcagccgggtcaccgggaaatctttcacgatccggccgttgatctcgtagccggtacatactttgatctcatcaagatagcccaaaacatccagacaggtcaggcatacctcggtagcgccctgcatttccacgccgtagcgggtcgccacagcgtcaaaccagcccacgcggcgggggcggcccgtggtggcgccgaattcgcccttgtcgccgccgcgtttgcgcagctcgtcggcttcctcgccaaagatttccgaaacgaagtcgccgccgccgacagaggaagaataagctttggtcacagccacgatatcctcaatgtagcggggcgggatgcctgcgccgatgcatccgtaacctgccagggtgttggaggaagtggtcatgggatagatgccgaaatcgggatctttcatggtacccaactggccttccagcagaactgttttgccttcccgcaaagcggtgtggacaaaacgcgctgcgtcgccgacatagggacggatcaattcacgctgctgaaccatttcatcatacagtgcctgaggatccagaggatctttgtgatagagatggacaaacagcgcatttttcagctggcagactttttccaggcgttcgcgcagcacatcgtcgtcaaaaagttcgttcacctgaatgccgattttggataccttgtcggcataaaacggcgcaataccggatttggtggagccgtatgccttgccggccaggcggtcttcctcataggtatccagcaaaacgtggtatggcatcagcacatgagcacgatcggaaacgatgagcttgggggcgcttacgccgccgtcaagcagcatctgcagctctgctaccagcttgcggatgtccagcgcaacgccgttgccgatgatattggtaatattggggtaaaacacacccgaagggagggtgtgcagcgcgaaacggccatagtcgttgatgatggtatggcctgcgttggctccgccctggaagcggatgaccacatccgcctgctcggcaaacatatcggtgatcttgccttttccttcgtcgccccagttggcgcctacaatcgcttttaccatagttttaattccttcctgcacggggttttgcacgttctgccctatcccgcacgattacgctctgattatacaatacttttttccgcattgcaagggttacctgcgggccagagcgggccggctgcatcggtttcgctgtcggaaaagggcagcaggaaggtggggcagccctcaaatcccggggcgatggcccagggttggtaaaagaaatggaatcctttttcgctcaggtagaaattgcgcagattgagattgcggcgcaggcggcgggaaaaatccggatggtatacagccagggaggattcctgctggcggcggcattgttcccgggctgctgccaggcacagcgcgcgcacgcgtgttccgcgcgggaaacattcggaagcggtgatgggataacctgtttccaggttccaggtatcggcgcgccgcagcgtcagtgcttccggcgtaccggcccattcggtgcagtctgagtaaagactgagcacgccgcgctcattgcaggtcaccgtacaggtgaggttggcttgggcacagggcagaggggcgctctcgtcccgggcatgttcaaaagccgccagcgcttccggatagagccagcgtccgcagtatgagagaaatgaacgggcgcactgacggtaatagcggttgaaacggcgcatggcgcggctgcgcatgccgctttggcattggggcacgcagatcccggcctgcagcaccgggatttcagcacacgtccactgccgctgttcttcctgcacaatgagttctatcgtatctgatattgctttcacgattggcatcccctcctcacgccacattatgcggcaaaagcggcgcaggtgcggaaaaaagggtttactttcacagtgtagtatgttaaaatatcgaaaaagaagcccatcggacagcgattgcggtgaaacagtggaaaggggaagcgtgatggcaaagatatcgaaaaaggaaaaaaatattgagttgtacaaggcgatcctggcgctgaaaaatctggatgaatgctgccgtttttttgaggatttgtgcaccgtgcccgagttgcgggctatggagcagcgctacgaggtggcgtctctgctcaaccagggcctgatctacaacgatattctggaacgcacaggggcctccagcgctacgatcagccgtgtgaaccgttcgctgaattatggcgccggcggctatgaggatgtgttccgtaatctggctcagcagacgcaggaggaaaagcgttgatggactgttatacttctctggcgggtgggtacgacagtctgaccgaagatgtgcagtatgaaaagcgtgcagctttcctgcagaagcttttggccaaaagcacgatcccggtccatacggtactggatctggcctgcggcaccggtaccatgacgtgccttttggcggaggcaggttatgagatgatcggcgtggatctttcggaggacatgctctccgaggcggccggaaaaacggtcagtcccggaaaaatcccgccgatttaccttcagcagagtatggaggagctggacctctacggaacggtggaggcggcggtgtgctgtctggacagcataaactatctgacggatgcgcgcgccttgaaacgggcgctgcagcggcttcatctttttgtggcgcccggcggcgtctttctttttgatgtgaatacgccctgtaagctgcgcagcctggacgggcaggtctttctggatgagcgggaggatctttactgcgtctggcgggcggactttgaccggcgcagccgtatttgtacctatggtatggatatttttgagcggcaaggcacgttgtggcggcgttcgctggaggagcaccgcgaaaaggcgtgggaagtggaagagctgaagcgctttttgacagaggccggctttggccggatccgcgtttggggcgactgccgtctgcgcgcgccgcggcaggacgaacagcgcatttatttttcttgtatacgggagtgaaatgatttatgacagatcggttaatacgggcaatcactgccgacggtatggtcaaagcc

SEQ ID NO: 3941 - DNA, 3021 bp, Unknown
  16S sequences of unknown bacteria
gccgatgaaattcacgaccatctgccagggctggaagttggccagcagcagggcgcctaccacgcagcccagaaacagggaagaatacacttccttactgatgagggccagcgcaatagccacgatgggggggaacaacgcccaaccggtggctacgaagccggaaccgtcattggccaccttggcgatgaccagtgcgatcacaacgatcgccagcgcaacaaaatacgctatacgagtgcctttcttttccattaggtgatttacctcctcaaatttggtgactttatggtagcgttttttggaggtattgtcaagattccagaaaccgcttccggcctgaattttgaacaaattatgaatcaatcttttggacgttcctctgaaaattgcgctgattctcactttcttaataggattttgcggtctatttacggaaaacatataaaaatcgtgctaatatttaaaaatctcttaacgcaaaattaacgcactttttgcgcctttttccttttctagcagctgacctgacaaaaatggaaatcgaaatatcgcatatttgcgttgcagacccattctgtccgtctcgcggcggacagctccctgcacgctgccctctcgaagtgtgtaggcgcttccgcaggccgcaagtccctcaaaaaagggagtggcgtaactcccgctgcgccacccccttagagaaagccctgtcctatattcaatagaaaaaatgagggcgcagctttcgctgcgccctcacgatgtaggatcggttcagaccaacctcaaaggaacgatattcttacttgctgtagagcgccttgtcggcctcggccatttcggcaaagatacctgcgtgcttcttggcggtgatagccttgatgaccagcagggtggcgatcatcagaacgatggcgatgatcatgcagaccacagcgttctggacgataccggcaatgatgaagctgacgaaggaaacggcagccacggtgataccgtaggggatctgggtggccacgtggttcaggtggaagcagtgggcgccggcagaagccatgatggtggtatcggagatgggggacaggtggtcgccgcacacgccgccggcgcaggaagcagccagacccacggacagcagagtcatctgggtatcccagtcaaacacggcgcagaccagcgggaccatgatgccgatggtaccccaagaggtaccggtggcgaagccgatgaagcaggccacgatgaagatcacggcgggcaggaacttagcaaggctgccggtgttggccatgacgccctccacgaaggaacccacctgcagaccattgtcacggcacaggccgcacagggtccaggcgaagcagaggatcaagatgggggagatcatctggatgaagccgttgggaatggcttccatggacttgttgaagccaatcaggccacggcaccagtagtacacgaaggtgaacacaatggcgatgatggagcccaggcacaggccggtaccggcggtggcgtcggagaaggacatgatgaagttgccgtggttctcgctcccggcgtcccacataccgccggtccagatcagaccaacgatgcacagggcgatcagaacgataacgggaaccagcagatccagcacggaggagtgcttctcgccttcctcgtaatcatcagcaccggcgaagggacgctcgggggtggtgaacagatcgtccttgacctgagcattgtactcatgggtcagcatgggaccgtagtcaatgttcagcacggaggtgacgatgaccatcaccagcgtcaggatgcagtagtagttgaaggggatctggctcaggaacatgctgatacgggagccggggaagccgtcgggcacgtaggatgcaacggcagcggcccaagaggacacgggagccagcatacaaacgggagcggcggtggcatcgatgatgtaggccagcttggcacgggagatcttgtggctctccgtcacgggacgcatcacggcgcccacggtcaggcagttgaaatagtcgtcgatgaagatcagcacgcccagcagcatggtcagcagctgcgcaccggagcgggtcttcacggccttcttggcccagcggccgaaggcagcggaaccgccggccttgttcatcaggtccaccatgatacccaggatgaccaggaagatcaggatggagatgtcgatggcgttgatcatgccgacgccctcaccggcgccgatgaaattcacgaccatctgccagggctggaagttggccagcagcagggcggctgccacgcagcccagaaacagggaagaatacacttccttgctgatgagggccagtgcgattgcgacaacaggggggaacagggcccagccggtacctacaaagccagagccatcattggtgaccttggcaatgaccagagcgactacgaccaccgccagcgcaacaaaatacgctatcttggtgcctttcttttccattaggtgatttacctcctcaaatttggtatccctatcttactcgtcctaacggactattgtcaagttcttagcgtgcttttccctctttttaacaaattgtgaactggccttttggattttttcacaagaattattcacgatatggtggatactttacatgctgactggaaaaaaatacaaggattgtatacaatggaaagaaaattaaggcccttaaccggcaaaatgctgaaacaccacgcgtagttctatcatgcagaataaacgaaacggcgataacagcatgggagaaggactgtcccaaacccggcggagcggccatgataccccgcaggaacagggagctaccgtttggtcgaaacagctttttgttctcctataaaagacgatataacggaaatctgtgcgcctgcagcgtgcagcaggcaaaggccgcatcgtccatgatgatctgcacgctttcagcactggcggaatactttttgtcaacaacggtgctttgcgcaaggaacgtgtctccgacggcatacttt

SEQ ID NO: 3942 - DNA, 7617 bp, Unknown
  16S sequences of unknown bacteria
ccttcttgaagatgacgttgtagtcgttctcgccgaactggagatcgatgcgtcccggatgtcccgcggagtggaggtgcgctatgcagtcgaggttgttcacgatcgacgggattatgttgccttccattacctgctgatgatagatgtcgtagacgatctttacgagcgggtggtcgacctcgtggatgatgtcgaacgcttcctgtgctctccagaggtagtaaccgggatggttgacgatggtgttgagcggctcgagcatgatgatgatgccggtgtcctcgagtatcggctttgcctgcttcagggtctcgacgatggcggcgtgctgctcttctctgggagcgccggtgtcctgtccgacctgagtgatgagtctcgacgcgccgacgcgcttagccgcctcgcagctctcccggagtcccgcgagccattccttgcggaacgcgggatcggtcatcctgaactcggtggtgcacatggagcgcagctcaacgccggtctcctcgcaggtagcgcggactttgtcaaggtcaagatccttccagttataagtctccgcgcagtcaaaccccagctcgccagtcttgcgtatagcgtcgcagaagtccatccccccgaagaaacaaggaatcggaatacaaattctcataatatttcacctattgcctttcaaaaagtggtccgaatcatcggtaaacaaattataccacagttttcacgaacttgcaaggggttttcggaaaaacgttgaaattttccttaaatcagtgtttccttattttttcagagctgttttgtctgaattttcactttcagatttgtccgtcccatccgcatatagagcgcgacgaggacggcgagaaggacatagatgaccccggcgaaaatcctgaaaattcccgcgccgaaaatctgcgtcatgtttccgaaaaagagcggcatgaccatgattccgacatacgcgctcgccatctgttttcccatcgcggactgcgagttttcctcgccgaaggtgtcgggcgtcaggtgaaccatgttcggataaaccggaccgtttccgagcccgacgaggaagagcccggcggcggcgcagaaatccggcagtggcagaataatgagaagaacagccgccgcgagaaccgagacgccgatcgtgattattttccggctgttcagttttgccgcgaggacgccggagaggaatcgcccgagcgccattccgaagtagtagagggtggtgatcccggcggcggttgaagccgccatgccttttgcgtcaacgaggaaggtgctgccccacgcgccgcagaggtattcgagcgagcaggagaagacgaagacgaggcaggatatcgcgattccgtttatatgccgttttccgtttttttcaccggcggcgggcgtgtcgtccgtggttcgcggcgcgtggcttgacggcttgccgacttttccccagagcgggagggcggcgatgaggatgagggtgatcgcgagctggattatgaaggcgcttttgtaaccgccgcgccagctgccgtttttcagggcgagggacatgaggaaggggctgcacgtgacgccgacgccgtagaagcagtggaggaaggacatctgggcggcgttgtagtggacggcgacgtagttgttgagcccggagtcgatagcgcccgcgccgaagccgagggggaggcagagggcgaagaaccagagggcgttctgcgagagggcgtagccgagcattccgatggcggtgagagcggtggacacggcggagactttcccgatgccgaagcgttttatgacgcgtgagctgagaaggcttgagcagatggagcagcagcaggagaacattgagacgtacccggcgagagagacgggcaggttcatttcgcggtagattttcggccaggcgggtccgaacagagagtctggaatcccgagcccgataaaagcgatataaataacgacaagtaaaagtgtagccatactttttccctttaataaaaaataacgccctcattataccacatccccccgcaaaagtcaatacccccgaaaaaataaaatccagccccgtatccgcgacgcactatgtttgatgaggcagagacttcatccgacgtagagagaagccttgactttgtccgcggcgacccgccgctgtttgatgaggcagaaacttcatccggcgcacaccgaaaccttgactatcgggtgcaggggctggcccctgccccctggtgctgaattttcgagatggtgtgctgaattatctgttgacattgcgggtgaattgctgtataatatagatagattgatgtccggaaattatttgaatgttgtggactggaaaggattactggtatgaagaagagaattttgtcggttattttgctttgttcgttggtgctttcggcttgcggcggggcggctcagactgaggatgaggaaagttctgcgccttccggggagagttctgccgcggagactcgggagaccggggagactcgggcgcatgatgagcttgaggcggcggatttcggcgggcggacgtttacgattctggcgcgtgaggagactcggtttgagtttgacacggagcaggacggcgagcttgtgaatgacgcggtttataataggaacagggacgttggggagcggttcaattgtaaggttgggtatgtgattgagccgggcgcgtgggggtctaaggatacttatcaggggctgatacggaattcggttatggcgggggacgatacttatcagatcgttactggtcaggcgaatattgtgcttccgctttcggtggattatatttatcgtgacctcgcggagtctcagtatattaactttgagaagccttattggaaggacgggtatacggataacgcgaagatatacgggcatctgtacgcggtgtgcggggatttcgcgttgactgcgcttacaatgtcgaacgcgctgttcttcaataaggggataatggataaatacgggatagagtacccgtatcagacggtcatggacggaaagtggacgtttgacgagtttctgtcgatcgtttcggatgtgtcggaggatctgaacggcgacgggaagattgatattgaggatatgcacggtttcggggcttataataattcggtgaatccgttcaattattcgacggggattgagttcactaaggctatggcggacggttcgagatcgataactttcccggacgagaaggcggtggaagtgtatgataagatgtacgatctggtgcattcggacgcgttcattgatacgcagaagctcggcacggggtttgacatcgagagccagatggcggtggagttcaagaacggaaagtacctgatgatgggaatgtacctgggcggcgtcgagaagctccgcgatatggacgtggatttcggtattcttccctacccgaagtacgacgagaagtctgagtaccgcacgtcggtgctgcgccgttatacgatatcttctgttccgacgacggcgaaggatccggagcaggttgagatgcttctcgaggcgatggcgagcgaggggtataataagattgtcccggcgtattatgatatcgcgctgaagggtaagtatacgcgcgacgcggagacggtcgatatgctggatatcatttcgggttcgtcgtggtttgacttctgcgatatttactattcggatcttcaggggataagcgattatctgtctggatacgcgatggggtcgtcgaagaagctgatgagctcctttgagtcgacaaggaagtcgttcgaggcaaatcttaagaagctgttcgaggcatacgcgaacgcggagtaaaaaagaaacaggcacggcatgacggctgtgcctgtttttctgacaggttaaaaaggaaagcaaaaaggacacggaaaacgtgtccttttggtggtggagacaacaagacttgaacttgtgaccccttgcatgtcaagcaagtactctaaccagctgagctatgcctccggaaatggtcggaatgacaggatttgaacctgcgacatcctgctcccaaagcaggcgcgctaccaactgcgctacatcccgattcctttttgttgaactttgttcaactgtcgagtcctgcgcacctgacgaatattattataccatattccgagggttttgtcaaggggtttttcaaaaaaaaaacggcgatatgatgaaattatcgcgtatcgccgtatataggtcgttttcagagtatcgcggagccgcggattatcccgcctccgggcttcagaagatcgcggaggctgtcggcgagacattcctcggtgttgtcgattattatgtcgacgacaccggggaggatgtgcggagaggtcatgtcgtcctgaacgaatatcagtccgggatagagctttgagtggttccggcgggacacatcgccaaggcgctccgggtcgctgtcaaggacgatgaaacggtttttcaggatatcaaggtcgtagtagcggtcgatgaagtttctatcgagccttgccccgaggattaggattgtctgatcctccgagtccgccgggatgaggctgtggtcggccatattccggctcagccggcgcgcttttccggacacggtcatgcgaaggatatttccggtgatcggcggcttgaaggcgcatttgcagcggcgcgggtagaattcgtcgagcggctttccgcattccggacaggagaaaaggtgaatgatcccgcgcttctggaagagggcgacattgtagccccggcgtcgggtgatatcgagcgcttccggtgtgagcgcgtcgtagacgaccgcggcttcgacaagagagcccgcgatatcgaggtagctgagatagtgctcgtcgagctctccgtcgagtatcttccggaagatcgtgttgttcgaatacgggatgagcggcaggacgcgctcgaggagcgcttcgtccatctcggcgattgagtcgaaggagactgatttcatcagcttttcggtgtcggtgtcgttcatgtattcggagagggacagaagccccgagagatcaagcccgttcttcgacaggctctcggcgagctttgagaggacgctcggcttcagcagtggcgcgagactgacgacgtccgagacgtcctgagggtttatgtcgcgcccggaggctacggcgtttattatcccggcttccccgaccgtcgggtcgccggagcttatgagcagctccaccggaacgccgaagatcctcgcgatgtcgccgaggacagagatatccgggaagctgtcgccgcactcgtagcggctgatcgcctgacgggtgaggttcagccggtctccgagctccgactgagtcatgtcggcggatttgcggagatccgcgaggaaggagccgaattttctggtgtcaaacataatgataaccttcttccgtttcgggatggtccggcgccggaggatcaccgcccgcgccgacctgtctgtggtattattatatcatgaccctgacaaaaagtcaagcaatgactgattgcgtacgcggtcattgcctgacgtcagatgagacttcgccgcgtcacttcccggcgtaaatctccgctattctgatgatgagatcggcgcactcgtccatttcctcaacgcaggcaaattccatcctgccgtggtggcagtgagagccggtgccgaggttggggcacgggagacccatgaaggagagccggcttccgtcggttcctccgcgcaccggcgagctgaccggttctaccggcttgccgtgggcggcggagacctcgcggattgcctttccggcgttctcgatcaggtggaactccggctcgatcatttcgcgcatattgcggtagctttctttgatcgtgactttgaccgttccctcgccatacttgcggttgagctcgcgggcggcgcgctcggcgtagtcgcgtctgacggcgagcttcgtctggtcgtggtcgcggaggatgtaggagagatgagccctttcgacctcgccggtcatcttcgtcatgtggtagaagccctcgtagccctcggtgtactgcggtctctcgagagatgggagcaggttgtcgtactcgatggcgacggcggaggcgttgatcatcttgtgcttggcgtcgccgggggggatgcctcgaccgagagcgagtcggcgttgaaggtctcgaagtcgacctcgccgaagctgccgccgtcgaccgtgtaggcgtatttcgcgccgaagcgttcgacgtcgaagaggtcggcgccgcgcccgatctcttcgtccggcgtgaagccgagcatgatcttaccgtgcggcgtcttttcattaatcatccgctcgactgcggtgatgatttccgcgacgcccgccttgtcgtccgcgccgagaagcgtcgttccgtcggtcacgacgagcgtcttcccgtggtagccggagagcaccgggaaatccttttcgcgcatgacgattcccttctccgcgttcagcgttatgtcgccgccctgatatttcacgacgcttgtgttaacgtcatggcagggagcctcgggcgagacgtccatgtgcgcgatgaagccgatagcgggcgcgttctcgcagccctcggtcgccgggagctcggcgaagagatacccgtttttgtcgagatcgacgcaggcgatcccgagagagcgcagctcatccgccagagccttcgcgaacacgagctgttcgggcgtcgacgggcaggtttcgctgtcctcgttcgacgccgtcggatatgaagcgtattttatcagtctttcgtatgctttcattttattttgttcctttctattgattcgatgattttttcaatttccgccgggtcgacgcaggactcgggcttcccatagagcgcttttattccgtcaggcgtgaaccacctgacgctctcgatctcctccggctgagggatgatatctcccatctccggtttgtattcaagccggtagaacctcgtgaactgattgtccctgaacggctcgccgtagaattccgcctctgtgagaagcgatttcgagccgaccggaacaaggtcctccgacctcgccgtcagtccgagctcttctttcagctcgcgcagagcggaggttatatagtcgcacccggcgggaatatgcccggcgctcgagatgtcgtagcatccggggaacgagtccttgtcgtcgctgcgtttttgcagaagtatctcaaagccgccttttgccggtcgccagagccagacgtgcgcggtgcggtgtcgtatcccgttccggtgagcctctgagcgcgggacagtcttccctgtcggttcgccgttttcgtcgacgatatcaaaaatctcttccatcttattccttcttcacatagaattcagtcatgtcgttaagccgcaggcacccgagcgaaagcccgaagcacgccccgcagtcgagcgcgatgttcccttcattaatatatatcttcccctcgtgcgccctcgagacgccgacggtcggcgtgtgaccggtgacgaggaatttgtccggaaaataccgccttgagtagtcggtgcgctcgctgacgacctgtaatagctggtaatccgcgagcggcttctccggcgtgaacc

SEQ ID NO: 3943 - DNA, 3939 bp, Unknown
  16S sequences of unknown bacteria
cctttaaaaaaacgtccgtatttgatatactgtataagtatctaaaatatttaaaatatatcaatttacagaccgaacgagaggtatttatggcttatagaaacgaaaataaaaagaatttcaaccgcaccgacaataaaaagggcttttacggcaaaaagaaggaccgggagaggaatttcggcagaaattctcggccaaaaagagaaaagccgcaaaccaaacccaaatatgaagaaaaacctcggagagatgatgactttgaggccgaaaaccaaattatctacggcaaaaaccctgttaccgaacttttaaagtccggaaaagaggttgacacggtttttgtaagcgacagcttaaaccctgccgttaaaagttattttacggcccttgcaaaagaacggggtgcagttgtaaaaacggtacattccaacaaattaaatcttatgtgccacagcgaaaacaaccagggcatacgggcttaccggagcagtatatcatatcggagcatcgaggatattctccaatctgccaaagaaaaaggcgaggacccatttgttgttatctgcgatgacatcgtagaccctcacaaccttggcgcaattatcagaagtgcatacttaatgggtgcccacggagttgtaattccaaaaagaggcggcgtaagcgttacaagcgttgtgcaaaagacaagtgccggcgccgcaatgcacctgccggttgcaaaagttgccaacattgcccaaaccgtgagagctttaaaggaaaaaaacatatttgtttactgtgccgaccttgacgcacagcctgtatataaacacaacctgacaggccctatcgcacttgttgtaggcagtgagggcaagggggtacaaccacttgttaagagcctgtgcgacgcaacggtttcaatccccatgcacaatcggggcacgggagttgactcttacaacgcctctgttgccgccggcgtgattatgtacgaaatcagccgtcagagagccgaaaagtaatctttaaaaataattttaaaggggtgagaaaatcaaatggatcagagggatatcgacaaaatcctcgaagacataaaaaagagaaaacggcagtcggaacaaagccgggttgcggccgtaagtgccgaaatcaaaagcgataagggcgatacggagataaaaatccccgtacagcctgttgaaaaacttaaacctgccgaaaagccaaatgtggaaaaagaagtcatcgaaagagacaaaaaagttctgtccggctttttgaacggcgatgacgacggtgattttgccgcccatacagcaaaaaaaagcgaggactacatcgacgagaatttcaaaaatttctttacccagtcggttatcgtaacaaaaacaccggagcaaacctcaaatgtggaaataaagcgcaaaaaaggattttttaagcgcaaatatgtgacagacagcctgtcgctgaaaaccccggtgcaggacgaagaatccaccaaaccgaaaatagtaaaaaaagcggagctaaaatcagcccaaaaagcggaagtgccaaaagaaacatccccaaaaccggctgaggaaatggaagaaaaaattcaagcggaaaaatccgctgtttcccataccgaggaaaaacacactttgcccgacgccgacagcttggccagatccatactggaaaaaagacaaaatccgccaaaaaaagaaaaggcaaatcccaaggaagatgatgttatttccgctgcggaagataaaaaggcgtcatccggatacgaagaaaaaacgaatattcccacagatgacggagatatagtaaacagcatttacaattcggttttgcgggaagaacccaaaccggaggaacctacggaggcggaaagccaaccgaaaaaccggcccacaacagacgaaaccggatttataaaccttgagcccacagaagaatacccggaaaaggatgaaaagccgggcgataaggttaaaatattccggtcggaatacgaggacgaggaagaagaagtatttgaaccgtacatcgtaaacagcgagtttttcaacaaggccgacagcgaaagccgggacattgtaggggaacttatggatttccgcaagactttaaacttccgtatggttttagggcttgtgtgcggaattatactgggatatttcggcctgcggagccaaaacagtttacctatgccggcctttatcgcacccgacgcccagccttttatgttttacattgcctgcgtggctgtctacctgccggcatttataggttttttacccacgattatttccggctttacatcaataaagggcaaccctgccccggatacattcataagtcttggcggggttttgtcccttttacagcttgtgttgggggtagttttccccacagggctgaacgttggcggtatgacggtttttgcctccgccatgtgtattgcaatggcgtttaacgcaatgggcaaaaagataaacacaagcacaattataaaaaatttgagccttgcaaatgttccggacggaataaacgcaggctatataattgaggacagtgacgccgttaaaaaacttgcacgctcccttgacgaaaaaacgccgaaaattcttgtttcaagaaagacaggagccatcgaagattttgtaagcagcggattttcaattcacagcggtgattacactgcccgcaaagttgccgtggcaagttatattgtaacatttgtgtgtttctgcatcggcacttttatgtcaaaaagcctgcttacgggccttttgtgtgcaaccggagcagcggcgtttatggctccactttcacaaacccttgtaactgctgtgcccagcgcccttatgcaaaagagccttgaaaaagtaggcgcccttgtaaacggctggaagggcatagatcagctttcaaaaaccacccatgttaattttgacgcaaagcaccttttcccaaagggaacggttattttgcacggtataaaaacatttgaaaaagagcgtattgaccttgcgattatgtatgccgcaagcgtgcttgtaaaagagtgtgaaacactgcgccccctgtttatggatgtaatcgaaggcaaaacggatattttgtacccagtggaaaattgcgaatacattcaatgtcggggctatgtggcctgggttgaaaaaaacagggttataatcggcaatcgctcccttatggaaaaatacgatgttgccatgccccctgtaagtatagaaaccgtctttgtaaaacaaggcagaaagcctgtttatcttgcggtaggcggcaaactgttcagtatgtttgcggttagctaccacccggatgaaacagtcaaagagaatttggacaagctgattgaaagagatgtgaatataattctttcttcaacggatttcaatatcgacccggctctgatagaacaggtttacggagtgcccgttgacagaattacggttttaaaccaaaaagaaactgctcttttaagcggatttacaagttatgtggacaaaacagatgcctgtgttgcccaccttgacagccttacaagccttgtggcggccttttgcggtgcggaaagtgcaagatcagccgaaaagttctgtgagatattacaggcaatttgcgtgcttataggcgctgtgctgtcagtgctttttactgtttcacttacactgccttatatttcggtgctttcgatgttgcttttaaacttcggctttatgggcatcacaatgatcggcgcatttataaaaaaatattgattaaattataaaaaaaacagaggcaacggcgcctctgtttttttacaatcataagcagttggtgccaataccacacaaactgataaaaaggccttgacaaaagtttattgctatgctatacttactaagcattaagttgctggtgtagctcagccggtagagc

SEQ ID NO: 3944 - DNA, 21649 bp, Unknown
  16S sequences of unknown bacteria
caagcaagtcgatctttgttccgcactttcgttgttcaattttcagggtgtgtttctaaacccaatagtcggtgttgattgcgatgaggtcccacctgttcccatcccgaacacagaagttaagctcattggcgccgaagatacttggctggaagcggcccgggaaaataggttgatgccggcacttaggatgaaccacccaatagggtggtttttccatatatattaaaatgaatcgcaagggggaaagcagcatgagccggagccaccatatgttcctgttggagggcgcttatttcgtcagcttttgttcgctgtacgcctatacggtcaccatcctgctggattatggctacaccgaggtacaatgtggttacatcactatgctgcagtacctggttatgatgatcgccggccctatttacggccggttgattgaccgttcgatttcccccaaatggttgttcattatattggtagcgggtgggatgatcgtcacaccgctgttgcccttctgttttggccgcggatttctttggacgatgctctccttcagcctgatctcggcgctggattactgtgcttccagtgtttttgatacctggaccaaccagatgaccttgcgggatagcaccattgattatggcaatatccgcagcgcaggttctatcttttatgccaccacggccctgatctccggctaccttattgctcctttggggatcaatttcctcttttggctgcacatgggggcgctgggcctttccattctgctggccctcccactgtctgatcccaataaacttccccttctccatccggaaagtgacccggaaaccagtgctgatctgcaaaaggagtccctgtgggccagctttaggaagctgttgggctgccgcccctatgtgattttcctcatctgcggcacgctgtactacttcgccacccgttcggtcaatggctttatgcaggtcattatcaattacatcggcggcgatgcctccacctacggcctttcggtgttcctctactgtgtgggtgagtttctcctgatgcgcctggccagccgcctgctgcaaaagggcctgccgctgccggtactgtttatcgtttccctcgccgcgctgggcgcacgcatcctgctgctgggggtgctgcgcagtatggccggggtcatggccacgcagattctcatgtccatcggctttgccggctttctccgctttaatatcgattatgtcgcctcactattcccgcggcagtatgccgggcgggctatcctcatcagcgtggcggttacgcagggcatcggcagtatcgtgggcaacctggtcggcggctatctgttggccaatgtcggcgtgccagtgtattgcttcatctgcggcggtgccatgctgctggcactggtcatttttattatgggtaagccctttgcagtgacagagcaagcttgagacatttcccacaaaaattcgacacgaaatttatataatttttttgagcaatgacacttgtttcaccccccctgtttggtaaaatatagttaagatatagttaagatagaagcagtgattgaccaaacaggaggaactaacatgaactggctttctaaagcaaacgcagccatgaaccgcattcctgcccttgcgtggatcgtagtgatcatcgtggtgctggcactgatgctttccctcaaccaccagcaggcagaaaagctgcccctggagcatgtagcggggttgtaccaatccgatatggcggcgagtgctgacatcttttacattgcgcagatgtacaccgatggccgctacgagatcacgcggacggaggataccggcgacggcggttccaaagatactgtcatctctaccggcacctatgaggcaatggagttcggttaccggatggaagatggcacgaccggcgagtggcaggccattaccctcgatcacaccggcttctattggcgagatgccgcgctggaccgcctgacgcatttccaccaatttgccgtttatggtgtaaaattctgatatttcgatacataaataatccccctgcgtttcggcagggggatcgctttgtttataagaaaaatcagaattccagcttcttttcaatgtagccgcgcagctcgctgatcgggatgcgaacctgctccatggtgtcgcggtcacgcacggtcacgcagtgatcggcaggggtgttctcatcgccgacggtctcaaagtccacagtgatgcacaggggagtaccgatctcatcctcacggcggtagcgcttgccgatggagccggcgtcatcgtaatccaccataaagtacttggaaagctcctgttggatctcacggcccttatctgccagcttcttggaaaggggcagtacagcggccttatagggggccagcgccgggtgcagacgcagtacggtgcggacatcatcattgccgttcttatcctggcccagcacttcctcatcgtaggcatcgcacaggaaggccaggaagctgcgctccacgccgagggacggctcgatgacatagggaatgtagtgctcgttcttttcctggtcgaagtaggtcagatccttgccgctggtgttctggtgctgggtcaggtcgtagtcggtgcggtcggctacgccccacagctcgccccagccaaaggggaacatgaactcaaagtcagtggtcgccttggagtagaagcacagctcctcgggatcgtggtcgcgcaggcgcaggttctcatccttcatgcccagagagagcagccactgatggcagaagttgcgccagtactggaaccattccaggtcggtattgggctggcagaagaactccagctccatctgctcaaactcacgcacacggaagatgaagttgccgggggtgatctcattgcggaagctcttgccaatctggccaatgccgaagggcagcttgcggcgggtcgtgcgctggacattcacaaagttgacaaagatgccctgtgcggtttccggacgcagataaacggtgttcttggcatcctcggtaacgccctggaaggtcttgaacatcaggttgaattggcggatatcggtaaagttgtgcttgccgcaggtggggcagggaatattgtgctcctccacaaaatccttcatctccgcctgggtaaaggcatcgatggggcggggcagctcaaagccgttctgggcacaccagtcctcaatgaccttatcggcacggaagcgctcgtggcactcacggcagtccatcagagggtcggaaaagccggaaagatggccggaggccacccaggtctgggggttcatcaggatggcggcatcctggccgacattataggggttctcctggatgaatttcttccaccaggcgcgcttgatgttgttcttcagctccacgcccagggggccgtaatcccaggtgttggccagtccgccgtaaatctcgctgccggcgtaaacaaacccgcggttcttacacaggtttaccagggtatccatcgatttttcggtatttttcatgtttatactttcctcctcggcatagaaccataatataatattttacttccataggggaaataagtcaagtaaacccggcaaaaaagagtaacacctccccgcggtgaaacagggaggcgtaaaagaacaaatgtttcacgtgaaacatttttaccggttcttttccgggtgcaggtgggtttgctgctccttcagctcccggaaaaacacatccaaaataccaacatagccgggcttccagggcttattacggccgcagtagtggataatgacggtgttttgccgcacccactccagactgtggtgggggtgcaggggattggcattgtaaaaggccaggatgcggtcgctgagattataccgctgactatcgaggagcttgacccggctgccatacagcgcggtaaggatatcctgatccggcaacagcagggcgtcaaagtgctccagcgcatactgccgcactgctgaaagatcgatcgtctgccgcaggccgtttagctccatcaggatcacaccggtattgatgtaggggaccggtttttccagccccaggcggtggctgttggcgcgggtcagcagctcccgggtgtgggtgcaggccataaacagcttcccctcaaaatcgctgcggtacagcggtcccagtgggttgatgaccacaatatcggcatccaggtacaggatacggtccagttccgggggaagcagcaggggcgcggccagccggtagtagatttcctgcggataacggtcggtttccgggaagtcctcgaatagttcccgcggaaccgagataaagtgcagggcaacagcggccggcacctgccggcaaagctgctgctgcgtttcttccgctaaatcggaggagaggaggtacacatcatagtgtttttcgcctccatgcagtactatggaatccagacaatccagcagcgggccggtgtagccgccattgatgcaaaacagtaaattcatgcggtacctctttgcgggatcattcattcaggatcttcatgaattcttcgccggtgatggtttccttttcgtacaggtacttggccagctcgtccagcttctcccgcttttcgttcaggatgccggtggccttttcatgctgcttctttacgatggaaatgaccagccggtcgatctccgcctgggtgccggcggagcaggccagggaggtatccccgccaaggtactggttgttcaccgtttccagtgccaccatatcaaattcatcgctcatgccgtactgagtgagcatggcacgggccaggcgggtagcctgctcaatatcattggaggcgccggtggtgatggaaccgaacttgacttcctccgcggcgcggccgccggtgagggtagcaatcttattttcgatctcctctttgttcattagatagtggttgccctcatccacctgcatggtgtagcccagcgccccggaggtgcgggggataatggtgatcttttgcaccggggcagagtggctttggcaggcagccaccagggcgtggccaatctcgtggtaggagacgatccacttttcgtggtcggtgaggatggcattcttcttctggtagccggcaatgacgacctcgatgctctcctccaggtcggactgggtgaccttagtgcggccatcccgtacagcgcgcagggcagcttcattgacgatattggccagttcagcgccggaagcgccggaggccatgcgggcgaccgccagaaaatctatattatcctcgtgctccacctttttggcgtggaccttgaggatggcttcgcggccctgtaaatcgggcagctccaccggtacccggcggtcaaagcggccgggacgggtcagcgcgggatcaagggattctggacggttggtagccgccaaaatgatgacgccgttattgccctcgaagccatccatttcggtcaaaagctggttgagggtctgctcgcgctcatcattgccgccatattggccgccgctgcgcttttggccgatggcatcgatctcatcgatgaaaacgatgcagggagctttttcctttgcctggtcgaacagattgcgcaccttagaagcacccatgcccacaaacatctccacgaattccgagccggaaatggagaagaagggcacatttgcttcgcccgcaactgcctttgccagcatggtcttgccggttccgggagggcccaccagcaggatccctttgggcatggaagcaccgatggccttatatttactggggtcatgcaggtaattgacgatttcttgaagattgtccttggcttcgtcctcacctgccacatcggcaaagcggatccccccgtcggtggaggggacatagaccttggcgctgctgttgcccaggccaaacatcatggaattgggaccgccgcccatcttttcgctcatttttttatagagcagctggccaatgacaacaaagatgacgactggcaggatccaggtgaggaagaaggtcatcagcggggaggcttcctccacgatctcggtggcgaactgggcgccggaggcatacagacgctcggtgaggttcgggtcgtccatcacgccggtcttgtagacattctggccgtctttatctgtgaaaaggatctggttgctttcgatctccaccttgccgatctcgcccttttcggtcatggacataaaggtgccgtagtccacttccttgatctgctgcctggcgataagcggcacgataaaggaattgaacaccataagaaccagcaggacaatgcagtaatagtaaataagcggtttctttggggatttgacttctttcatgggcagttcctccgtttggatagcttgggtgtctatctaaacaaacacctattccattatattttagtgcgagagaaggggaaaagtcaatgcacagataggggaatttgtggcagagatgggcgggcggcggggaaaatgagaggaggtcaaggcaggccgcaggcaggctgatgtccggcgcaggtagacttatgcctgtcaggggcagcgcagacagccgcgtttgccgagaacatgcggatgaatcgctgcgggaggtagccctaacagctgctgccgtggaaaactgggaggagtatggtacagtattcatcggttatcccatctggtgggggatcgccgcatggccggtagatggttttgtaaccggcaatgactttaccggcaagacagtcatcccattctgcacctcggcgtcctctccgctgggacaaagcggagagctgctggccaagctggccggtaccggtgattggcaggagggacaccgctttggcagcagtgctgcgcaaagtgaagttgccgcatgggctgagggattgggaatctccggctgaagatagatagaaaaaagggaacctgttggttcccttttttggtgcgcaaaataggccctgccgggttacggcagggcctatgcctatggtgcggcttttacggttgaacaagaacttagatgccaaggggcttcagaatccaggagtagatgaggctgaacgcgatgcagtcaacatcggtcatggtgtaggcggccagggagggcaggccctcgatgacaatctgtccaaggtagggtgcgatgatggcgggcatcagggagatgaacagaccgtggacgatgctggcgataatggtgccgcggcgaccgcccattgcattggcaaagatggcggcggtaccaccggcgaagaaattggacatgatgccggggatgaccatgggcagaccgaaaaggggccacaggaacatgccgatgacggtgccaatggtggtgaagatgaagccgtaaacgacggcattgggcgcgaaggtgaacagaaccgggcagtcaagtgcgggacgggcaccggggacgatcttctgtgcaatgccattgaaggcgggaaccagctcggcgatgagcagacgaacaccggtgagcagaatgaacaggccaacacagaaggtgataccctggaggacagcgaagacgatgtagttctttccgccggcggcttccgctactacctcgggaccggccaggatggcaagcagcacatagaggggaaccatgacggaggcgactgcaaggtaggtatcctgcaggaaggacagcttggggctgaacttggtatcctcggtggatttggaagcatcgccggtcagcttggcaacgccggcactgagaacataacccaaagtacagaagtgaccaagagcgatatcatcgctgccggtgatcttgcggacgaagggctgtgccatggcagggaatacgacgcagcagataccacccaggatggcaccgatgccgatggcgagaccgtggccgaagccgcaaaggcccacaccaaagagaatgctggccatagcgatgtaaatgggcgcttcaccattgaggaagacatatttgagcttggtgaagcgggccagaatcaggtttaccacaaagatgccggcataaaccagagctatatcacggccgacgacttcattctgcatggcaacagccagaactgcttcgatggacgcgacagcgccatcaatgccgaggccggcagcaaaccatacgctgaagggttccagagcgccgacgattacattggcgcccgcagacagaaccataaagcccatcatggtcttgaatgttccgcttaggcaatcggcaaagggcttcttttgaagaatgagaccgagcagggcaacgaggcccaggataacggcagcattgataagaatgttgtcaatgataaaattaagaattgccataataacctcccttttttatcctcagttttgaatggaaagccgcatttgaggcattttatatccagccgttttcctccaggattggctgtaattttgttttgatttcctgtttgctgattaggctgttcagataaatcttgttgggaaaagaattgaatttatcaaagtgcggtttgaaattgacaccggcgatgagaatatcagcggtcttggaagcggcggaaagcatatcgctgtgatcgaccttggcctgtacacccagttctttaagaacggcttctacggccatttggcaaaccaggctgctgccgcagccattgccacacaccatcaaaatactaagcatctttggaatcacctcctttttgttatattttggaataacctattgggatccggccgtgttatctaacaaaatattgcagatatacactagaacaccaactgattttgcaataaattacaaatagaatccctttttcttataaacacattaacatttcatccatacaatgtcaacagttttagtcagaaagcataaaaaaccgcagattgaccaaataaacacatctatttttgcataatacgacaaaagaaaagggaaataataattatttaattgcaaagtattgcaatagtttgcaatatgccctataatggagacagttactgcgaaaatggagggaagaaagtgctattaaaagaaattgtggaagggaagcgttatgcattctataaagaggctgccgactggaaggatgccataaaaaagagctgctcccccctggtggcaacaaactgtgccacagaggaatatgcgcagcgcattatagaatgtgtggaggaactgggcccctatatcgtgatcgtgccgggactggcgattccgcattccatcaaaggctcccccggtgtgcagaaaacatcgattgcatttgcaaagtttgaaacaccggtgcgttttgatgaaaacgacctggataaagatgctgccctgttttttaccctggcggcggtggatgaggaagagcatctgaagaacatgcggcagctgtttctgattctttccgatgaggaactgctggaaaagctggcacaggcgaacaccgcagaagagcttttggagctggatcagttactttcctgattgagggccctcaccagttctaacggcgtttttattgtggccaggggttctttggcactaccaaacccataggccgcatggatgaagggacatccggccagcttggcgctggcttcgtccattttggtatcgccgatatagacgggggcggccaactgatggcgggtgatgatatcccggatattttcggcctttggtttttggctgcgtccctcgcattcgtagtcggtaaagtactgctgaaacccagtaaaccggaagaagctttcgatataaccattctggcaattgctgaccaggaacaacgggtgccggcgggaaagcgcttggagcatttcttccacacctgggtagacgatgccgccgtgggtggaaaggtaatcgcattcttcctttccgcagacctcaaagatataggcaggatcttccccgatgccggtaaacagggcgcgcgcgatttcggaggcagtcatccccatgatgctttggatctcggaaagggagggcgcttctttaataccaaaccgccaggtaagtgttagatgccagctttcggcaacactgcggcaggaatcccacagagtcccatccaggtcgaatatgatcccatcgaatttcataataaagccctcttttcatcgcaaaatgtttccggttcttttgctgctttacaatctaccacaggatatcctcatttttcaagaggtggaataaaaaatttcgggaggagtttttcaatgaacgacacaagcaactctattttttggaaggagatttttgagcaaccagaggcggtagcgaactgtctggcggctaaccgtgaggtgtgtaaacagatcgctgccgaggtaaaagaaaggaatatcaagaccgttgtgctggttggccgaggctccagcgaccatgcaaacctggtgggacggtatctgtttgaggctaagtgcgggatggtaaccagcatcagtgcccccagtgtggttacagcgtacaaatccgcgccggattattccaatgtactgatgattgcggtttctcagtccggcggtgcccaggatatctatgaggtgatgaaggcctgcgatgaacagggcggcatctgtgtcagcgtgaccaatgtggaaggttccctgatgacgcaggtgggtaaatataagatcaataaccactgcgggcccgaaaacagcgtaacggccggcaaatcctacatgacacaggtcatggtgctgacgatgattgctgcctatatttcggaagattcggagctgctgcataccctggatatagcgcccgagatcatttccgaatcactggcagtgctggaaagccaggtgcgggaggtggtgcggttctaccgggaaaccgagcatatgatggtcctcggccgtgggctgatggatgccctggccaatgaaacggagttgaaaattcaggagaccagctacctggatgctcgctgctacggctcggcggattaccgccatggcccgattgcgacagcccagcggtttgtaccctatctgttcttcctggcggatgaaaagaccgactactgtgcggaggcactgctgcaccgcctaaaggaggagagcaatatctggtgtaccgttgtgacgaataaggagaagtacctatcgttgggcgatacaagtgtgctgcttcctgtgaaatatgatggcattcgggcggtattttccggcgccgtattctcacagatgtttgcctgtttgtgcagcctctcccgggaatacgacccggaccacccaaagggtgtaagcaagaaaaccgtaacagtctaaaaaagctgaaaaaatcgatgcagaaaggacggaagttgaatggatagcaatgccctttccatgctgaaatacatcatggaaacaccggcgcaggtccgcagcaatatcaaaaatgccgagtcccttacggccaagatggtatcgctttttgcggccaggccctacaagagcgtctggttggtggcctgtggctccagctgtaatgcggcccattgcgcacggtattatatgcgggaataccttggagttgaggtaaaggtcattacgccgtttacctttaaccactatgaacatgacatggacaaggacgactttgtggtctgtatttcccaaagcgggtgcagcaccaatactgtcgaatccctgcgcctgtgtaaaaagcttggggtccccgcgataggcctgacaggaaatgttcattccgattttgagcgggaggccgatgatgtggtggactatggcctgggagaagaaaagctggactttgtatccaagggtgtagtcacgctgatggtattcctgatgttgtttgcgctgtatgcagcgcgtgcccagggaaggataaacaacgaacaggtggaaacggaaaaggcacagatgctgctgggcatagataattatgaagagcagatcaggaacttcccggcatacttcgaggccaacaagcagaagttgctctcgatggaacgggtgtatgtaattggggcgggcgcgaactacggcacggccctggaaggcgcggtgaagattggcgagacggtacatattgtagccgttggctatgaggtggacgaggccatccatggaccgcagatccagctgacccccaattacaatttcatttttattgatccgggcgatgaaaccgccccgcggatccagcaatcctataaggcggcacgggccatgacggatcgagtgtttatcctaagcaataaccccgagataactgggaaagaagtgatgcgtgtgacacatgccatcaaggaaaagctgaccccgctgtatacactggctttcatccagttgatctcgtactatgtggcggaaaccaattccacctggaaacagcacccgctgatgaaggactataaggagattctttcggggaaatcggccacataccaggcatacgactgcacatgatgcggtcttaatatcgaaaacttatttttaggaggtatattatggatgcaaaagagctgagaaaattgaaaaaattttctgcccagctgcgcattgaccagctggaaatgttcaagcagcgcgggatggggcatatcggcggctgcctttccgtgacggagctcatcagtgtactgtacggaaaacagatgaaggttgaccccaagaatcccaactgggaggggcgtgactacctggtaatgagcaagggccatgccgcgccggcggtggaggccgctttggcggagctgggattctttgataaaaagctgctgctgacaatggatgatatcggcactaggatcccgagccatgtggaccgcctgctgacccccggtatcgatgtgacctgcggttctctgggacagggtgccagcgtggcggccggtattgtgtatggactaaagcatgcaggcatcaccgatcagtatgtctatgtatgcatcggtgatggggagctgaacgaaggacagaactgggaggcattccagtttatggcccataataagctgaacaactgcatcgtgttcatcgataataacaagcgccagcacgatggttactgcgatgaggtcctgaagcccttcagctatgaagaaaagatgaaggctttcggtttctggtgcaagaccgttgatggtgccagtgaggaagccatcgatgatggcatcaatgaggcgaaggcagtaaaagaccaggcggtttgcattgttctggataccatcaagggccagggtgtcaagtactatgaggaaatgccggataaccatgcaccgaaggtatttgaggaaggccgggctgtaattgatgccgcaattcttgaactgagaaaaataacggaggaggaataagcaatgctgaaggaaaataggactcttggcggcgagctccgcaaccagctggttgcaaccgtaacggaaatgctggaaaaagacgaccgcattatggtactggatgcagatttgggtggcgcttcttttttcctgcgctttaagaaatcccatcccgaccgctttgtagactgcggtatttgtgaggcgaatatggtgggcgtggcggccggactctctctgcgcggctatatcccggtggtacacaccatgtcggcttttgtggcccgccgtgcgttggatcagctgtacatctcctgcgcttaccagaacaataccatcaatgtatttggttcggatcccggcatctgctccggttttgatggcggtacccacacctgttttgaagacctggccattatgagaaccattccccatgccattgtgtgcgatccctgtgatcaggtgcagctggactggatggttcgggagtgcctttcccgcaatgatggtgccatccattatatccgcgcgtaccgcaagaatgttaccgaggtctatgagcccggtaccaagttcgagctgggcaagggcaaggtccttatccccggtgatgaggtgctgctggtcggcagcggttacctaatgggcgatgccctgactgcggcggaagagctgagagcgcagggtatcagcgtggaagtggttgatccggttaccattaagcctttcgatgaggagctgatcctgaacgagacaaagggcaagaagctggtcgttacctacgagaaccacggtacggtaaatggtatcggtagcgctgtggcggatgtgctggccaagaacggtgcaggtgtgccgctgctgaagctcggcgctactgagatctttggacaggtaggtatggtcgacctgctgaaggaagcatacaagcttaccgcaaaggatgctgttgccgaaattctgaaggcctggcataaagtaaattaaagaaacaggcatccgggtcggtgaacccggatgcctattccctaaaacagttattcttttacgatggtaaaattcgaaggaaaaccgatagagaggttttccggctcgtagataatgatgttatcaaacgagcttagcgaggcgaagcgacatacgctggtctttccaattttactggagtcggccagcaatacgcttttatcggcacaccgcatggcaacctcctttaccgggacggtttcgatatcgtcattataggccagctggttatttagctcgataccggagcagccgaaaaaggcgtaatcaaagtgaaactgcgagatcattttttcggcgtaggtgcccacggtgctttcgtggaaatgcatgtatcttccgccgatcaggaagatgtccatatccatgttatacagcttccgggggatcagaagattgggtgtgacgattttaatgcgtttatcttgaatgaaatcgataagctgggcgacggaagttccgccatccaggaaaatacattgaccgtcctgaattaggcttgcggcggctttggcgatcacattcttttcttccatatgctccgtcagtttttcgctggtgatcagcggtgcaacatttcccaggggggacccgctggttttggttgcgcctgcacgcactctcagtgccaggcctttttgctccagccgttcaaagtctctccggatcgttgcttcagatacatttagactggcggcaatctccttgatggtaacggtcgtttcggcctccagcttttgcaggatataatccattcgctctgttgcaatcatataaaaactcctttgatcccgatattcagcaggcgctttttcgataaatcaaaacgcctcaaaaagattcctttggacaatgagccccaaaatcaaggtgggataatttatattattagaatacatcaaaattgaaagataaacaagcaaattctcaaatattctgcaaactatcttggatttgtgaaaagaatacgcaaaatgtgacaagtactttatcaaagctttcattataaaggaagaacaaaaaacgaggagggcaattcagatgaattatccggcttacatatcaccttcaattgcgtgctgcccgctggagtgcctggaagagcatgtgcaccgcctggagcagctagggatagagatgttgcatgtagatattatggacgggaattttgtggcaaattattgcctaggaacggaatttattcccttgttgcacaggataacaaagctccccttggatattcatttgatgatccagcgtcccgaccaaaagctgtcgttcatcccatttgagagcggggattatgtaactatccatgccgaaagcacaccgcatattcaaaaaacactggcggaaatacgccggcgtggggcgaaggcgggacttgcgctgaatcccgcaacgcccctggattattgccgctggatgcttccggatattgatttgctgctggtaatgaccatcaatccgggatttgccggacaaaagctagttccccagacgctggataaaatacggtgcgcaaaggaactgttggagcgggctggaagtacggtcctcatcgaaacggatgggaatgtgtcttttatcaatgcggagaaaatgcgccgtgctggaacaaatatatttgtagcggggacttccagcctatatactaaggaaggaaccctggaggagaactatcgaaaacttcgttgcgccattgcgcagggggaggagcacacaaaatgatttacaaagggaatccggtatctgctggcatagcaatcggcagtgcctttgtgtacgatcccaagattctgactgctccggaggatgcaccggtgcttccgatggaatgtgaactggaacgctatgaaaacgcggtgcaagcagcgcaggcaaagctgcgggaaatacaggccgcctttactggtaaggatgatgataaggcggagattttcagtgcacacctggatatggtggacgatgaagaaatctccgaggagatccgttcggctattcatgccggtaccggtgcggcaaaggcggtggaacaggtataccagcggtatgcagatctgttggcagccctggatgatgactttatggtgcaaagggcgcatgacttgttggatgtgcagcagaggctcttgcgcatcctacttggtgccctggaacagaatctttcccggctggatggcccggtaatcgtcatatgcgatgatctaatgccttcggatacggcgactatggaccgggcaaatgtgctaggcatcgttgcccaaaagggcggctatacctcacattcggccatcattgcccgcgggtggggcatcccggcggtgctgggtatccccgatattatgagctgtgtttcttcgggggatacgatcgtgctggatgccattgcggggaatttgcacagcgagcccactccgcaggagctgcaaaatgccgctgcacagcagactatgtttatggaacaaaagagtataagcgataagtttctgtatgctccgggcaggacccttgatggtgttccggtggagattggcctaaatatgggcaagcctgcgccggaggtgctggagacttccaccgcaacggattatgtgggcctgcttcgtacggagtttctttatatggaatcagaccacatgcctacggaggaagagcagtttgcagcttataaaaaggtgcttctggaatatggggagcgcccggtgactctgcggacgctggatatcggtggggataagtcactcccttatttcgcgcttcccagggaagataacccctttttgggtattcgcgcactaaggctttgctttgaaaatgaggatattatgcgcacccagcttcgcgcggcgctgcgggcttctgtgtacggaacgctatggctgatgttccccatggtctctggccttgaagactttacaaaagcgcgtataattgtactggaagaaaaagagcgcctgtggcaaagcggtgtggcagtgagtgatcatattaagcttggcgttatgatagaaaccccggcggcggtgatgatggcggaccagctggcaaagcaggtggattttgcctccatcggcagcaatgacctgtgtcagtatcttactgcggctgaccggatgaatcctgcggtggcgcagtactgccgttcttcccatccagccatttatagggcaatcgcgatgacgatccaagctttccgcaaggagaataagccgctttcgatctgcggcgagttgggcggcgataaaaatgctgcttgtgtgctggttggtatggggatgcgtaagctttcaatgtccatccatgcggtgccgggtgtcaaacaaatgctatctcgctacgagttaccctatttggaaacattggcagaagcggtgctgcaatgtgcgaatgctgatgaagttgagcggtgtatgggcgaatttctgcacggctaagtgattgacagtattcttgtaaggagaagggtgagactatgtatcagagaaaaacgaccattattaatcgtacagggattcacgcaaggccggcatcggtctttgtgaatgaggcaaaaaaatttcaatccaatattaccatctgcaatttgagcctaaatgagcagaataacaccgcaaacgcaaagtccattatcaaggtgctgacactggccctgtcacagggctcggaggtggaagtgagtgctgaaggtgtagacgaaaaggaagcagtcgatgttctgattgaattgatcgacagcggttttggtgaaacctgattagctgacttagttagcaaagtattttaagaaatggggtcgctgactccatcggcagtaaaaacatttagggaaaaaggtgcccgcttcatccacgccctcacctgtgaggaagatatgggaaaacgcaaggtgaagaattctctgcctccggcagcgctcgagaaaaaagcccaaagcaagcgcacattgcttaataccgcaaaagaccgccccgaaaggcggtctttcgatttggtcggagtgaggtgattcgaacacccggcatcttcggcatcgccgccccttgcggttcccgaaattctgctgtgctgcgccgcagaatttcgaccgctgcgccttttttctctcgctttctctgcctccggcagcgctcgagaaaaaagcccaaagcaagcgcacattgcttaataccgcaaaagaccgccccgaaaggcggtctttcctgtatggtccgagtgtaattataggatctcaaaaaacacagatatatcaatggtttgctggcagtcggcaagaggtattcatccttaaaatcttaaaattcgagaacaacgccgcccaacaggacaacgggcggcattatcataatcgttgggagggttgtttaccgattgaattaatccactggttagtgtgatcacaacccatccaagttttgtcaaaagattgcttctacgcacgggagaaataggaactttttaatgcctgctgatcagaatattttactcagctcccatccccaaggcttttcgtaaaagtcatcatttataattttcgcttggaatatctgtccgatagttataacatcgtgtatgtcttcaatatactgtttggctattctcgaaatataaattgacccacagttgcgagcatcatctgtttttatcacaacatcaatcgaataaggtttaatagcagttacagtacagtgaacaatatctcccttcttcaaaaaagcgttatctttagtagcttttgtctggcgttctgcaacgctaatcatagcaactgttatctcttttgagcggtgtcgctcagaaactgggatgtcggggcattcaccacacgcactatctaagcatgttacagcagcatctagtattcgtttcatttcggcatcgtttctcataattccccatagcttcttgcaaatcttctgctgttgccgagcttgtccgaatacaactgaacttcctgcaattagtgagcgcatagcgcaaattaagtgaaacttgaacttcttgtattttctgtctaaaacattattgcgaatctgaacatcaacatagtaactaaagtacgctgcacagaaataaggttcataatcatctgtatcaaggaacagccgattattgtatgcacgaagtagttctccgtaatagcggtgagtgctatgaggctcattcaagaacattgccaagtatgattgaatttgctgagtaagcgtgacaactctatttttgctgacactatcattgagatcatactgtttagaccgtcgctcatagtaaagacgataaggattggaaacagaatcgtagtagtcttgtagacgcttatgaaaatgcttcgtagcagcaaaagcttcagacttcacttctgtctggcgatttgttgtataaataactcggtcagaaacattttcatttgtaacttcgatgagttttaccataacaaaggaatcatcccttagaaattttctgttgtcaaacaaaacataacttgtttgacaaccgtttacgatttgatagtcatatatttcaatttgatcccctacaggtgtaatgcttttcgctactatagtaatgccgttattaagcaagccgaatcttgcctgatcttcactattcttgagggtatcttgaatctcggagttaacaatgttgtagccttggaaatctcgaacattatcctcaaaaatattagtcagcatattattatcgctatcggtaagaatggctataaaatctttgcatttcacgagtcccaagaaagcttgtttcacaccgtcaatggggggaaatgttacctttttctccatcgcaaaggatctactgactttctttttaagttctttgtaggtcgtaatgattttctccgaatcgtaagggaaaaatgtaaccgaagtaaaattttgtgtatcaattagcggctgaatatcaagagttactctagcccttagatcgttaccttcattccattttccgcagcaaacatagtataaatccaacaccggtgcactagtcatgtcaatgctatgcttataaatctcgtctttgagcattatcaaattatccattttttcatttgtttttggacgaagattttccggagcaaaaaaagccttaactccgtaaatgaaagttccaatttcatccccgtcaaaatgctcgctggttttggcttgaatgaatataaatcggacatctagcgacttggcctcgcttaaaattgactccaattcgtcaacacttgtgataactctaccatttacgcatatagctacaccatctaatcctttctcgcccggatcagtcattatatcagaaggatcaaaccgttcattggagtatttgtttacaatacacttgtttgcaaaatgctcaaaagctgtttcggtatcgagacgctcaatcgagtattccgttttatgaatgttcagaaagttctctataattttattcataaactttgctcctttactgaatcgttctaattatatattgtaatgtaaattgcaaaaaatctcaacagtaaaatcgaaaattcttgtgaaaaaatacagcttatgggactaaagctgatatttgtattgtattcgaaaggaggttttctgctgccagccatcaggctggcttttttcatttcacgacaaaggaggtttttaagtgacagacaacaaaaagaccattggccccgatgtgggtactcccaccgaggccccggagcagcccagccccgctcccaatctggccgacaccaccgctcccgccccgctggggccggaggaactgaccgtagaggaacagctcattttggagcatgaggggcaggcggcgctctttgaaatgagcgaggccgtgcctgatcccgccgacgctgttacccatgccgaggtggaggagcctgccgctcccgaagcccccaaggctgaaaaggagcaggcacagccgcctgatcccggcaaggacgcacctgccccggcacattccggcaaggtggtggattttgccgctgcccgtgaagaggcagccaaggaggagaaaaaggcgatcaagcagaagccgcccacggaaaaggacaaggccgccaagcccggcagaggccgtccgcccaaggatggcaaggccgctcccgataagaccaagccgtccaaacctcgggacaaaaagtcccaaagcaagcccatcccggagaagcctgccgtggataagggcggcgctcccgctggtatggaggtcacgccggagccgtctgcgccccgagacgccacccgtgccgaaaaagaggagattgtctatctcaacctgtctgacctgcatccgttcaaaaatcatccctttggtgtccgggacgatgcgg

SEQ ID NO: 3945 - DNA, 32759 bp, Unknown
  16S sequences of unknown bacteria
tgccattgactgtacattaactgcagtaccccaggaatacggaatatcattgtcgcgacgatatacatttgctcgagggttgtcccaggaacggaagactgctttgattgcacccatcagctgctccttcggatcatccgggaagtcagcaccaatcttctctttatattcagctttgaactgattagccagttctttcagatcatcagcatcaagctcaacatcaagcttcacaccttttttctctttcatctcgtcaatgagcttttcaaaatactttttgcccacttccataacgacatcagaatacatctggataaatctacgatagcagtcccatgcccaacgagcattgccggatttctgcgccagaacatctacaacagtctcattaagaccaagatttaagatagtgtccatcatacccggcatggatgctcttgcaccagaacgtacagacaccaaaagaggattttcggtatccccgaatttcttgccggtaatctcttccatttttacaatatattcattaatctgtccctggatctcttcgttgatctcacgaccatcctcataatactgtgtacacgcctccgtcgtgatcgtgaatccttgcggaaccggaagtccgatattcgtcatctccgccagattggcacctttgcctcccagcagattacgcataccagcgtctccctctgtaaaaagataaacccactttgccattacatgccctcctaataatataaaaaatataaatcaaaaatgcgcatcgtgtagctgccaggcctactatgcgcacatatttattgtaacacatataaatgttttgtcaactgacttttgtgcagtttatacaatatcatttactttatcacgctaaacttttgacattttattaacagatgttcaatttataaggtggtaatatgtcaaaaaaatcctgccgtctttcgacgacaggatttttaccattatacttatttaccctgctcaagagccagagttctggttgtgatatcgcatacctcggtcggtccgtagtactggattgctcccgggaatacataagaggtctcaacagcccactcatctctgtgtgcttcaaaatatttgaatggcttaccatcaagctcaacaagtgctttcttgataaccggcttgtcctcgccatgtcttctctcgatattcatcatcttggtgatcggcataccgcctgcaacccactcttctgccggtctggacaggttggaaaccttggaaaggtatccattgtatccgtactggatcagcatgaatgcgttgtatccaagggagtagcagtagtcagcatcaaagttggacgggaatgcgcatcttccttcatatccgaagaaatgagtctgggttgcgtattttccagtgtaggttcctgctgcttttcttgctttcagtttgtcgcctaccagtgctgcaaacagtttctcggactcgatcagagatacctgtacgtttccgtgcggatctctctcaaggaacagctgctgctgaatagcctgcggaagaattgcaaatacttccatagcctctttggaaaggcctttctcgatgaatgcatatttctcagcccagctctccagagcgttgaatgcatctgctttgcttcctgcaagaagctcattgatctcgctgatcagtgcagagaactccggaacaaactcaacaacaccctccgggattacaacaacaccaaagttgttgccatctgcagctctcttctctacagcatctgcgatataatctgcgatctcagacagagactgtttcttagcctttacttcctcagagatcaggcagatgttcggctggcactccagtgcacactcaagtgctacgtgagaagcactacgtcccataactttgatgaaatgccagtacttcttagcagagttacagtctctctcgatatttccgataagctcgctgtaagtcttggttgcagtatcaaaaccaaaggaaatctcgatatcctcattcttaaggtctccgtcgatggtcttcgggcatccgattacctgtacgccggtcttatgtgctgccatgtactcagcaagtacacatgcattggtgttggaatcatcaccaccgatgataacgattgcggtgataccatgttttttgcaaacctcagtagcgatcttgaactgctcctcagtctccagtttggttcttccagaaccgatgatatcgaatccaccggtatttctgtactcgttgatatatgcatcatcaaatacaatgaaattgtcttcgatcagtccgcttggaccacccttgaaaccaatcaggacattctctttattggttgccttcagtgcatcatacagaccacttacaacattgtgtccgcctggtgcctgtccgccggaaagaataacacctactacctgtttcttggatgcagaagtgttctgtcctttttcaaaggtaacctccggctcgccataagtattcgggaacagctcagcaatcttctcctgatctgctgcacttgtggtcttctcgccttctttaacagcgatctctgcaataccgtttctgagcattcccggaagcttcgggctgtactcatatcttgctttctgaagtggtgaaagattcataattatactcctttgttgtatattttataactatccagagccatacagactatggctctgaaccattactccaacttataaattatcattttaacgtattttcgtcaacctctgagcactgattagaatgcaaatttctcatcaaaatatttgtcaagatcagcaattgccacacgctcctgctccatggtgtcacggtcacgaacagttacgcatccatccgtctcagagtcaaagtcgtaggttacgcagaacggagttccaatctcatcctggcgacgatatctcttaccgatatttcctctgtcatcaaactcgcagttgtatttcttggacagctcggtaaatactttctcagcaccctcgttgagcttcttggacagcggaagaacgccaactttaaccggagccagtgccggatggaaatgaagaactgttctcatatccggtttttcttcggttccgatgttctcctcatcataagctgcacacaggaatgccagaaccacacggtctgctcccagagacggctcgataacatacggaatgtatttctctttgctctcatcatcgaagtagctcatatcctgaccggataccgtctgatgctgtgtcagatcatagtcggtacggtctgcgattccccacagctcgccccatccgaacgggaacaggaactcgatgtcggtagtacctttactatagaagcaaagctcctccggagagtggtcacgaagacgcatctcatcctctttgataccaagagccagaagccagtcacggcagaatgctctccagtactggaaccactccaggtcagtgcccggtttgcagaagaactcaagctccatctgctcaaactcacgggtacggaatgtgaagttacccggtgtgatctcattacggaaggattttccgatctggccgataccaaacgggatcttctttctggaagttctctgtacattcttaaagtttacgaaaataccctgtgcagtctccgggcgcagataaacagtattttttgcatcctcggtaacaccctggaaggtcttgaacatcaggttgaactgacggatatctgtgaaatctttcttgccgcatttcggacagcagatgtcatgctcgtcgatgtaggatttcatctcttcctgagaccagccatcaactccgccttcatgctcaatatgattctcatccatataatcttcaatcagtttgtctgcacgaaaacgctctttacagctcttacagtccatcagtggatcagaaaagcccccaagatgtccggaagcaacccatgtctgcggattcatcaggattgcgcagtcaacacctacgttgtacggattctcctgaacgaattttttccaccatgctttctttacattattcttaagctctactccaagattaccgtaatcccaggtgtttgcaagtccaccatagatctcacttcctggatatacaaatccacggttctttgcaagagctacgattttttccattgtcttttccataactgttctccttcatctttaataaataatataggcatactcatcttccgcttcaatgggcatcacttccacggtatgtgcatccagtatttccacattgctgctgacgtatttcaccggcttctccagctggatcacgccttcttcctttgcaactgccacagtttcactcttattctctgtcacatccgctgctgtatattcaccttcatagtctgcatcacggaagatcatgttaaatgacagcccttctgacagagcgtcctccacagatcccacaaacagatattcttcattataaagtctgtacgtatccgcatccgcataatgcagcttcagatacatcacgctgtctttgacttctgtactttcgaccgtaatctttgtctctcccagtttctggttatagacatctacttccttctgtaccatggctgaaaactcatcgagactatagtactcctgagcaaagctttccacgatcgcctgtgtgatctctccgtttttttctatgtaaagtgaagataccgacgggttgaaggacttatccttaccacatccagtcatgaagagaacagccatcaggacacagacagccgacatccatttcttcattaaacttcctccttacctgccacaagggcttaactattccacattataaccgctttacaggcaagtttcaagtatttccaacgatttgaagcggtgctccacataatgctttcgaagccacgtgaccacccttgcgaattctacgaagacttcctccgtcagaagaaaggtatagagcttctccacagaagctgccaccacatactgaagagcatattccgtagatggattcaggttccagtccgaaaactgttcaaaggtctggggacactcaccgctgtacgtcatggccttcagttcatatatgtagcggaccagttttcttggaagcgacggcaccagcagcgcccgcagggactgataggcaagcttcagaaaatccgacccatctgcattttctcttgtataatagtcggcaaattccagaaaatactgtccgtagcaggctccctcaaaatctgtcatcaattcgccaaaataattctggatcgatgcctgactcatagtataggaagtccttccctcgtagatctgaaattcaccgaacgcaaatgcatttgccgcagccatcaaggcgcttcccggccttctggctcctctggcaaatgctctgatttttccgcgctctctggtcagcaagacaaccagcttgtcataatcaccgaccggtgcggcagacaataccatgccggtcacggtgtaggtctgactgctcatctttctctcctgctttctcggacttgcagttctttactctgtaagccagataatcccgtatatctccggtgtgtgcaaatcgatcccaactgtccatccttctgcctccgcttcttcggttctgtatgttcatagaatccccgaagcggatcaaagctatacttcttttttgtcgtaaccaaaatttttaataaggaagtcagaatcacgccagtctttcttgaccttgacccagagtcttaaattgacctttgcatccagcatccgctcgatctcatagcgggctgcagacccgatcttcttcagcatagctccgccttttccaatgataattcccttgtgggaatctcgctcacacacgatggtcgcttcaatatcccagatcggctggtttggccgttccttcataatatcaatggaaacagcaattccgtggggaatctcctcatcaagaagcttcagtgctttttcacggatcagctccgatacgatctgacgcataggctgatccgtaaccgtatcttcatcataaaacataggaccatacggcagatatttgaagatcacatcgatcagttctgcctcattggagcctttcagggcagacaccggaacgatatctgcaaaatccatcagtttccggtaagcctcgataaatccgaatacctgatcttttttcaccatgtcgatcttattgatgataagaacaaccggtgtattgatatttttcagctgattggcaatatgctgatctcctgctcctacacggtcagatggctccaccagccacagtaccacatctacttccttcaaagtcttctctgccacattgaccatatactcacccagcttattttttgccttgtgaatacctggcgtatctacaaacacgatctgtccacgatcacaggtatagaccgtctggatcttgttgcgggtggtctgcggacgatgggatgtaatagcgattttctgtccgatcagccggttcatcagggtagactttcccacattaggtcttcccaccagtgttacaaatcctgatttcttctgttcactcatagtttctcctctttatgcaccaaacaaacggaatgtggtgtcaaacaattccttttctttttcgatcttactctcatttccaatagcacagaatgcaccttcctcaagcagctcacggataccgcctgaaagtgcccgaatatcctccggctgtgcgtccagtacttcatccctgtatttctgaatatcttcaagggttgtctgagtcagccaggatgcaagaccacggctgccttccatagccggtgtccgcggagtatccatatcactgatggttccgataatatatttggtcatatcacgctcagatgcatcaaactgttccacatattccggtgtctgttcgaatacctcattggtctgtcccagattcgggtcacggtaggataccagataactgtctccataagtaccaaatccgctcatacagccataagcgccgcccttcacacgcacctgaatccacagataatcgtagcttaagatcactttcaggattcgatatgtgccatagtacttcttaatgtgtccggctctcgccacatactgaacagctgacggagtcttgatgccttcccgttttgccggacgcttcagaagttcttcggttctggttctctctggaaccggtaaggtattcagacatgccttcagtgccgggagttccttcttcacggcttccagtccatctgtttcagatgtgcagcttacgatcagattttccggacgaagcacatactgcatcaccagcttcagattttccacgatctgatctttcttctcttcaaaatgcttttccagttgttcgatcaatccgtaaaatgcaataccactgatctgatcggtcacccaggaagaatctgaaaattctgccatcgcccgcactgccgctgcggagtgtccggaaccagtcagatacatctgtaatcttgatttcacctgtgccacgatctcatagagacgtttggtgtcggtaagcctggttcggcttaagatctcacgcatcatggcaaatccaaagtctgtatctgaaaccagtgccttgcagcgcagctccaccatgatccggtatttttccggctccctcatatttccgtacagatttacggtagaagtgatgcctccggtatggcagttgatctcgttgaacaactcaccatagttataattatccgtatccatatatcccagcacatgttttaacagaccaagatacggaatcagatccgccggtacctctttggcatcaaacaacagtctgatataattgataccggaggtaaacagattctgatgaagaacggtagttccttccacattcaactcttcattgataaacggagctgcctcccgcttaatatcctctcttgccagcatagggatcttttccagatctgcctgtggtgatggctcatcctgatattccttcagttcttttgtctgtgctgccaatgctatcagttcttcttctgacagactgtctttgtaggctttcagcttctctgccagtgcttcctgctgctttgcttccagaccaggcaccggttttaataccagaagagctccatgtggattatcaaggatccaggtcctgatcagagcttcaaaatagccttcatccagcttttctctcatctttgcaaaacgatctaatgcgatcagatgaaggaacggctgattctcatcatagagccagctgtcaaacatctgtaatccgtacataagtcctcttggaaaattcccaaaatctgcctctctgtaacggaattcatagtagttgatgccagccagcagagccttccggtcaaatccgttcttcacaattccttccagtgtctctctgaccactttcatgaattcgtccttctggtcttctcttgcatgctttgcgatcacagaaaaatacggctgcgcaataccattttcataagagcttaaaatgtcttttccaattcctgcatccagcagagcttttttaagcggtgctcccggtgcagacagcagggcatattccagcacctgaaatgccagataaagatctgcgtccagcgaggttccaaccactgtgctgtaagataaatatgcctgtgcatcgtcggtctcttcctcagacaccggatactccacggtcttctccaccggctttgcaaatggcttctgcagggcaatgctggaatccatctccagatactcataatggcttaaatatttctcatcgatccatgccagcttctctgccatgtccatatcgccgtacagatagatgtaacagttggacggatgatagtattttctgtggaaattaagaaatgcctcgtatgtcagctccggaatcactttcgggtctccgccggactcatggaaatatggcgtatccgggtacagtacccgcatgatctcactatccaacatatcttccggagaagacagtgcacccttcatttcattatagaccactccattgtagatcagcggactgtccgtattttccagctcatagtgccagccttcctgacggaagatcttctcttccttataaatgttcggatgaaacactgcatccagatacacatgcatcagattctgaaaatcccgttcattgcagcttgctaccggatacaccgtcttgtccgggtaagtcatggcattcaggaacgtattcagggaacccttcaccagttccacaaacggatccttcaccgggaaatctgtggaaccgcagagtacggaatgttccataatatgcggtacacccgtactgtctgatggcggtgtacgaaatcctatattaaatactttgttttcatcatcattagataaaagtgccaccctcgcacctgtctttttatgacgcagcagatatcctacagaattcatctccgggatctgctgtttttctatcagttcataagctgctaactgctctactgtcataaatcttgtatgacctccatgttcttttcttctgtgtagtatatacattctttatgagtataacacaggatgggtggattttccatggaggaaatcgcgatatttttcttcacaaacacatgcaaaaaaagtgaattttcacttttttcagtgaaaattcactttttatcacttctacgcttccaacgcatgtttcacatagatctgtcgaaccgctgggtattcacccaatcctttcaagatgcattctacttcatatccggctttttcaaatgtgcttttccaggaatcatcctcatcgcctgacatatcatttatagcatggtctcctgccaccaccataaacggtgcaagaatgactcttttcacatgcaacgtctgaatcttctcaagcaaagtatccaaagatggttctgcttccactgttcccataaatacctgtggatatcccagttccttcagccgctgatccagttctgtataaacactgttactatcatggggagttccatgtcccataaatacaactgcttcctctttttcgatagttccaatctctgccatcactgcctgaagtacctcgtctgtatcttccgaagtagtcagcagcggagtaccaatccgaacctgttcaaactgactgcgtctttccagaacagcttctttcaactgatcatattcaattcctcgaatcacatgggttggctgcacgatcacatccgtaattccatctaaaagcatctgctccatggcttcttccacagtattgatatgtacgtcatctctcttttctatttttcggatgatcatactgctggtccaggcacgatagaatgctctgtctggcattgccttctgaatatctgcctctatccgatcaatggttttctctctggttgcatttacactggttccaaaactcactactaaaattgcttttttcgccatacgatagatactccttgatttgatttctactattacttagtgtatcctgattcgacaaaaaagtctataacccgaattggaatagctcaaagacacagaccttatatccaccgcaggcagcatgtgcagaggaaccgctcccgctaattcctcgtccagcggtactaagcttcgaccttcgccagaggttcggtcggaagcaagtaccgggactccggacgtcccctgcacatgcagacctgcggcagctacaagttctatgcaccgtaacagctcgcgaatgcagcagaaaagctcccaaaacttgcaacagcccaaggcgatagaaataaactgcgctgctatgacttggagcgaacgaagtgagctccgtgtgtcggctggtgcgtacactgcaagtgtacgtatccagacgatacacagagcttagtttgtccgatacacgtcatacgagcttttattctatcacccggggctaccgcaagactttatccgagcttttttgctgctacaatgaagtatttacagcattgactccggcttaaacagtgatctcacctgttcgatttcttctttgcttgctggggccgcaggcacataataggatttctccctggcgatctgatagatctgctcctgagcagcctctgccttatttctcatctgcttcaatgtctgtttaagcttcggatcctcgctctgagaaatatactccgcatacattttcagttctccgttgataccggtcagtgtatcactgaccatggtcttttcgtccatcatgatctgttcctcctatttcaagaatcccataagctgctgcttgttttctttggcagactgagccgcctgctcaaaatactgtcgaacctggctgtcagttgcttcctgcgcatatgcagaaaattttgcatggcaggtctcgctgccgccgatcagatgacgaagattctgtacatccagttctgataactgtgccataataaaatacctccttgtggaccatactgattacggcagtagtatgtgttcacagggaggttttcataacatttaaaattttccagaattcctgtaccggactctgtatcatctacatttcatcatataatttttcatattcttttgcagaatggctccaggagaaatctgctttcatggcacgctctgcgatcttattccaggaacgctttctgtcatagtagatctcctccgcatagcggatcgcacccagcatctcatgagcattgtaattggtgaaggagaatccggttccggtctcctcatactcattgtacggctccacggtatctttcagtccaccggtctcacgaacgatcggcagtgttccataacgcagactcatgagctgactcaatccacacggctcgaacagagacggcatcaggaatgcatcgctggctgcatagatcttatgcgacatctcattggaataatagatgcaggctgccactttgtcgccatatttccatgcgaaatgacggaacatattctcgtaacgctcctcgccagttcccagcaccacgatctgtactgcatcctggcagagctcatccataatacagtcgatcaggtcaaatcccttctgatctgtcagtcgggatacaataccgatcatcatggctttcttatcctgcgcaagtccaagctccttctgaagctccagcttgttctttaccttttccttacggaaattgtccacggaataattcttataaatatgtgcgtccgtctgtggattccactcgtcatagtcaagaccattgacaattccggtcagttgtccggctctggcacgcatgagtccatccagatgctctccgaagaacggagtcttgatctcctcagcataggtacggctcaccgtcgtgatccggtctgcatagacgatgcctccctttaagtaattggcatctccaaatgcttccagcttgtctgctgtaaaataagacatatcaagtccggtcgcatcctgcacggtcgggatattccagacaccctggaatttcagattatggatggtcatcactgatttcatattggaataaaatccaccttcgtggaaactgtcttttaagtataccggcaccagacctgtctgccagtcatgacagtgaatgatgtccggctgatatcctactactggcaggatagacagagccgctctggaaaagaatgcgaacttttccacatcttcatggatgtagccatatggtttatccccattaaaataatattcattgtcgatgaaataataatgaatccccgcatattccatctccatgattcccacatactggcttctccatgccatatccatataaaaacttgttacaaactgcatgcgttctttccattttgcaggaataaaccgatagttcggaagtatcacacgaacctcgtatttttctttatcaaaatatttcggaagtgcaccaacaacgtctgcaagaccccccgtcttcacaaatggaacgcattctgatgcaacaaaaagtattttcttcatcgcttcccctccagtttttatactcttgtattattataccgcaaagagaagttctttgaaagaagttttcatccggttatgctctctttttataatccagtcggatcttgtcggcaatcaatgcgataaattctgagttggtaggctttcctttcccaacactgaccgtatatccaaataattcatcaatggtatccatctttccacggctccatgctacttcaatagcatgacggatggcccgttccacacggcttggtgtagtctgatgatttttggcaatagtcggatacagaatcttggtaatcgaattcaacatgttcatatcctctactgccatcatgatggcatcccgcagataatggtatcctttgatatgagccggaacaccgatctcatggatcatattggtcacatctgtctccagattccgttccacatattcttttttattttcatagggaaccactttcctgctttctgtgcggatctcagatcgcactttcgttcctgcatgcttcaggctctgaatccggttcagcagcatctcatggtcaaaaggtttcataatgtagtaacttgcgcctaacagaaatgcatcttctgtgattcgttcctgtccaatggcggatacaacaacaaactccggcttctttttaatcttcgtatcctggctgatccgctccatcacagacagtccgtccagctttggcataatgatatccagcagcataatgtccggtcctttgtcccggatcagctgacaggcttcctctccattgtgggcgattcccacaacctgcagatcctcatcctgcttcatgatctcgcttaaaatctctgtcattctttcattatcatctgcaatcgcaatgctccatttgctcatatacaaacctccccactatcctattggatttctacatccttatacaaaacgtatcagcatttacagtcagattataaaaaaggctgtagtatctgacaagctcatcccgtctaccggtttcgacagtcattttcgacaagcccaatatctcctgtcaactatcttcaaaccggtgaaaggtctggtgatacagatgcccattggtaaattcagcccagctgtaattggacatatattcacctcgataagcattgactgctgccacgtttccatcaataaattcatacagatcacaacagatctttgagacatccacagctgtcctgttccttgatttgaccagaacatctgtcaccccggccttcctcagggtctttcgaagagatgaaatgatcgtctgtacacttcggatcttgctgtcatcgtcccacaatgccagggcgatctccgccgttgtcgcggatgctccccgcttgtctaccagatatgccatcagctcccgtgcttttttccgttcccataccagcggtttgttattcacaaacacttcaaattcgccaaatgtctgcactcttaccacaactccagacttttttgacggcttggtcagaatctgatccagctgccgcagcacatcccggatgtctccttcactgactggctttagcaagtaacctactgcatggacggaaaatgcttccatagcataatccgaataagcggtgcagaagatcacctttgtctccgggcttctttctctgatgtccttggccagttcaattcctgacatcccacgcagcttgatatccagaaatgcataggcgatggatcccttctcctgtgcatccagccattccatcacatcatccacttcatcaaatccgctgactcgatattccggtttctcaaatatgcgtttcagattttctgtcaactgccacagcatcaaaggctcatcatcaactgccagtatattcatgtatcttcctcctccacggaaccttgatcgtcacgatcgttccccagtcttttttgctgaaaaattcaaggcttcctcctgccatcagctttactctcgcctgtacattgtgcagtcccacatgggtctttccatcatcccggataggaagttcgttcaggttgcgtgcatctacaccaactccgtcatctctgatttctaccaaagcactgtctccttcccgccgtacagaaatccacacagttcctccgccttttttatctcctacaccatatttgatagcattttccacaataggctgtaagctcaacacaggaatgtcaaaatccatatcccagcctttttcaaattcataacagactttgagcttctctccgaaccgaatcctttccagcgtcacatagttctctacatgagcaagctcataaggaaacggtaccagattttcgttgccgatggcatccatatttccccttagataactggaaaagcaggcaactgctccggctgctttctggggatccttcaggcaaagcacctggattgatgccagaatattgtagataaaatgtggccggatctgcgtcagcatcatctgtgtccgtactctctgttcttcttctgatccttctgtgtacctatacagcaggatcgtgaaccgatctctggactgattccacgatacatagagtccaaccagcatggcaatcagactgttggtcagattgattaccatgatctcgccatgctcaaacagaagctccacacagatggtgagcagatatgcatacagaaccatcttcaggtgattctccggatattctgcgaagatcagttccatcccgatgaagattgcacagagcataccgttgatctctcccggccgcatcataatatcgtaatataatgccattccgtaaatggtccagatgaaaatccggggcaattcatgaatatgtttcttcagcctgatccgcgatttcagaagatcttttgtagaatacaacaaatacacaaatattatgatggccagcaccatgggccatacatttgccttctcaaatcccagtgccacacttcttatacaaatcagcaggaacataatcggaataccaatacacagacagttgatcagcatttttgcgttatattccgccagcgaaaattccaaaaaccggatttcttttgcttcaaatccatagtttctccatatattcagtttttcttttataaagtccatttattcgccttcatcttctgtttttttacaggaacagaatacatggcagactacaacaaaacaacaacagccaattatgcctgcggcaaatcgaaaaggggattacggttctccgtaatcccctctcttttcaaagcttttatacttcttccaaaggcttttctgtatttgtttttctcttccagaaataatatttctgtctcttttcccgtctgttcttcttgctggttccatatacgatcagatagaataccggcatcaataccagaatcaggatcgtagaggctaccagacctccgatgatgaccagtgccataccctgcatcataacagaacttcttccgccaaatccaagggcacttggtgtcatggagatgacggttgtcagtgtagtgatcaggatcggacgaagtctggtcttgccggcttcgatcagggcatcctccacatccatccggcggcgcatcatatttacaccgtcaacatagagaataccattatttactaccgtaccgactaatgtcagcacacccatcagaccgaccatactgaaatcaattccgctgataaataccagaccgaaggcaccaattaaactgaacgggatactcagcatgaccatcagcgaatattttggtgactcaaactgcatcgccattaccagaaataccagaaatactgcagttgccagggctttacccatatcgccaaacatatcatcctgcatagtatccatcagagtcttagcctcagatacactgtctggcagatccagtgtggtcagtaactgatccatagcatcctgaatatcggatttgtcatcagacagacaggacgctgttaccgtcacggtatacttgccatccatcttcataattgtctgtgctgcattggtatattcaactgttgccagctcggacaatggaatacctccaatatctgcatccatcagctgactggcattgtcgtaggttccctttggaaactccagatccacatcatattcctcaccgtctgaggtaactgtcatggctgtggttccgctcagcatgctatagagaccgcctgccacctgcgccggtgtcataccgtggctcatggcacttaacggatctaccacaacacgaagctgtgtcgtgttatttcctgcatcagacgatacattcagcacacctggaatattccatgttgcttcctgaatcatctccgaagcttcttttgcatcttccagattcacagatccaatggtaatggatgcgccggaactggagcttgttcccattgacatggaacttgacatggtgatatcaagctgcatatccacaatatcactggtatcctcgatccatttatccacaacttcctgcgtgctcatctttctcttatcttttaagttgacagagatggttgcactaccggaagaagccgtcatcgtgtaattctctacattttcatcagctgcaatcatatcttcgatcggaaggatctgctcactgacagtctccaccttggttccgggacggaacgtagcttctacgctgaccataccttcatccatggttggcatggctacaatgttagtaaagctcagtatcacgaaggaagcgatcagcagtaacactgctaccagaacgcttgttttcttcctgtgaagaacttttctctccatatggtcatatttttctttgatgatatccagcaaatgattgatcttcagatcttccttctgctgcggctgatacatcttaaagaacagcggtaccagagtgatcgcagagatcagggatgccaccagggagaatacaatcgtaagacccagctgcataaagatctgtccggtcattccaccggagaagcacaacggcagatatacaacaaccgttgtgatggtggatgccacaatagaggaaatcacttctgtggtaccctgcagtgctgcctctttgaaatccggcactcgatctcttgcacggaaacagctctcgatcacgacactggagctgtctaccatcataccgatggcgatgaccagaccacccagagtcataatgttcaaagagaagcccatcaaagccataacgatcaccgtcatgagcagcgagatcggcattgagcatcctacaataatacttgctttccagtcgccgaagaaaatgaacagaacgatcatggaaaggataacacctaaagccagtgtacttcctacagaacctaaggattcaaagatcatttccgatgcatcataggaagcttcgatcactgcattttcattctgctctgaaatatttttcatgaccttcttcacatcatttaccataccgatggtactggcactctgattcttggtcatggagatcgttacggtgtcttccccgttaaatcttgcaatactgtctgcatccttcacagcccagtcaatatctgccacatcagacagatggatcacacttccagtagctgtatacagcggaatattccggattgcctgtacagtatcattatccgaagtgctgatggcactgatagactgacttccctgctccagatttcccaacgggatcgtaaaatccgttgccttaatatactgagctatggagttcatgttcagtccatactggctcagtgcatttctgtcaagctccacttttatgtactgttcctgtccaccagacacagtgacctgtgccacgctgctcagtgcttccagctccggaaccacatcctgattggcaaatgccagggcatcggttccatcggaggtgctgacagaataggtaatgcttggcatagaatccatattcatctctatgatcataggatcctgactgtcgtccggcaggtctgattttacctgatccaatgctgctcgcagatccagatatgcatcatttacattctgatcataatcatactgcagaagtaccatggagacattttccatggaactggaagtgatggattttacaccacttaagcttccgattttatcctcgatgggcgttgtcaccagatcatccacagactcggaatctgcacccggatatacagtatatacgatcttcatcggcatctccatatccggcataagctccaggcgcagagtggtcagtgatgagaatccgaatactaccagagcaagtactgccagcagagtcgttactggccgttttaacacgaacctcgtcaatctattcattactcggcagcctcctcatccgcagatgtctcatcagttgcctgttcctgtgactcttctgttttctcagatgtgtcttctgtattgtttaccacatcttctccgttgagagtcacgatctctacttctgcaccatttcttaatttggcagaccagttatccacaaccagactgtcagttgtcagcccgtcttcgatcactgcatgttcatcatccataagacctactgttacagaagtacgaaccagcttattgtcctccacgcagtacacataagcatctccacctgagaaatacagcgaatcaaatggaatcaacatcttattgtcttctttttctgtggtggcacttacctttacagatacaccgtttggcagggcatctccggcgcctgtcacggttgctttgacacggaacagtttggtctgctgacctgccatcgttccgatctcggtgatgcttccgtcaaaggtctgtccattacgttccactgtcacatgatcacctatgttcaatgtattttttgcagcctctgccacatcaaaagtcacagtcatggaatccttgttggaaatgatatatgccacattacctgctgctgccattccttctttttctacattgattgcttcgatcacaccactgatcggagctgtcaccgtacaataatccagctgcatctgtgcagactcaatacctacggctgcctggttaagctgtgcggtatacgttgcatctgtctgcggatatacctcgttctgtgtgatggagtaagcctgttttgcagtatttaagctgtctgtcaaggtatcctggctggtctcgatctggtcgatgccggatttgagctgagtcttaccactgttgatcgtattcactcccgcctgtgccgcacttaagccctgctttgcaagtgcaagctgggaagatgttgcggtaacagcagctgctgcagcatcatattctgtttttgcagtgttataggcagcttctgctgcttttttctcttcctcagttgctgaagtgtctgcctttttatcatcataggttgcctttgcttcatccatagctgtctgctttgctgccagatcctgcttctgcacacccaggctctgggacaaggcatctacacttgcctgtgcagatgccacctgcgcagatgctgtttttccctgctctctcaactcatccaggctgtcttccatatcatctttactttcatatgtatcattcagatttttctgaagctgacggatctgctcctcagtctgataattctggagatctctggctccgctggtcgccgccgtagctcctgcctgtgccgtattgtatgctgcctgtgcgctgtccatctgaacctgatatgcttcatcatcgattttgaacagtacgtcgccttcctttaccgtatctcctactttataattgacctgggtgactgttccggacagcttcggcatcacatatacctgttgctgcggttctactgtacctatgtaagtagtatcactggtcaattcacccatctggggattttccacttctacagaaaccttgctgacctgggtcgtctccttattcttaccgcaagcggtcgcggatacgcagagtgtcactgcgagtcccattgccataagtttctttgctttcatgttgtctcctcctgtcatctttttcaatttttagccgtgtacagattataacccgattataaacaaattataaatttctggtaacagaatttcaaaagaaaaacaggaagtttatttttctatacctcttttgattttgctatacgggcaatatctccaactccatccaataccattgttggaagataagcataagttttgagtgtatccttcgttgaacatcctgaaagaaccaacacggtagacataccactttccatccctgaaatcacatctgtatccatgcgatctccaaccatcacagcctctgctgaatggcatccaagcatatttaatccggttctcatcatcagtggattcggttttccacagaaatatgcctgtgttcctgttgccatttctataggtgcaatcaatgcgcgacaagcaggagcaatgccgttctcaatcggtccggaaacatctgagtttgctccgatcagctttgcacctttcagaactaaattcgttgcttttgttaatgtatccaatgaataggagcgtccctctcccacaacaacataatccggatttacatcattcattgtgatacctacatcataaagtgcatttaacaggccggcttctcctatcacaaatgccgaacagcctgccgcctgttcttttaaaaatgcggctgttgccaatgcactggtataaaaatgttcttctggcacatcaagtcccatcctagccagtttctgatttaattctcgtggtgtatatccactattatttgtcaaaaacaaatattctttcttttcatcatgcaaccactggatgaattctggaacacctggcaatatctgattgccatgatagatcacaccatccatatcacagatgaatccttttttttcattaaaatcgattatggattttatcatgttcatatgcgccctgcctttcttgtttcttcagaatacaccttactcttttcataatagaataaaactcttttttctacaaatacttttatattatatcgtgatttcatcactcaataatatcgccgttcgtcaaatgcaaataaatttgcatttttctcactttcgctcattatatcatccacacatgaaatcaaatacatagcactgtaaaatcaaagtaaatatttcgatcaacagaaccttttatgacaacatctctttcacacaagtacttcgataatcacttgtcttttgctgcgtcatcttctgattagcttccatcgggaactggccagagaacacatcttgaaaaatgaatatcttgaccatgagatggataacgctgttacctttttcaatgaaaactacaatcaaaatattaatattgacgattatgcttcctctcgaggaatgagtgtcagctggtttatccgaaattttaaaaaatacactggctccacgccaatgcaattcattgtgggaatccgtattaccaatgctcagatgttgcttgaaacaacaacgtattctatcaatgagatttccaagattgtcggatatgataatcagctttatttcagccgacttttccacaaactgaaaggatattcgcccagagaataccgaaaaataagaaataagttctgaaatccgcaaggttatagacatttctgatttaaaaactgacaatacacgatttagaggtacactatgcataacataccacaagcacaacagctgtagaaaatatttttacaaattcacactccgttcacaaacgtcctttatgataaatccagttatgataaatgataatttatatttgaggtgacaagcgtatgtttcacattttagttgttgaagacgatcaggctttgaacaagctgatctgccgtgtattaaataagaatggttatgagactgcttctgccacagacggcgaagaagcattggctctgctggatcagatgtatattgacctgatcattaccgatctgatgatgccgaacatggacggatatgatcttaccaaagcactcagagacagtgggtatcagctgccgatccttgtggttacagcccgtgatacattcccggacaaagccaaaggctttaagctgggcattgatgactatatggtaaaacccattgatgtcaatgaactgctgcttcgcgtggaagcgctgcttcgaagagcaaagatcatctatgaaaagaagctggaatttgaccatgtgtgcctggactatatcaatctgaccgtcacaattgacgataattcccagatccttcctcagaaggaatttcagctgctgtacaagcttctgtccttcccgaaccatacctttacccgtcagcagatcatggacgagctgtggggatatgattccgagaccgatatccgcaccgtggatgtgcatatcaaccggctgagagaccggttccgggatattccttattttcagatccagaccgtaaggggacttggttataaggggatgatcaccaaatgaaaaatagtttttattccatctgggcaaaagtggtcgtctgctgtttctggatgatgattttttcctttttgatcgtaggtcttacgattcacttgatgaaccagctgaatgtgtggaacctgcttcccttgcccttgaccggactgcattttatctttgtgctggcgatcatcacaacgatccttggggtgtttatcagtatgtttatcttcaagcatgcgcttaacccgatcactcagctctccagatccatgcagcaggtggcagaaggcaattacaatgtaaaactggatgcagatccgcacaagggtgagatccatgatcttctgaccaattttaatcatatggtgcaggaactgaacagtactgagacacttcactctgattttatctccagtgtctcccatgaattcaagacccctctcgccaccatcagtggatatgccacccttctgcaggacgatactctctctgtcgaagagcgaaatgaatatatcaatatcatcatccggacaacaagagaattgtctcatatgactggaaatatcttaagtctgtgccgtctggagaatcagacgatcatcacagaccaggaagcctttcatgtggatgaacagatccggcaatgcatcctactgcgggagacgatctggtccgaaaaaaatctggtgatcgatccggatctggattctatcatctggaaaggcaaccgggaactgacttcgcatatctggaataatctgctggacaatgccatcaaattcactccggcaggcggtgagatcacgatccgtgcctccatggacaaggactggctgaccgtcagcttcacggatacgggcatcggtatgacaccagaggtaaagcaacgggtctttgacaaattttatcagggtgatacttcccacaaaaaaaagggaaacggcctgggacttgcgttagtccgccagatcgttaccctttacggaggctctgtggaagtggaaagtgctcccgacatgggaagcactttcactgtccgccttccggcacatactatttcttcggagtcttcttctgagcagagtgctttacactctttaccttaaatattcttgctgtaaacggcggcaggtccagacacagggcctgctccttctttttatatggcttgttctccaccgaccagttctgatcctccggctttgtatttccaccaaattcttcccagtctgtgttcaaaagctctgtcagttcatactgttccggcaaagctacctggaaatctttccagaactgatcagacaagttcataaccgtcacgatcgtctgaccggatgctttccgttcccatgcataagtcacatagtccgcagcatccacttccagccatccaaagcagtctgaattatattctccatcatacaatgccggctcttccagataaagatgagaaagcttcgcataaaaccgctggaatgcatcatgaagcggatatttcagcagattccagtcctgttccctggtctcatcccactcccggaactgagcaaactcatttcccataaaattcagcttcttgcccgggtgcatgtacacataagcgtaaaatgcctttgcctgcgggaatttgatctcatagtcaccaaacattttctgaatgatcgttgcttttccatgtaccacttcatcatgggaaaaaggaagcaggaacagatcactgtaaaaatacatcatggaaaagctcagcttgtgataatcatatggacggtacacaggtgcggtctggaaaaaccgcagggtatcattcataaaacccatatcccacttataatcaaatccaagaccatcatattctgtcggtgcggttaccttcggaaagtcggtagaatcctctgccatcagaatcgctgatggatgaagcttatgaagccctgcattcatatttcttaagaattccactgcccgttcattgactcccctggccggatcaccattccagtagatggcacggctgatggcatccatacggataccgtcaaaatgaaattcggtcagccagtaattcgccgcactttgcagaaagctccgaacctcccctctgctgtgcataaagttcatggttccccactcactgtaagctgtatcaggatgtgggaactcatacaatggtgttccatcaaaatccttcagaccataatcatccatggcaaaatgcaccggcacaaaatctgtgatcacaccgatcccctgctcatgacacatctctaccagtcgtttcaactgctgcggtgttccatagcgggatgtaggtgcaaagaatcctgtattctgatatccccaggagcagtctgcaggatgctctgacagcggcagaaattcaatatagttaaatcccatttttttcagataggggatcagctcctctgccagctcctcataatcataccagctgccgtcctccttctgcttccaggaacctgcatgcagctcatagatattcataggattattgtaattctttcccacatccctcttctgcatccatttctcatccgtaaacttccaggtacgatctacgatccgggatgcaaatccaggacgaagttccataagcattccataaggatcacagtgataaacaactcgtccatccgcacctgtgatcgcatatttataatacattccggcttctgcccctgctatctcaagttcaaaaacaccaggattctgtttctgtttcatgggcagcagcttccagccggaaaaatctccctgcacttccacattagccgcattcggtgcatacacacggaacacagctccctcttctgtcaaatgtgccccaaaatattcataggcatcaaatgcctttccctgtaagaatttctgaaaatccatacatttcccccgtttaatctttttctctattgtatcgaaaacacgttacggaaacaagatacaaagaatgcgttttcgtactatgattctatctttttcaccaatgcagccggaatcctcttcttcacttctccggtcacgatgccgatcagaagcccggtgatcacccccgcagccagaagcaccggaccataatataccagacttactgtttccagcaccgccatggccaccagaagctgccccatattgtgcatgacaccacctatcatactgacacctgtcatgctgaaaagtccacttttcttcgccagacacatacacaggaagcttaccgctgctcctgccagactgtacaggatcatggaaaaattaccaaataagaaaccggacagaaagatcctcataccgttgatcatcagtgcctcccatggttccagactgtacagcgcccacacgatcacaatattggcaaaccctggcttcacccccgggattcccagtggaatcggtattaagaattcaatatagccaatgatcagtccaagagcagtcagaagtcccatgagtgccagacggtgcgtattatgtttcatcataaaaagccccctttctatgtctatattaccatagaaaaggggcttgtgaaaacctcctattattcccagtggttattccaaaggatccttatttttctttcatagttttccatgtatgaaatatccccagtaaatacacaacttctccagatatcctatatatgatcacatagttcatctctggaacttttgcttctctgtactgcaatgcctccattcatctgttgcaatcagcttatatgtcatacttttccttcaatgcagataaagactctttggcattctgaacatttccttcttttatctgcttttctgaggtcatcaggctttggtacatcttcaaccatttactgaaggaaatgaatggcagggatcgacaggagcggaatggtgatcaaagacagcagggtcgtcagcacaaagatctcggtcgcataagccgtattcttcccgtatcgttccgaaaacatgatcgttgtcgcaccacttggacatgccacaccgataaatacagtaaatgcgataacaaaactcagtctcataggaatcagcagcaccagtccgatcaacgggaacacgatcagtttcaccagacagatcagatacagacgccggttcttaagactctccagaatattgccccttgccaggttaatacctgcaaccagcatagccagcggcgtgttcattccggaaatctgttcaatcggagtcatcaggatctgcggcaaacggaaaccggtcacaaagcagacaattcctgccagcactgccagaatcgccggattgatcagctccttgaaggaagattttcctccgtctttggatgccatcacgcggataccaagcgtccagaggatcaggttgaaagccgtaatatatgcggtcatatagaaaacgccttccgcccctaagattccattggcaagcggtaccccgataaaactgcagttggaatacacggttccgatctgttccagctgatgattcccttcttttccaggaaacaaaaatgctgcaagtgccataaacacaaaaaatgtgactgcagaagctgcaagtgtgatcagcagtccctgaaacagttccatattaaaatcagtctgataggtcttcaggatcagcagtggagtaaccaccatcaacagcagattggacagattctttgaaatggtctcgtccactacttttgctttgtagacgatcactcctacaagcatcagaataaacatttccaatattttttcaattacaattccggtcatgatcattttcccccatcccataaattgacattatttttataatttcgcatttccccggtaactgcaatattctttcagacaaagaaaaggaccggagtatgttctccagtcctaattttctgatcatgcaagatcctttcaaaatattggtcaaccgcagtgcaaggtgtttcaaaatagaattcagagattccagactgcaataatgatatactagcattccaccgcctcataagccttttcaaagaaaaattcctgtgaattcagtggttcttcaccttccggccgcttaacgtgttcataagaaccatccggaagctgtactcttgctttcacattatcttccagcataatccggaacatccggcgcagacggtctcttaatttctcatccttgatcggcaccgcaacctctacacgacgaagcgtatttctggtcatataatccgctgacgcaatatagatctgttcccgttcccctgttccaaagatatagatacgggaatgctccagatagcggcccacaatactgatgacccgaatatgatccgtctttccttcgataccacttaggatacagttgattccacggatcaccatctcgatctgcacaccggcctctgaagcttcgatcagtttatcaatgatccgcttgtcagtcagcgaattgatcttgatcccgatatagccctcccggccttccttcgcctcctggatctctcgatccatcaatgcaagaaccttattctgcagacatttgggtgccaccataagatcatcaacatgatccacggtctctcccaatgaaagcgcctgaaaaacagctgctgcatcctgtccgatcgtctgatcggcagtcatcagtgacaggtcggtataaagtcttgacgtcttctcattataatttcccgttccgacctgagtgatatattcaatctgtccctcttcttttctggtgatcagacacagcttggaatgtaccttcagtccatccagtccatagatcacatgacatccggcatcttccagtctccgggaccactcaatattattttcctcatcaaaacgagcctttagctcgaccagtacatccacctgttttccattttcagcagcttccaccaatgcttctactaccttactgtcttttgccagacggtacaacgtcatcttgatcgatactaccttcggatccatagccgcctcatgaagcatggtcagaaacggtttgatactctcatatggataagaaagcagcttgtctttctgaaggatctgtggcaggatcggctgggtccggtcaaaagcaggactgttctgcggcactcttctctcatagaacagctccggatgggaacggagttcatcctgaatccggaacaggaatgacagatccataggagaatccatgcgaaatacctgagattcttttaatcccagcacttcacagaaccgctcgacaatggtctcatccagctcacgggtcatctccatacggaccggacataattttttacgaagcttcactacttctgccatatgatctctgtaattcagatcctcatcatagatactgtccgcatcaatgtcggcatttctggtcacacggatcagagactttgctacgatcttatatttctgaaatactttcggaaggaaatgaaggatcatctcctctgccagcataaagcagcccgggcgggaaggaatggcgatcagacgctcaaacactccgctattacacggaatgattgcaattttttctttttcattcctggtctccagcactgcaactgcatagatatctttatttttcagaaacggaaatggctgcttctttcctacgatcatagtggacagaagaggctggatctcatttacaaaataccgttccagatatttactttcttcccctgacaattcctgaaaacggatcagttccactccctgctccctaatctgttccatcagattgcggtatacctgatccttgcgaagggtcagctcatgagaacgctttaagattgccgcgatctgctccttcgccgtcatatttgtcttattttcccgttcttcttttttcagaagcatcatatcatggagagatcccacacgcaccatgaaaaattcatccagattactctgaaaaatagaaagaaagctcagacgttcacacagcggattgccgttatcctctgcttcttccagcacccgctcattaaatttcagccaggataattccctgttctgataacaactgacctgattcatctgtcatcctccatatccagaaaatatccaaagttcatgtgttccatagccatatctgcaagattcacacagctatttcccatacggtccacacagtggagcagtctggtgaacggtgctgataattttactttgcactttcctttgttcacccgatccatatgggctttccgcatgttgatatccagatccatgactttttcccgacgacggatcagcttctccggttcctccggttctccctgttccaatgcccgcatggcatccccatacatcttggatatctgattcaggctctttctcagatcctccatagcttcttctgaaaaactgtatttcagttctattttacctgcgatcacatctgtcagatcagaggtcaattctcccatacgttccacatctccacacacatgcatgagtttggctgtctgcgttgcctgcaattctgtcagtacacctgcagaaaacagctctgccagataatcattgatagcttccatcaaggaatgaagagtctgaccctgctctttgatctttccgaccagtgccggatcttcacttttgctaagccctgccagatccttcagcatattttttaccattccactacagtgcagcacttccttggccaccagcttcaacgcagcagtcggctgaccgataactttcttatcaaggaaagctggctgaagcggattgacttttgcttcttttacatccgggatcagccgcataacgatcttcaccatcaatccgagcagacatacccacactaccgtcatggtcagattgaataatgtatgcgcgttcgcaatctgtctggagatcacttccacttccggtcccttaggagagagtgcctggatcaatgcagcataaggctttacaaaccagataaataccagagatccggacaggttgaagatcgtatgtgcgatcgccgttctcttggcatcacggctctgtccaagagatgccagcagtgcagtgatggtcgttccgatattatctcccagcagaatcgggattgctcccgccagtcccagaatactcgtcactccatctgctcccggctgggctgcaaaattctgcagaactgcaatcgtcgcactactgctctgtactaccagtgtcattgccgtaccaagcagaagtccaagcaccggaataccggatacttttccgatcagatctgtaaacaccggactggatgccagcggcttcatcacatcacccatggtctcaatgccaagaaacaataagccgaatgcaaatatggtctgtccgatacttttgatccgctctgatttacagacgaatgacaaaataaatccaacaaaaatgaacgcataaatatagtctgtgatcttaaaggctataatctgtgcggtcatagtagtaccaatatttgctccgaaaataattgaaattgcctgtggcagactcataagtcctgcgctgacaaaaccaatggccatgaccgtggtggcactgctgctctgcaatacagcagttaccagtgcacctgcgatcacacccatgatccggttttttgtcagaagtgcaagaatcgatttcattttctctccggctgccttctgaagactttcactcatcagattcatgccatagatgaatacggcaagtccacccaacagtccgaatacaatctgcatattttctttcatttgtcctctttccccattatctttctctttaaaactatttactcgtgcgctttatgttctccggtgacggaatactccacccactcggcaatattcactacatgatcggcaatacgttcaaaatattttgccaccattaccatgtcaatgcagatctcgccctgatccggctcttctgcaatagctgtgatcagctcggattttacctgattgaacagctcatctaccacatcatcctgcttcataacctttctggccagcagcagatctttctttacaaatgcttctatactgtctgtcagcattcccatggctgcctctgccatctgctgaatatgtacatgctgggtcagctcactattttccagatatttggtaatgtccgcaatatcggatgcctgatctccgatccgctccatatcagagatcatcttcagagccgcggaaatatttctcaggtctcttgccaccggctgctgctggagcagaagcttcatacacagagactcaatatctcgctccttgtgatcgatctcatattctgtcaggaatgccttctgtcttgcctgtttatcagagtacagaagcgctgtcatggcatctgccacagcttctttacagagggctcccatactgatcagatc

SEQ ID NO: 3946 - DNA, 12191 bp, Unknown
  16S sequences of unknown bacteria
catcaatccccccggcatggctttgccatgctgtcccccctttgcacaaggggggcttttctttgccctgcggcatacaacggacttggggcaatcattcagtatggccggttgtgttcactcaggcaaagacggctcccttgtgcaaagggagctgtcggcgaacgccgactgagggattggcagcgtgcctggctgatgatgcccatacccggcggttggtatcatccatttgcctgtgtgccatcaatccccccggcatggctttgccatgctgtcccccctttgcacaagggggggcttttctttgccctgcggcatacaacggacttgctgcattgacacagcgcggcaaagggttgtataatattacatagaaaaagggcgctgccggtaagtcggtcagtccccctgatttagcacaagaagtaaccgcatcagttggggctggggcggttacttctttttattattgacctgaaaaaacagctggcagcgcctgtttgcagtataacatattatgacattctccgcaataaacaagccccagccaaatggccggggcttatttattggggaagttcttcaatattgacgatcttgtcgggatagtgttctttgaaataccggagattttcgtttttctggccttgcagggtggagcgctggcccttcttataatataaggtaaccgggccggggagtgcattgcggagaacttcctcgcactggcggcgcaaaatgcggctttgcaccagctgccccagggccgggtgatagaccccggcggccacctgctcttccagctcccggctggggttcagccccaggcgtatgacggggatgcccttttcctgaaaaacctccagggcgtcggcgctccactccaccccctcttccagggtgagtggggtgtattccccccgctccatcatggcaaaaaggggcgtatgacagagcacgcagacgggatagagccgcaccccctggggatgcagggccgccacctgccgggccgagcgcaaacttttttcccggctgtctcccggcaggcccaccatcagctgcaaaatcagctcaaagcccttttcctgcaccaggcgggctgcccgaagggtgtcctccgagcggtggccccggccggaaagacgcagcacttcatcgtccatggactgggcccccagctcgatggtctggacgccgtattttttcaaaagagccagcccttcctctgtgatgcagtcgggccgggtggacacccgcaccccctgggcctgcccctgctgcacatatggaaaagccgcctccaggtactcttcctgtaaggcggcgggtatggcggtgaagctgcctccataaaaggcgatctggggaacattccccaaggggagcccctccttgatgatgcgctccacttcccggccagtgggggctttctgcccggtgatggccttttggtcgcagaacacgcactggtggggacagcctacatggggaatgaacaccggcaggatatgctttgtcactgccccatcagctccagcgcctgccgggccgcctcctgctccgcttccttcttgctccgcccttccccttgggcgatcacattggaattgatcagaagctcgatgagaaaacgcttgtcatgatccggcccgctttctcccttgagccggtaagtcagggtctcctcccggttcttctgcacgatctcctgaagggccgtcttataatccagagggtgccgggtgtgggacaccgtctcggccttttccttgatgtaatccaggatgaaccccttggccgcttccatgccgccatccagataaatggccgccagcatggcctccaccgcgtcggccagcaccgagggccgcttccgtcccccgccgctctcttctccgtgacccaaaagcaagtgctctcccaggttcagacgctgggcatattcatacagcgacttctcgcacacgatggacgcacgcagcttggtcagctccccctccggcatatgccggaagtgactataaatatattccgcacagatgaagcccagcaccgcgtctcccaaaaattccagccgctcattgctgcgcacgcccttctcccggttctcgttggcataggagctgtgggtcagcgcgttctgccgcagctgatcgttgtgaaaccgatatcccagcttgagctgtgttgccatggattctccctccttcttcccttccagcagaaaagggccgggacacagatgccccacgcccctttcttccggtttgctcgattattcctcgacccgctctttgatgaaattcaccacatcgcctacggtcttgacattctccagggtgttgtcctccacctggcccagttcaaaagcctcttccacgctcatgatgagctccaccagatccagggaatcggcgcccaggtcgcccacaaatgtggtctcctcggtgatctcgtcctgatccaccccgaactgctgggcgataatgcccttcagcttctccagtaccatctttgccacctcctgcttatcgagattttctattgatctcattatatgctttttccccggcgagagcctgcccccgccgtacagtcagtgattatagcaaacccctaaagccttgtaaagtggcagtttcaattttttcccggggccgataccgtcatgtgctcgatgttttcggtgatggcctggatgatgccgctttcggcatactgcaccgcctggcggatggcgctcttgaaggcccgggggtcgctggagccgtgggccttgattaccggcttgcaaatgcccagaaggggtgcgccgcccacttccttatagtccatcttctttttcagcgcgcccagaccgttcttcaccagcagggccgccagcttggtgcccaggtttttgaagaagatcttcttcagttcgcctacaaaatacaggcccacgccctcataggtcttgagcagcacattgccggtaaagccgtcgcacaaaatcacatcggccatgccgaagggcacatcccggccttcgatgttgcccacaaagttgagccggcccacttccccggcctgcttcagaaggccgtaggtctctttgatcatgggagtgcctttgctctcctcggcgccgttgttgatcaggccaatgcggggcgaggcgatcttcatctgcttctggcagtagaaggaacccatataggcaaattgcagcagatattccggggtgcattccacattggccccgcagtcgatgagcagcgcgccccccttgtcggtgggcagaatgggagccagcgccgcacggcggatgccccggatgcgcttgacatacatggtggagcctaccagcactgcgccggtgttgccgccggagaccatggcgtcccctttgccctcgcccagcagccgcagcgccacgcccagggaggaatctttcttttccttggtgacgctcatggggctgtcgcacatatcgatgacctccggggcgttgaccacttcgatcttccccgccacatcatcgctcttcactttttccaggcaggacagaatggctttctcctgccccaccagaacgatctccacgcccagttcccgggcggccagcacgctgccttccaccgtgctctgaggggcgttgtcaccgcccatggcgtctacaatgatcttcattccgttgtcccctccattaccgtgttccgatatgcttcgattcgttccagggagcggtgggagatctccatataccgctcccgcttgcccttgacccgtctgtccagcccgtcgatcaggccgaagttgatgttcatgggctgaaaattcttgccttcataacagctgatgtgccggctgagggcgccgatggccgtctgagtggaaaactccagcagcggcaggcccagcatgctccgggccatattcaacccgcaggcaaaaccggaggcggtggattccacatacccttccaccccggtcatctgcccggcaaacatcacccggggatcttttttcgcccggtagaatccatccagcacccggggcgaacacagataactgttgcggtgcatcactccataccggagaaattccgccttttccagtcccgggatcatggaaaacacccgcttctgctcggggaagcgaagatgggtctggaaacccaccagattgtacatggtgccctggctgttttcccgccgcagctgcaccacggcatagggctccttccccgtcttggggtcgggcaggccgatgggcttcagagggccaaagcgcaaggtgtcctctccccgccgggccatcacttccaccggcatacagccttcaaagacccgcttgtcctcaaagccgtggaccggggcttcctcggcctggcacagctcctgccagaaagccaggtactgctctttgtccatggggcagttgatataatccaaaccggtgcctttgccatagcgggaggcaaaataggctttgtccatatccaggctggctcccgaaacaatgggggctgcggcgtcataaaagctgagggcctcttcctcccccagccattccatcatgttctgggccagaggaccttcggtgagcgggccggtggccacgatcacatggccgctttccgggatggcatccacccgctcttcctcgatatgcacccggggatgctgccgcagccgctgggtcaccaggtgggaaaaggcctgccggtccaccgccagcgcccctcccgcgtccacctgggtggcgtcggcacaggccacaatcaggctgcccagccgccgcagctcttctttcagaagccctgcggcattggtcagttcccccgaacggaaggagttggagcacaccagctcggcaaaggtatccattttgtgggccgggctcttctgccggggcttcatctccagcagccgtacttcgatcccccggcaggccagctgccaggccgcttcactgccggccaggcccgctccgatcactgtggcttgcatcattctttgttttcctcttccgcttccggctgttctgccgcctttttggcagccgttttccgggtggttttctttttcggtgtttcttccccttcacctgcggcctttttggtgctcttccgggtggtcttttttggcttttcctccccggcttcttcctgggccttggctttggccgtcttggtggtcttggcagccttggtggttttcgcagcctttttggccttggtggcttttgcagtctccggggtctccgctgcattttcggcagccgttaccacattctgctctgccgccggagcttcctcgtccttcttcttgctcttccgctggggcaggtcttcttcatagccgcaccccggcttatagcacacatactttttctctgccttggtatagcgcttatagagaggctcgccgcagttggggcactttttgttggtgggcttatcccaggtcataaaggtgcaggtgggatttttctcgcagccgtagtaataatagccgctgcgggattttttcttcaccaccttggccccacacaggggacacagcacaccggtgtcctcggtgatgggcttggtgtttttgcactcgggatagccggggcaggccaggaactttccgaaccggccggatttgatgaccatcttccggccgcacagctcgcagaccacatcggtctcctcgtccttgatcttgatgcgctttttctccaggtccttttctgccttctccagctcgccggagaagccagtgtagaatttgcgcaggatatccacataattggtgttgccctgttccacttcgtccagctgccgctccataccggcggtgaacttgatgtcgattacatcgtggaacttgtcgatcatcagatcggtgacggcctcacccagcggggtgggacgcagggacttgccctctttcaccacataatcccggcccagaaccaccgaaatggtgggggcataggtgctgggacggccgatgcccttttcctccatggtgcggatgagggaggcttcggtataccgggccggcggctgggtgaagtgctgcttgggctcggtctttttgtgcttgggctcgtcgccctcgctgaggggcggcagaggcgccagctcgtcgtcgctgcgcacttcgtccagtccctcttcgtacagggccaggaagccagggaatgccaccgtctggccggtggcccggaaaatatagccgccacatccgatgtccaccgatgtggtgtccatcatggcatcggtcatctggcttgcggtaaaccgggaccagatcagcttatacagcttatactggtcggcagacaaactgctgcggatgctctccgggtccagcagaggattggtgggacgcaccgcttcgtgggcgtcctgggcgttcttcttggttttgtaatgccggggtttggcggggagatagtcattgccaaaccggccgccgatgtaatcccgggcggcggccagggcgtcatcggagacgcggagggagtcggtacgcatataggtgatcagaccggtgagtccctggccctcgatggacacgccttcatacagctcctgggccaccatcatggtgcgcttggccgtcatggacagcttccgggaagcttcctgctgcaaggtggaggtgatgaacgggggcgcaggggtccgcttctttttggccttcttcaccttttccacccggtagcccgccccgtcgatggcggagagcaccttctcggtctcctcctggctggaaagctccattttgccctctgccgttccataaaaaccggcggtgaaattcttccgcccggcggtgagggtcacatcaatggaccaatattccttgggcacaaaagcctggatctcccgctcccggtccacgatcagacgggtgaccgccgactggacccggccggccgacagcccggcccgtaccttccgccacaggaagggggagagctgatagcccacgatccggtccagaatccgccgaccctgctgggcgtctaccagattcatatcgatgtcccgggggtgttccaccccggcgagcaccgcttttttcgtaatttcgttaaaggtgacccgcttggttttgctgtcgggcagatggagcatctccttgagatgccaggaaatcgcttccccttcccgatccgggtcggtggccaggtagacgaaatcgctttcttccgccgcttttttcagttcgtcgatgatcttgtccttgccctcgacgggctcgtattggggggtaaagtccccgtcgatgtcgacgcccatcttctttttgggcagatcccgcaaatgccccatggacgccttgaccacatagtcaggccccaggtatttgccgatggttttcgccttggccggcgattccacgatgagtaattttgacattgcgttcctcccggcggctcctgctgcgggccgcccatttctttggcctcccccattccggggcaaggcccatctatctacaatatgatactatggttttcatatgatttcaaaatattttgcgccccgctcccgcaccaggccccggatctgaagcatggtcaggctggtgagcacttcccctgtggccagaccggtgttctgacagatcacatcgatgtgggtcaggccgtccatgctgtccacaataagcttttcccggccggtcagtcctgccggcgccggtttgctcttgccggaagcagactggggcatctcctgctcaatctctttctcctgggctttctcttccagccccatcacaagtccgggaaagcgcccggcatattcctggcagatctccaccgggtctgtgcacaaggtagcccccgagcggatgagctggttgcagccttcgtattccggcctgtcgatggagccagggacggcaaacacatcccgctcctgttccaatgcggtggccgcggtgatcagactgccgcttttcctggccgcttccaccaccagcacccccagactcaggccggagatgatccggttgcgccggggaaaatagccgggatagccccgacggcccgggggatactcgctgagaacggcaccctctttctccaggatacgccgcagcaatccattgtgggaggcgggataacactggtcgatggccgtgcccagcacagccactgtgggcgtgggaccttccatcgccccttggtgggccgctccatccacaccctgggccaggccggaaacgatgagaaaaccgtgggccgacagcacccgggcaaagcggcgggcggtctccagccccaaagggctggccttgcgtctgcccacaatagccagaaccggcatctcctcccaccggggcatggtgcccttcagatacagcactgccggagggtcgtagatctgccgcagatcttccgggtacccgtcctcttcatagcaaatggcccgggcccctgctttcctgcaattttccagtaccttttccgctcttttccaggaagcgttggctttctgttccctctcccggggcgtaaaaaagagatcgccctcattcaaagcacggcaggcttccagggcccctccgaaatactcccgggcttcccggatccggcgggtggacagcctggcttcttcccgcagccaaatatgagccagcacagcttccatggcatttcctcctcgtgacctagcggcgcatctcccacatacacaaagcggcagcaacgccggcgttcagggattccgcgccctttatcgggatgatcacctggagacgactgtgctccagaagctccgcactgacgccgtgggcctcgttgccgatggccaccgctgctcccttcagatccacctgccggatgtcctgagcgctttcgctcaaggcggcggcatacagggggatgtttctttcctccagcgcctgccagagctccggccgggacaggtggaacacctgacaccggaacaccgagcccatggtggaacggaccaccttggggttatacagctcggcacagttccccgtcagcaccaccggcaaggaaaaggcctcggccgtgcgcagaatggtgcccacattccccgggtcccgcacatcttccagcaccagacaggctccttccggcagatccttccggggagggggaatacggcagacaaacagcacgccctgggggctttccacgccgctcatctgggccatgagagagggcggcaccaaaaaggtgggcactcctctgtccctctgctgctccaagggcaggtcccggctgagaaagacctgaaccacttccactcccgccgccagggcctcctccagcagcttttccccttcgcagcaaaacagcccttccttttcccttgtccgtttgctgtccatcaggcggcagacccggcggatacggggattgtcccggctggttatctcttccataattaccccaatttcttgatgtcgtcgttggcgccgatgaccaccagcgcatctccccggcggatcacataatccggctcaggggaaacatgaatggtctcgccattgtgggtcttgaccgccaggatgttgatgccgtaacgggcccgcacatcgatctgacggatgctcttgccgccccaccggtcgggggccgccacttccacaatggaataatcctcggaaatatcgatatagtcgatgatgttgttggaggccaccatctgggcgaaccgggcgcccatatcggcctcggggaagacgatccggtcggcgccgatgcgcttgagcaccttgacatgcagatcgtcgttgcctttggcgatcacattcttcacccccagctccttgagcatcagggtgatgaggatgttgtcctggatattgtcggcaaatgccaccaccgcatgatcaaagttgcgcacgccgatggatttgagcacctgctcatcccgggcatcggcagtgatgacatggctcaccgagtcggatacccggtgcaccgcttcttcgtccttgtccaccgccagcacttcatgtcccaggcggtacagttccctggccagggtcatgccgaagcgtcccaggccgataaccacaaacgattccatcttgtttcctcctttagccaatcattacccgtgcttcggggtatttgatcttggcgtcctttttgccgcgcatcatagcggccatgccgatggtgatgatacccacccgccccagatacatcagcgccaccagcaccaacagcgaaggggtggaaagttccggggtgatgcccagtgtgagccccaccgtaccgaaagcagatgtgcattcaaaaagtgccgcactgagggtgactccatcaaaggccgacagcataaatgtgccgatcgccaccgagcaaatacccagcaggaacaccgacaaagcatccatcaccagcttataggaaatggaccggccgcccactgtggtctggtaagtgccccgcaaagaggacagcgccgccatcagcagcacggccagcgtcaccgtcttgacaccgcccgccgtactgccgggagagccgcctacaaacatcagcgccacgctcatggccttggaagcgccggtgagataggcctggttcagctgggcatatcccgccgtacgggtggtggtggactggaaaaatgcagagagcagctgaccaaaaaggttctgattccccatggtctgagggttatcgtgttccgcaaccaggaaaaagagcgtacccaccagcaaaagaagggctgtggagcgcagcacgatcttgctttgggtgtgaagccggcccttgttgtcccgggccgaatagatatcgctccacacaaaaaagcccaggccgcccagaatgatcaacaggctgatggtcaccgtcaccacgaaatccccagtatagccgcccagggaaatataggcgccctggtcgcccagaatatcaaacccggcattgcagaaggccgagaccgagtgaaagatccctcggctgattccgcccagaattccatagtcccgggcaaagcgcaccgacaaaatcagcgctcccatgccctcaaacagcaatgtgccataaagcacccgcttgaccaggcgcaccatgccggaaagcccgtccatattcagcgaagtgctcaccagccgcctctcccgcaaagagatcttccgccgcagcagcagggacagggcgatggcaatggtcataaatcccagtccgccggtctggatcaggcagaggatgaccgcctgaccaaagggactccagaacaaataggtatcttccacaataagccctgtgacacaggtggccgaagtggcggtaaacagggcggtgaccgcgccggcactctctccggtgcgggtggcaaagggaagcatcagcagcagggtgccgatcaggatgacagcggcaaaccccacggccatcacccgcacaggcgctgcacggcgcacggcggcgttgctccgctggagtttcttcagatgctccctggcaaaatgctttagttttcttttgaatgactgcatattggtctccctccgggacctgaatcccgttgatcctttggatttttcccaaaaatccgcctttccggaaaagcgcagacagacctgacgccgatggcgtcaggcccgcttgcgttctttacccaaaaagggaagaaagatttcctcctgttttcccttgggcaaagccgcgtttttaatacagcttggcgccggcggggatatggttgtccaccatcaggcaatgaagcttctccacgccgttttcatgatggacggccgaaatgatcatgccgcaggagtcgatgcccatcatcttgcgagggggcagattggtgatggcgatcagcgttttgcccaccagttcctccggctcataggtatcgtggatgccgctgaggatcacccggtcttctcccgaaccgtcgtccagcacaaacttcagcagcttcttgctcttgggaaccgcagtgcattccttcaccttcaccgcccggaaatccgacttggagaaggtttcaaagtctacaaaatcggcaaacagaggctccacttccacctgggagaaatcgatctcttccactttctgctctgctgcaggagctggggcggcaggttcctcttccttcttctgggaaccattgttgtccagcggcttcatggtcgggaacacccctccggtctcttcatccggtttcatcacgccctgtatggttgaaa

SEQ ID NO: 3947 - DNA, 5654 bp, Unknown
  16S sequences of unknown bacteria
accgctggagcgcaggctccattgcctactgcaccaacgagggcattatcgccggtgacggcaacggcaaatttgctcccactgaaagcgtactgggcctgcagtttgccaagatgctgctggtagctctgggctatgatccccagatcgaaaaactggtgggcaacagctgggctatcaacacggccaagctggcagcttctgccggtctggacaaaggcctggatgtcagcctgtccgctgcactgacccgtgagcaggctgctcagatggcgttcaacgccatgaaggccgacatggtcgattatgagaaccgcggcaccgaggtcaagctgcccgacggcagcagcgtgattgtcaacgcttccaaggccgagaccatggcacagggcaactatgacaacaacatgaaggccaacggcctgcagttcgctgaaaagtactgcgaggatctgaagaaggtcgaaacgaccgacgatttcggccgtccctccactcagtggaagatgaagaccgatgagatcggcaactatgctgacaaggccgacgcttcctacaccaaggaagtcaagctgggcgatatttatgccgacctgggcctgagtacccgtacggttcccaccgtctttgaagatggtaaggatctgaagaacactgacgctctgtataagggtgccagcaagaaaatcggtgccaacggcgttctgaccgaagcttatgtggatgacgacgacaatgtgaccattgtggagatcaatacctatgtgggccaggtgaaccgttccgtggcagctaccagctccaaggatgcttacatcgtgatcaacacgatgaacaagaagcctgtcactggcggcacggtcaactatgagaccaatgaatcttttgacgatgacgcttatgtgctgtatacttatgccaacaacgaagtccagtccgtggctgtggccgagtccgtttccggcgaagtgaccacttataccactggcaagaacatcacggttggcggcaccaagtatgactattccaagaacattgccggtgagactgctcccgcaaccaagaacgactatgttgtttacctggatgcatacggctatgccatctatgtggatgaggaagagtttgtttccagcgactatgcttatgtcatcaaggctgaaaatgagacggatgctgacttggtgaaggcagaccgtgcaaagctggcctttaccgatggtacggttaagacggttgataccaaggaaggttatgaagatctgactggaaagatcgttacctacaagatcaacgataacaaagattatgttctgcgtgcggtttctaccactcagaatatcacggacagcgaagactttgcgctgaccaagggcaccgcagctatcgccactggtaaaactcctgcaactctgtatgcaaacagcaagactgtcttcattgttaaaactatgagcggcagtgatgaagtctacaaggcatacactggcattgccaatgtgccttctattacggcagatagcacccacaaggtgactgctcactactacattaagtccggttccatcgtgaccatgatgtacattgatgcgaccaacgccaagagcgtgtccacctcctccaaggatgtgaccttcctggctggcaagtccatctctggcctgatcactaacgctgacaacgatcagtattatacctacaatgcagtggtcaatggtgaaatcaccactgtcatggtggataataagactttggttcccggcaatatgcgggatggtaagctcgttgtgacgaacgcattgttcagcaatgttacaaccagcgatgatatcatcaccggtctgtccgcttacaacaccagtgtgggttctgatccttatgttgttaacaatgtaaagggcaccgtgaaagtctccggcgacaatacgctgggcttcggcacgggcagcggcatcaagtatttcactgctgctaacgactgcaaggtgttctatgctgatgaagacggcgtgattaccgaaggttccgtttccggcattgctaccgatgaggatgacatcgtctactatgtggttgatgacggcgagctgacctatgtcttcgttcagacggttgatacagatgcaggcgatcccggcgaaggccagagcgatacttataccgctacgttgaccaataatgctggtaccgctaccctgactgtgaccagcaacagtgagactcaggttgatgttgagggaactgtgaccatgaccaataccaactctggctctgttgctacgttcgacatcactaagggtaccgtgaagaagggtacaaactacacctttaactttgcaacgaacagcacctctacttataaggtgagtgttactgttggcggcgaaaccctgacgaccagcactgttatcggcggctgatcgcttacccaatggaacaaagcgcattctgcgctgtaattcagcaacacccctgctcaaaagagcgggggtgttgcttttgtgtgttttatacagttagcgctcgccccagatggtaacggtcgtaccggcattcacatttgctttgcggtaagcggtcagcgtcaggcgcggagataaggcggcaaaggtgccgtcgcccacgacccagccgatgccggtgtagccgttggtgttgcagtagaacaactggcggcgggcatcgtagaggggaaggaggatggcgtagcccaggtaggaagacgtgccgctgccggccacattgccccaggcccggatgatggttttgccgcccagatccacatatacttccgtgcggtcctctgccgtgaaggcttcgcactgaatgtgcaccgctttccaggcgttccagtcgatggacaaaggaaactcaatttcctggctgcttttcgttacgttgcattcgtgcagcaatgtcaggcttcgctgcattttgatgtctgtcaatgctgcgtccagtttccgattgtctgcattgaaatcttcccgcagcacgcggtcggcggcatcccattggtttaattgatagtgttctgtatacttcaagtcgatttctcctttatgtagttgaatttggagcttttccgaaaaaaggccctacacttattgtgtagggcagggcaaaagttgtacgcaagagtgcaaccattcaaaaaattcctttccccggtggctgcaggctggggatggtctgtgcagaggcgctggggagggaggagaggaaaaagaaaagcaacacccgctgttcggttctgccttccgaacagcgggtgttgcctttaagagagagtaaggaaaagaaagaattttttggttacttcttgcctgcaaccataagataccatgccagggcgggaaaatgttgaacgaattttgaaaaaaacatgaacattctgtgaacaatgacgtttttgcgggaaaaggggtagattctgtggaaaaaagggaaaaagctgcctgctttggctgacagatttacataaaaaattgtaaggttttgccaaaaagacttgtggattccggttatatatgcagcacggcggtggcaatttggaaatagaccagcagggaaatggcgtccactacggtagagataaaaggactggccatgacggcggggtcaaggcccagtttttcggccagaatgggcaggctgcagcccaccactttggcgcacagcacggtgcagaccagtgtggcacagacaacggcggctactgccacagtaacggcgggattgtgcatcatccagcgatccaccagcatcattttgataaagttggcgcccgccagcatcaggccgcacagcagggccacccgcgcttctttccagataacgcggaacgtgtcgcggaaacgcacttcgcccagagacagagcgcggatgacggcggtggaagcctgcgtgccggagttgccgccggtgccggagagcatgggggtgaaagacgtcagaatggtacaggcgaccagagcgttttcaaaatgagtcatgatgagtccggtgaacgtggccgaaagcatcaggatcatcagccacggctcacgggctttgaaggtttccagcacgccggttttgagatagggcttgtcggagggcataatggcggccattttttccatatcctcggtggcttcggcctccataacagtcatggcgtcgtcaatggtgacaatgcccaccagacggtgttcctggtccaccacgggcatggcgagaaagttgtatttattgaacatatgggaaaccgtttcctgatcgtccagggtgttgatgctgacgatggagctttccataatatcgctgatgatgtcttcctcatcgctgagcagcagggtgcgcacggaaaccagaccgatcaggacgcggctgtcgttgaccacataacacaaatagattgtctctttgtccacgccggtgcggcggatgcgtttgaaagcgtcctctacggtcatatcggctgtcaggctgacgaattccgttgtcatgatgctgccggcgctgtcttcagggtatttcatcagttcattgatggttttccggctttcagggtcgcagtggcgcaggatgcggtgcactacgctggcgggcatttcttcaatcacgtccacagtatcgtcgaggtacatctcctccaacacttcctgcagctcggtatcgctgaatgagcggatcagcagctcctgctgatcgttgtccatttctacaaaggtttcggcggccagttccttgggcagcagacggaacagaataggaagctgatcctctgaaaattcggaaagcagcagcgcgacgtccgccggttccatatccaccagctgttcgcgcacggtggcatatttacgctgggacaacaactcttcaataaaatcaacggccagggacaaatactccttctgcataggcaaaacctcctcttccgatgcgcgtggcatgagatgactgtattatggccggccggagaactgcgcaaaaaaacctcctgcgggccagaaaagatccggcggctggagggggatgtttttaacgcctgcacagccgcccgccgtgcagaaaaagcgtccaccgttcaagctttagcatctcagggcggtggtattgtattaaggaatgccttggattcgacatcccctgctgaccatctgacagtgtctccactgctgcgcggcaacaatccgtatccctgaggtagccttgcctaccggaatcgatttggtttttgaagccggcgacagcggcggctccttgtttatagtatgccaatcggtacgcactgtcaaggggtttcggcaaacttcgcgccgcttgcctgggggatttgcggcaagggaaagaattggtttggaggctgtgaaatccgggtaaaaatttttggaaattctcttgttccatttgcgcacaggcggcaaaatatgctatactgtatacttgaatttgtatgatgtgaaaaacggaggcgtttgggcgctctgaagaaaaaacaaaggaggatcccctttatgacgtatcaggaagaatttattcgctttatggttgactccggcgtgctgacctttggcgactttgtcaccaaaagcggcagaaagaccccgtattttgtaaacaccggaaactataaaaccggcgcgcaggccgcccggctgggcgattac

SEQ ID NO: 3948 - DNA, 10041 bp, Unknown
  16S sequences of unknown bacteria
tctgtatgaactcttttatttccctaaagtgttgcacttaatagtataattcacctaaggcataaagaaaggcccggcttttgccgggcctttcctggatagacgggactatttcttttcgcagcagccgccgcggccgtcctctgtgggcgggaagaactcgttgaccgggaagcacattttcttgaagaggtcgcagggattgtcggtggtggggcagcattccttgcagggcatgcagtagtcgtacaccggcaccagcatctggacgttgcgcacaagctgcacgatggtgaagatgcccagggtcacgaggacgattttgttgtcctcatcgtcgcagaacccgccgccgtaccggttgcagatgcattccgggatgttgcagcagcagccgcagcagcagcaatcgcacttgcagcggtcgcagggctcgatgaggcgggcgctcaggatgacgggatccgccacctggacggtgcagcggggcgcgttgcgtccgggcatatcctgcgggtcgcaggaattgtcgcggaactcgctgctgaatacccgcacattgccctcgctgccgtagaggatgacctttttctggaacatgccgacgccgcagacggtggagcagggcatgccgtggccggcatacacctcgacctccacctcgaagaagaaggtcaggtcgcaggaatagtacccgcggttgaagggcagggcctccacgtctatgtaggtggtgatgacctccgcccgacgggcgcggatgctcgccgcatggtcgacgaccatctgatcccgctcggtgaaatagacgcgcatatcttcgatgcagtctttatccgagcaggaatcgtacacgcggccggcgtccacgcagacggcttctttacagccgttgtcatggatgaacttgttgtctgccatgaaaaaatccccctgtactgttattaaagagattccggcctgggcaggggcgccgctgtatgtatgtccccgcgcagcgcagagccggtcaacacttcaataccatagtatgtcagagggattttttggttacggttaaatcattcggccaggggcttcaaacgggcgaaattggccataatttttttagttcccgcctgttcgaaggcgatggccagcaggcagtcgttgcccatgggcgtcacagaaagaatccggcccttgccaaaggtgttatgcagcaccgcgtcccccgccttccagcgggttttcatgtcgtccgggccggcgggcgcggccttggccgtgccggcggcggagaagccgccccccgaccaggcggcggaacggcccggcgccggggaggacgcgccgcggcccgccccctgccaggaggacgccgccccgccccacgcgccctgagcggccggcttggccccccactgcacgctctcataagcggcccggcgctgccggtcgctgcccgtggtcagttcgggcgggatatcgctcaggaatttggagggccggttgcggctggtggatccgtacagcatccgggaacgggcgttggtgatgaacagctcttctttggcgcgggtgatggccacgtagcataggcggcgatcctcctcgagctcctccggatcgaacaaggtctgatagccggggaacacgccgtcctcgaagccgggcagaaacaccaccgggaactccaggcccttggcggcgtgcatggtcatcatcaccaccgcgtcggaggacgcgtcgtagttgtccacgtcggtcatcagagccatttcctccagaaagccggccagctcgggaacctcctccccgctttccttctcataattcaggatggaggacgccaattcgttgaggttgtccacccggccggcctcggcctcgccctgctgctcccacatggcaagatagccggtggtttccagcatggtacggtagagcagatggatggaggtttcgggatcctcgttcagttctctgaggtgatccatcatggaaacgaagccctttagcttgttcgccgcccggccgatatcgggataatcctcggcgtgggacagcacctcgtacagggaaagccccaaattttccgcgatggccgccgccttgtccacggtggcgtccccgatgccgcgcttgggctcgttgatgatccgccggaggctgacgccgtcctccgggttgttgatcacccgcaggtaagcggtggcgtcccgcacctccttggtgtcattgaagcggtgaccgccgatgatccggtagggcacgccgcttttgaccagggcctgctcgatggcgttggactgggcgttggcccggtagagcacggcgaaatcgccgtatcgccggccgtcccggatgccctccaggatggtgtccgcgatgaagcggctctcctcctccgcgttttccagggtgaccagctggattttgtccccctcgccgttggccgtccacagggttttgcccttccggttctggttgcgagcgatcaccgcgttggcggcgctcagtatgttctgggtggagcggtaattctgttccagccggatgacggtgcaggcggggaattcgtcctcgaaatgcaggatattctcaatggtggcgccccggaacttataaatgctctgatcgtcgtcccccaccacgcacaggttgcccgaatgggcggccagaaggctgattaagcggtattgggcgtggttggtgtcctgatactcgtccaccatgatgtagcggtaccgcttctggtaccgctccagcacgtcggggcaggaggtgaacagttccaccgttttacacagcaagtcatcgaaatccatggcgtcggcctctttgagccggcgctgatacatagcgtagcactgggccacctttttcagccggaagtcgctgctgaccgcgggctgcgccgcgtattcctccggggcgagcagactgtccttggcccggccgatttccgagaggatgaccttgtggcccagggtcttttcatcgatgttcagggccttcatgcagtccttcatcaggcggcggctgtcgtcggtgtcgtagatggtgaaatgagaggagtagccgagattctccccctcccggcgcagaatccgggcgcagaaggagtggaaggtgctggccatgacttcgctgccctcgtcgcccagcatccggttcagccgctccttgagttcaccggcggccttattggtgaaggtgatggccaggatccgccacgaggggcagggatccacctccagcaggcggctgagccccgcgtccagccgcctgttgcccgccgcgcaggcgcgcagctcgtccatatcctcatcccgcagggcgaccgggacctcaccgctgccgtaggccttgccgaaccgcaccagattggcgatgcggttgaccagcacggtggttttcccgctgcccgcgcccgcgaggatgagcagcgggccgtcggcgtgaaacactgcctgccgctgccggtcgttcatgcgggaaaactcccggttgagaatctgccggcgcagattgagaaattccgtcgtatctatcataatataccctttcacgtcttgatgaaaacaacgccggcatgccgccttgagcggtagtgccggcgttgtcgcgtatataacggaagaagcttagccgaaaagggacagcagaatgccggccgccacggcggagccgatgacgcccgccacattggggcccatggcgtgcatcagcaggaagttgctggggttctcctgctgccccaccttctgcgccacgcgggcggccatgggaacagcggacacgccggccgaaccgatcagcgggttgaccttgcccttggtgagcacgtacatcagcttgccgaacaggacgccgccggcggtgccgaagcagaaggccagcaggccgagcacgataatcagcagggtcttgggctgcaggaaggtggcggcgttggccgtcgcgcccaccgtgacgcccagcaggatggtgatgatgttcatcagctcgttctgagcggttttgctgatccgctccaccacgccgctctcgcggaagaggttaccgagcatcagcatgccgatgaggggcgccgcactgggcagcagcagcacgcagatgaccgtgacgaaaatcgggaacaggattttttccagcttggaaacggggcgcagctgggtcatgacgaccgagcgctccttcttagtggtcagagcccgcataatcggcggctggatgatgggcaccagcgccatatacgaataggcggccaccgcgatggcgccgagcagatggggcgccagcttagaggtcagatagatggcggtggggccgtcggcgccgccgatgatggcgatggaggccgcttcctggttcgtaaaggccagttcggggaaattcagcaggccgagcgcccgcgcgccaataaaggtggcgaagatgccgagctgcgccgccgcgcccagaaggaagctgcggggattggcaatcagggggccgaagtccgtcatggcgccgatccccaggaaaatcaggggcggatagatgccgaatttcacgccctggtacaggtaccacatcaggccgccctggtcaaagtgctgccaggaagcggaggtaacggtcatgacgccgttgatttcctcttgtgtgtggatcatgacctgatacatctgatcgtatatgccctgattgaaatgcttgagctcctccgccgtgagcggaaccaaggaattctgctgcggatccatgacacccgacaggggcaggttcaccaacagcatgccgaaggcgatcggcagcagcagcagcggttcgaactgctttttgatcgccagataaatcagcacgcaggcgatgccgatcatgatcaggtttttccagccgccgttctcaaagttgaacaggcgggcaaacccggattcctcccatagcttttggattgccgtccaaagttctcccatgtatttccgtcccttctccatcgcggctgaacgccgcggcctcattcgctgtgcaatccacggaggcgcccgtcagaacgggcgggtgctctccgccaggccggccgccgcccagaccgggcggccctcccggacgcgggaaaccttgcgtacggcgtaccgtttcccctcgggcgccatggaagccaccgccgccgcgatgaccgccaccacctcttccggaataccgtcctgcacggcgggcgtgggggcaatcttcggtgcagccgccggtttcggcttgggcgcgggaacggccggggcctccttcttcggccggtgcatcaccttgccgaacaaaatgaaaatcagagtcagcaccaccagggtggcaaacacaacgacgacgccgatgagcgcagtcatcagggaatcccccatgactttacccgccgattcggccgccgtcagactataaagcgcagcctgcatattccgttcctccatcttcccggcggaaacgcgacgcgtcccgcgcattcttggcgaaaaggaagaaaaccccattcccgcccattataaaactatgggatattataccgcaaagtccggcgatttgcaatcgccggcggacattttcccccacagaatatttgtgaattctttcacacgttttgtccaaaacgcagaacctgcggtttttcaccgccgggggacggcaagccttttgtttttgtcgattttctgctatactgagcggggagaaaacccggcgggagacgccggttcataaaggagacagctgtatgaaatcagtagttttgctgtgcgacggcatggcggacaccccctgcccggagctggggggacgcacgcctatggaggcggcgcgcaagccggccatggacgcgctggccgcggtcagcgagatagggctggtccgcaccgttcccgatggaatggcgccgggcagcgacgtggcgaacctgacgatgatgggatacgacacccgggcctgctataccgggcgttctccgctggaagccgccaacatcggcatcgatttggccgacgacgacgtggccttccgctgcaatctggtgaccctgtcggatgatccggtctttgcggacaagaccatcctggactactgcgcgggcgatattcacacgcgggaagccgacgaactggtgcgggcggtgcaggaggcattcggcggcggggattttgatttctacaccggcaccgcttaccgtcactgcatggtctggcacgggggccaaacggagttgggggccgtcaccccgccccacgatatcaccggccgggtcatcggcggctatctgcctcggcatcccgacgccgccccgctgctggacatgatggagcgcagctacgccctgctgagcgatcatcccatcaaccgggcgcgggtggccaaggggcttccggcggccaacgccatctggctgtgggggcagggcaagcgcccccggctggagcggttctcggatcggttcggggtgacgggggcggtgatttccgccgtggatcttctcaaggggattggccggctggccggcatggaggtctgcgaggtggaaggcgccaccggctacatcgacaccaattacgagggcaaacggcaagccgcgctgcgggcactgcaaaacggcgccgatttcgcgtacattcatgtggaggccccggacgaatgcgggcaccggggagaagccgccaacaaggtaggggctattgaggatatcgacagccggattctggccccgctgctggaggaactgcccaagctgggcgcgttctccttgctggtggcccctgaccatcccactccgctggccatccgcacccacgcgtcggatccggtgccttatctgctgtatcgctccgaggcgccggcgacgggcgggccggctcggttcaccgaagccgcggcccgggagacgggacgtttcatcgagcccggatacgcgctgctgtcccggttgctggggcgctgaactgacgaaacaaggaggggcgaagcaccgcatggtgcttcgcccctcagcttgtcaaagaagtatcggagggaaggggaggtgtggggcacgacgtgcgcgtcgtgctgggaaccgtctgggagctttagctccccggtccccactccgcgtcgagcgaagcggatcacccgcccgccagtattggcgggcgggctttttgttgtctctactctatggatgcggggggcgtttcttcgccttggggccgggggccttgccgctccttatattgtttgaacaggcgaaaaaaacgaattccctgggacagcatgaggaggaaaaaggggaggaaaagcaacacaaagtagccggccggggatttgagatagtcgaacaaagccccggccttgggcagccgaaagcggtactggccgatcaccttctccttgagtgccggatagctgtccgccgattcgttggcggtgccgtaggtcacgtaggcgtcctttccctcgtagctcgtcagctcctgcaccttatgcgtcaccacctcgccgtaattagcggggtcgatggagcggaaggtgatgatgtcgcccggcttcacctccatccggctgtcggccttggtgaccaccacgtcgcccgcggcaaattcgttcttcatggaatcggaccgcacgatggaaaacttatagctgaacagccccttaccctcgaccttgtcgaaggtggcgacggaaacgatcgtaaacagcgtcgccaggatggcgatcaacgcgatcaacaccgtgagaacccggccggcgatggccagggctctgcgcgcgggaagcagcgctgcggcctgtgttctttggttgtcgtccatgttgcgtaccaaacctttccgggtgatacggcgtcaacgatgctgtccacgcccgctaccctatcgcacgggatgagcctttggttcattatagaaaggttttcgccgtttgtcaacgaaggcgggacgggctttatttcagcgggagccacacggtgaaggtggttcccgttttttcctggctgtccaccgtaatccggccccggtgacggcccgtgatgctgtgggcgatggccagccccaggccgtaaccgccctgatcccgcgaacgggagggatcggcccggtaaaagcgttcaaacaggcggggcagatgctccggcgggatgggcgcgccggtgttattgaccataagccgggccttgtccccttcccgctccagggtcagggtgacgacacccttctcccccgcgtatttgcaggcgttgtccagcagaatccggaccagctgcttgagctgcccttcatcgccggtgacctggatatccggcgccacgtcgctgcacagggtgatcccctgctcatacgccaccgactcaaagggcagcagacagctccagaccgcgtcgctgaggctcagcggcagggcgggaagcggttcccgggccgcgtccgccttggccaggaacagcatgtcgtccaccaggcccttcatccggcgggcctcgtccccgatgtaggccacccatttttcctgccgggcgatggactcctccttatgggccaggaggatgtcggtattggccaggatcacggtcaggggtgttttcaattcatgggacgcgtcggccacaaactgccgctgctgctcccaggcccgtttgaccggccgcagcgcccagcttgacagaaacaggctgatgaagaaaaacgccgtcagcccgcccaggcccaccagcagggaggtgatcaccaggctgagcatcgaccggatttccccgctgcgatccgcaaaggcgattttggtccccgcggcggtttcccgcagcagatagcggaggttgagggcgttcagcactccctcgtccctgtccccctccagcgccaaggacaccgcctgggcgagggtttcctccgacatatccaccgcggtgtcctcggtcaccgtgcgcacggcgccgtccgcgccgaccaacacgcagaacaccggtgtcagagcgccgggaggcgaaaagggcttaccgccgatctcggattttggcggggtcttccccccctcccggtccagggcgcggcgcatggcgtcgtgactctcgttatacaatcgctggtaggtgaacacacacaacgcggtgaaggcgatcagcagcaccgccgaaaccagcagcatattgatcaggacaaatttccggcgcagcttctgcagcatggtcctgcctccttacccttccagccggtatcccaccttgcgcaccgtgccgatgccgacgcgggatccgagataaaaaaacttcttgcgcaggaacgaaatatagacctccacattgttgtcctccgcgtcggattccatcccccagaccttggtcagcagctcctccttgggcaccaccgtatgggggctgaccatcaaaatgcggagcacctcgtactccttaaagcccaggtgaatggatttggcgccgcactggagcgtataggtggacagatgcagcgtgagatccccatagcgcatctcctccagcaccacctcaccctgccggcgggagagagcccgcaccctggccagcagctcatccggcacaaagggcttggtcatatagtcatccgccccgcagtccaggccggtcaccttatcggcggtttcgtcccgggcggtgagcatgagcaccggggtgctcagcttatgggcccgcagctcccgcacgatgtcgaagccgctgcgcccgggcagcatcacgtccagcacaatcacgtcgtacaggccggacagggcgtaatccaggccgtccgttccggtatacactacgtccacggcgtatttctgctcactcataatctggcccagcgcctcggccagacgcacctcgtcctctacaatcagcacacgcatcgttccgcctcccttacatgacaccagtttcattataccacaaagcggcacgtgcagcgtgctgcctaccttagtccggaacggctccgaccgttccggagtggttccatgttctctcaggcgtccaaaggctttggagaacgccgtgaggttattataccacaaaagcaagcaaacgacgtttgcgggggcacg

SEQ ID NO: 3949 - DNA, 2961 bp, Unknown
  16S sequences of unknown bacteria
tgttcagagccaagcaaaatttcataaaacaggcggaaaatgcttgcattttaaccgaataaactgcgaggcagttattcggttatgagcaagtagcgaaagcggattgcgaatatctgcttgattcctgtttttgaaattttatttggcggatacgccacaccgacgaaatgcgtagcattttggaggttggttctgaacagttacgttatttttttctgtaaagcggacattcttttttcgatccaggtttccttttcgcatctgctcaaatttctttatttttcactttttctgtccaatcttccccataatccaaatgcagaaccagatcagtgccgctgctgcaaagagcccggccattcccttccatgtaatctccagcgcaattaaaattgtttccatcattattcttcccctttctttctctgattataattttccagatcctctctttcattttagggataatctgaaaaagtaatctattttcccgatttttttactattatcttcctcgcatttttcatgtagacatgccttttttcgttttactcaactttgccagatgccgctatcctgtttacagaaatccagatacaagccggatcagcagtccccctgcaactactgatgcgatctgcccggacacatttgctcctgccgcatgcatcagaatcacgttttccggatcttcttccattgccattttctgtatcacacgcgctgacatcggaaatgcagaaatcccggccgccccaatcattggattaactttctcctttgaaaaaaggttcaaaagctttgccagaagcacaccaccgatcgaatccatggcaaatgcaaacaatccaactgccattactccaagtgtttccaaggcaacgaaagattctgcctgcatctgaaacgaaattgttatgccaagcaatagcgtgatcagatttgtcaattcattctgtgcagtctgtgacatagtatttagtacaccacattcccgaatcagattaccaaacatcagaaatcccacaagtgcaaccgacgatggtgcaatcagtcctacaataaaggtacatacaatcggaaatgcaatccgcacttttctgctgacctccgacggctcatagcgcatgcggatctttcgttcctctttacttgtcaccagcttcacagcagccggctgaataatcggcaccaacgccatgtatgagtatgccgcaactgcgatcgctcccacatagttcgattttaaaatctgtgatacaagaatcgaggtcgggccgtctgccgcaccaatcatcgcgatcgatgccgcatccttcagatcaaatccaagcgctgccgctaaaatcaaggcggcaaaaattccaaactgtgcaccagccccaaacaaaaagagtttcggatttgcaagcagcggaccaaaatcgatcattgcaccgattccgataaaaagcaggacaggaagcacttctgaagcttcgattgtcgtatgaaacagccactcgatcacgccctgtgtttcccctgctccctccagcacctgattcagtaccccggacaacggcagattgacgagaattgcaccaaatcccattggcagcagcaatgacggctcatactcttttcggatcgccagcacaattaaagcaatccctactgcatacataaccagttgcttccaggtcagcagactcacaccctccattaaaaattccatatattttttctcccttctgtggatatttgtctcttcctgtcattccggcatatttttccgatatccattctggatctccattgagccaagcaagtctccgttataaaacggacattcgcaatccgttttgatttttctctgaaacaaaaaaagactttcatcacagtactataaaacataatactgtgatgaaagtctcgctgtttcaatcccctgcggataactgcgttatcgtactgacgcgcggagatccataatgatatggcggctactccctttcaccgaatatgatatgaagatggcagcattatagcatcgtacttttcaaaatacaaggtgtgccatctgtccttaacaaaatcttgatacctgaaattcgatttttcaaatgaacgctttaattactgacatttttctcagtaaaagctgtacgttatcaattttctgtactgagcaatttctcataatcgtgccatgtaaaccggtgataggtcattccgaaatcatctaactccacacaatagacatatcggtcaatttttgaggattccggcgtattgtcacttcctttaaaatagaaaacacgtcccataccgtccgttccgtgatcctgctctgcaaaggtttcctgttgttgttttgccgaagcctcaaagcagctgcgcactgccgcaaagtccggcatcaatccggttactgtttttaaaaatgttttcaggaattcagaatccggtacattggtatgaatatattcacagccctcttccggaattccaatacagtagcgacgagctttttctgaaatttgtacattcccaaggcgctcctgtgcttcctctttaaacaattccaatgcccctttcagctcctgctctgtagcctcttctgaaagtccaagcatatcctttaacgattcctccggataatacaggttcattgcttctttccgatagccaatctttatctgccattctttcaccgtatccaaaatatgctgttccagttctgtacgcgttttttccatctcatgattcctttccctatattaccgagtcaagcaagtaacgaagcggattgcgaatatccgctttgaccgaatagctgcatattttctcttataatacaaaaaagcttgtataaacaagctttttcgctgccgcagaccgggatcgaaccggtacgggtatcactacccacgggattttaagtcccgggcgtctgccagttccgccactgcggca

SEQ ID NO: 3950 - DNA, 16708 bp, Unknown
  16S sequences of unknown bacteria
gcgggtgaggggggatgcttctgtcagtgggagttgaaagctcccactgacagatcgcgaagcgactgcgttcatgagcaagtagcgaagctaggccctgtcagcagagctgcagggatggattgcgaatgtccgctttactggaaaaacacaataaaaaagcctgaatgccttgattttaaaggctttcaggctcctaaggagcaggggatgagagaatcgaactcccactaagagttttggagactcctgtcataccacttgaccaatcccctatgtcatcaactgacctttatatttataccacacttcccgtggactgtcaactattttttgtattttttatatttttggaaaaaatcggacaaattgaagaagggggtggtagcagtatagacgttgtgaccgaatatcagcagagtacaagctccagcagaaatacgacaatgcaggcggccgatgacacgaagaacaggctctttcctatccatgcggcagcgatagcgacgatcaaggcagcccatgcggagatagggcttccggtcgcatcaaggatggccgggaaggtcatgactgcgagtgtgacatatggaatgtagtagagaaaggagcgcagcgtccggtttgtgatctcttttcggatcagagtcagcgggatgacacggatcagtgttgtgacgatgaccataatcgcaatataaatgtaaatattattctgcattgttcggatcctccttgatcgggaataaaaaggctgctgctccggatattagcacagtcaggatgatgacgcgcataccggaggaaatgccggaaagagccgggatcatggtgaacagatagcttgccagcattgagatcacaacaagtccggcgatgatgcggtcttttctggccggagggatgattacggcgaggaacatgccatagagggcgacgcttaaggcgcgggtaatccgatccggaagcgcagtgccaagaatgacgccaagacaggtaccgagcgcccagcctggaatcgcgatgctggcagtaccgtaggtgtagaacgggttcagatgtcccggacggccggaggagacaccgaagatctcgtccgtgatgaaaaatccggtccagaaccggtgaaacagcgaagcatccggagcaagcttctgggacagtgcgcaggacatcagcagatagcgcaggttgatgatggcctgggagatgatcatttccaggtaaggtgcgcctgcgctgatgataccgagtgcggcaaattcccctgccgaggtgaaattgaccagactcatgagcgtggccggaagcgcacggatatgtaaattccgggcggcgatgccaagtgtaaaagaaacagcgagatagccgagtgcgatcgggatgccgtcccgcagaccctcgcggtagtttgtcagattcgtacttttcataggtcgatactccttgatcagaaatatgcggacatggcaggcacaattgccttttgtccgcagataatgattataggagcttgattcggtaaaagcaagcttattttgccgcagacagggatatagattttacggaactttaagaaaaccgaacttttctatttacataaaatctgttatagtagaatacagtgtgagcaagtagcgaagctaggccctgtcagcacagctgcagggatggattgtgaatgtccgctttactagcctgccgcaaaaaacaaaaattggtggtgtaacataattgggtgaagaacacagagtgatctatacaaaagaagaactggccgcaaaagttcgggtgccggcggtcgttgagcaggatctgaaacggatcatcagtgaccggctggagcagtgcgggatgtattaccgcgtgttttcacggattaagacagccgggtcgatggcacataaattcgagacaaaggaatacggagaaggcagaaaaaagctgcaggatttggtcggtgtccgcgtgaatctctattttgacgatgatgtggatatctgcaggaacatcatggagaacacctttgatgtcatcgactggtcgacctcagagatgaacgatgaggagttcaaaccgacaaagctaaatggtgtttgtcgtctgccggcatatctccgttccgagatttccccggagacatggaaaatgtgcatcgatgacacctttgagatacagatcaagaccatgttttttgaaggctggcatgagattgagcatgatatgcgttataaaggggaagaaatctggaaaaattacagtggtttttcccgctattttaacagtatcctggcaacactggagctgtgcgacaagtcgatggtcaccttatttgaggatcttgggcattccctgtataagtccgggcgctggagtgatatgattaagagccatttccggttgaagctcggtgaggcgtcgctctatccggaggtggaacaggtgctcaatgaggatctggatctgcaggtggagaatctggcaaaacggatgtataaaacgagccgacagacgctggtggagcagcttttaaagcgcagccgccgtgttccgattaatgtaaataccattatcgcgctgctcaatgacagtcagttccacgacagccgcctgacggcgatcttccgtcagcgggatgtctacaatgacggacgtgaggagagtcaggtcgagacacggcactatgagatgaagccgcttacgcgtcatacggtttttcaggtgagcacgcgcgtggacggcagccgtatgaaggaggaagcgcctgagcatgctctgatttttcaccggacatcagaggtgatttacggatggctgatggaaaagtacggaagcctgtttaaaaacatgccgggacagctttgcacatggaaggaagatatttttggttatcatgcagcggtagagtttcatccggaagaacagaagatgaagctgcatgtgcgccatatggatatggaagtaggtggtcggatctggtattcagagtgcgcgctggaaaacagggatcaggacggtgtgtggctgcaggtatgcaatggctatgcagagccggagcgtgagcatgccgtacaggatccgggtgcgatatttttcagctatccgggattttataagggtattgtggataacatcggtatcatcaacgggattgagtgcatcagccgcaggcgcattctgaaagaggagcagtttgcaccgatcttgcatgcactgaaggattcgtcgtgtatgttcccgtttgttgtgattatttccaaaaaagcagacgacggaatgatggatgaggactggctggggcagttccgcgtctccgatttcacgcggaccgtctggagatatgcgcatgtctttacgtgttatgaggataccgggcggaagtttctttcgcaggcagggcttgacgggcagcgtgcagatattccgcggctgtacattttctggccggatggcgatgtggatgactacggctcggaggatgtcaggaactgcagctttggtcggcatctggaggcgcgcggagatgcacgtacctatgacattgtgcgcggcgggcaggccttctaccacaagattctgactgatctgcgggaatggaatgtatcggcggacatctgccagaatctggaagagacagcaaaggaaggatgagaatagtgaaaaacaaaacagctatacgccgatcatgcgtatagctgttttgatgttttaaaatgaattttcgtcattttttttgctcaatatcttgaaatgataggaaaaagcggttgacaaacatatcagaaaatattatagtaaatccaactgtctttgcagtacagacatctgtagagcatataaagataaaacctaaaggagagtgatgaatttggctaaatatgtagcaaaacgaatcctgttagccattgtaaccgtattcatagtctgtgcgattacatttttctctatgaatgcaattcccggaggaccatttgaaggtgagaaggcgctcagcccggaaatcaaggcgactttaatggagcgttacaacctggacaagccggttggcgagcagtttgtattatatttgaaaaatctgctgcacggtgatttcggtgtgtctttgaagactggccgtgacatcgggacgacgatctttgattcttttaagatctcggcaagactgggcggtatggcagcgcttgtagcgctgatcgcaggtcttgtgttcggaagtactgcggcgttgatgcggaaccgctggccggaccgtgtactcgtctttttctcaacgctcgccgctgcggttccgagcttcgtgcttgcttcacttctgctgcttgtattttgcattcagctggcctgggtgccggtgtggagcccgcagaatcagaattatgtgctgccggtcatcgcactgtcgttttacccgatggcgtacatcacccgtctgacaaagacgagcatgcttgatgcactcggacaggattatgtgcgtaccgcccgggcgaagggagtaccgcagctgctggttatctttaagcacgcgcttcggaatgcgctgatcccggtcatcacttatgtcggaccgatgctcgcatcgatcctgacaggaagtcttgtcgtggaaaatattttcacgatcggcggccttggtgcaaaatttattaccggaatcacgacgagagattatccgatgattatggggacaacgattttccttgcgacgctcatggtcgtgatgaatctgatcagtgatattgtgtacaagattgtcgacccgagaatttcgtttgaatagaggaaggagagaggaaatgacagacagaacagaatccaatgtaccaaagaagagtcctctgagccttcagatggatctttcgaaatttacgctggcgacggaggaggagaaggcgcagcaggaggtcatgagtgaatccacgaccttcttcaaagatggcatgcgcaagcttctgaaaaatccgctggcagtcggcagcattatcgtgctgattctgattatttcggcggctgtggtcggaccgatgattatcccttacggctatgaggagatgatccaggtgaacggacgccgtgacaagacggcaaagaatttgggaccgatggagtggtcaaaaaatgaacagaaggccattgattccggagaaaagcttttcccgcatctgctcggtaccgatgagcagtgccgtgattatctcgtccggatcctgtatggaacgcgtgtatccttatttgtcggatttttcgccgcaattctcgtgctgattatcgggctgatttacggaagtatttcaggctatgcaggcggaaaagtggatatggtcatgatgcggatcgtcgatattatctattcccttccggatatgctgatggtcattctgctttccgttgtactgaaggaagtgctgacaccggtcatccagggtacgtttctggataagatcggtagcaatatgatctctttgtttatcgtattcggagtactgtactgggtcggaatggcgcgtcttgtgcgcggacagatcctttcaattaaggaaaatgaatacatactggcagcccgttccatcggcgcgaagccgggacggatcatccggaagcacattcttccgaactgtttaagtgtcatcattatctcgacggcactgcaggtaccgtccgcgatctttactgagagcttcctgagctttgtcagccttggtgtacaggcaccgatgccatcccttggatctctggcaaacacggcacggggaggcatgatgagttatccgcacaagctcgtatttccgtcgatcgtgatctgtctgatcgttcttgcattcaacctgctcggagacggactgcgcgatgcatttgacccgaagcttaggaggtaaggaagatgagtacaaattcaaacgaagaatatttgctggaagtaaaggaccttcacacctcctttttcacagaatccggtgaagtaaaagcagtcaatggcgtcagttttaccctgaagccgggcgaggttatgggaattgtcggggagtccggttccggaaagagtgtgaccgcctattcaatcatgcagattctggcggataccggtcggatcgtcggcgggcaggtgttgtatcgtggacaggatctggcacagtttgaccgcaaacagatggctggcttccgcggaaaatgctgcagtatcattttccaggatccgatgacgagcctgaatccggtatttactgtcggcagtcagatcatggaggcgatccgcctgcatacaaagaaaacaaaggaggaggcaaaggtacgggcagccgagatgcttgaactcgtaggtgtcaatgagccggaacggcggctgaagcagtacccgcatgagctttccggaggtatgcgtcagcgtgtcatgattgcgatggcactggcctgtgagccggatatcctgatcgcggatgagccgacgacggcgctggatgtgacgattcaggcacagattcttgagctgatgcaggatttgcaaaagcggctcggcatggcgatcatcatggttacgcatgaccttggcgtcatcgcagatatgtgtgacaagatcgtcgtcatgtacggcggaagcatctgtgagcgcgggactgcagacgatattttctaccatgcaaagcatgaatatacgaaggggctgctccgttccataccgaatgtgaacaacagcaaggagcgtctgatcccgatcagcggaacgccgatcaatcttctgaacatgccgaagggctgtgccttctgcagccgctgtgacaaggcgatgaaaatctgtctggagcagaagccggaggagctctcgatgagcgatacgcataaggcatcctgctggatgaatgtaaaggaaatgctggaaaaacaggcaggaggtgcacaggcatgaacagcgaatatctggtagaagtacaggatctgaagcaatatttcccggtgaagaccggatttatgaaaaatacatacctcaaagccgtcgacggtgtatcctttgcgatccgtccgggagagacgctcggtctggtcggagagtccggctgtggtaagacgacggtaggacgaaccctgctgcgtctgtatgagccgaccggaggcaaagtgctttttaacggcgaagaggtgaccaataaaaatatcacagtgcttcgcaaggagatgcagatggtattccaggatccgtattcttccctggatccgcgtatgacggttgaggatattatcggagagccgctcgatgtccataagctctatacaacgaaggcagagcgccgcgataaaatcttacatctgatggagctggttgggctgaatgcagagcatgcgacccgctatgcacatgagttttccggtggacagcggcagcgtatcgggattgcccgtgcactggcggtagatccgaagttcatcgtctgtgatgagccggtatccgcgctggacgtatcgattcaggcgcaggtcgtcaatatgttcgaggatctgcaggaaaagctcggcgtgacgtatctgtttattgcgcatgatcttctgatcgtccgtcacatttcgaaccggattgcggtcatgtaccttggaaagatcgtggagatcgcggatgcagatgagctcaatgattacccgcagcacccgtatacggtatccctgctctctgcggttccgatcccggatccgaatatcacgcgtcagagaaagcgcatcattctggaaggcgatgtgccgagtccgctgcgtatgccgaccgggtgtgcatttcgctcccgctgccggtatgcaacggaaaaatgtgcaaaggagtgtccgaaactagaagaccgcggcaacggacattttgttgcgtgctggaataaatagtgatataataaaaatatctttccggcactttagtctgatatcggaggaaagtagtagtgcatctgcactgttacccataaattctatcttaaacggagggaataagtatgaagagaagacaactcatggcgatcacacttgctgcagtgacagcaatggcaccggctactgcatttgcagaagagagtacagaggcggcaacggaagctgttacggaggcagccgagacagaagcggctactgaggcagcagaagccgagacagaagcggctactgaggcagcagaaggcgagaccgaagtggcaagcgaggcggcagaaggtgagacggaagctgcggcagaagcagcagacggagacgtagccccgatcgaaggcgcagatgtggcgagcagatcttccgatgcagctccggcatggcaggagtacaacaacctgatccagcagatcaagacaacgaccgatctggatgaacgtgaggcgatgatgcatcaggctgaggacatgctgatggagaccggcgcgattgtaccgctctactattacaatgacatttaccttcagaaggaaaatgtgaccggaatttacagcaacaactatggtttcaaatactttatgtttgcagatgcaggcgattctacaacacttcgtctgaaccttgcaagtgagccggacaagcttgatccggcgttaaatacaacggttgacggtgcatgccttgtagtcaacagctttaacggactttgcacctatgatgagaatggcgagattgcaatggattttgcagacagctatgaggcaagcgaggatggactgacctatacctttacgatgaaggatggcctgaagtggagcgacggttccgagctgaccgcaaaggatttcgcatattcctggaatcgtgccgcaagtgccgagaccggtgcagactatgcatacatgtttgatccgatcgcaagaaaggatgacggaacactggatatcgaggcaagcgaggatggcaagacgtttaccgtgaagcttggtgcaccgtgtgcatatttccttgacctgtgtgcattcccggcattctatgcggttccgcaggcaagcgttgaggcagcagagggctggcaggagaatccgggtacatggtgccaggaagcaggcttcgtgacgagcggcgcttacacactggagagctggaaccacaatgagagcatggtttatgtgaagaacccgaactactatcgtgcagatgaagtgaagatcgagcgcatggagttcatgctcagtgcagatgatactgcaatctacgctgcatacaatgcaggcaaccttgatttcgcagatacggttccgaccgatgagatccagagccttttggacaatccggagttccacatcatcgacaacctcggtacctattatgtagcatttaatgtaaacagcgatctgttcgcaggcaagactccggagcaggcttctgccatgagacgtggacttacccttctgatcgaccgtgactacatcgtagagaacatcggccagaccggtcagcagctggcaaatacctttgttccggcaggtatggcagacggccaaggcggagagttccgtcagaatgacgatgcttatacttacccggatgcagatgcagtcggatactatgatccgtcctatgatgcatacgaggacaaccttgcagaggcgatcgagcttctgaaggaagcaggctatgagttcgtagacgatggaaatggcaatcaggtactctccgatgagactccgctgaatgtcacctacattacaaatgacggtaccgcccatgtagcaatcgctgaggcaatccagcaggattttgcagtcatcggtgcacagctgaagattgagacgaatgagtggaatgtattcctgaacgagcgtaaagcaggcaactacgatatgtcccgtaacggatggctcgcagacttcaatgacccgatcaacatgcttgagatgtggacaactgacagtggcaacaacgacgttcagttcggcagataagagcagcagatcttacctttgaggaactagtacagcatacaaaaattaactggactaataacgcagaatgaaaattcaggcaagttatgtggtacagttatttgcagtatgatgtactaggcagactggaataaataatagaggaagctgtgcgcagagaagaagctctgtgtacagcttcctttttgtcagccgttttcacttcgggtaaaagaaggaacggctcggctgtgggactgctgacagaacagagacggcgacatgtataaggataagaccttcatgagaatttgcggcttgcaggaatcggatttacgagtataattagaagaggacaacaaggaaaagacagcattcataatgtgatacagaacagctgcacagaaaggaagaacatcatggtcagtgacagaatcgcagcgctgcgtgcgctgatgaagaaaaagggaattgatgcctatatgatcccgaccgatgattatcatgcatcggagtacgtaggagagtattttaaaagcagacagtatatgacgggctttaccgggtcagccgggaccgcggtcatcacacaggacatggcaggtatgtggacagatgcgcggtattttattcaggcggaacgccagatggagggcagtggcgtcgtattataccggatgcgggagccgggtgtgccgaccgttcatgaattcctggcacagacgttgaaaaaaggccagagacttggatttgacgggcgctgcgtcggagcgtcagaggcagaggaactggagaagctgctgtcggcgcagggagtgagcattacctgcgaggaagatctcgtcggtgagatatggacggaccgtccggccctttctgcagagccggcatgggatctggatgtaaaatgggccggtgagagccgcgaagataagcttgcccgtatccggaaggatatgaaggaggcaggtgcagatctgttccttctgacgaagcttgaggatatcgcatggcttttgaatatccgtggcggcgacattcacacagttccggtcgtgctggcatatctgatgatgagtgagcaggaggtccggctgtatgcaaacgaggcagatttttcagaaggactgaaggagatgctggcaaaggccggtgtggcgctttatccgtacaatcaggtgtatacagacgcggcagcgattgagtcccaaaagacggtgcttgtcgataagggcaaggccaattatcggctggtaaagagcattccggcatctgcaaacgtgctggatcgcgcaaatctgacgctgcttccgaaggcgatcaagaatccgaccgaggtggcaaacgagcgcgtggcacatatcaaggatggcgtggcggtcacaaagttcatgtactggctgaagaaaaatgtagggaaaatgaagatcaccgagtgttcagcggcagactacctgaacaatttgcgaaaagagcaggagcattttgtggataacagctttgatccgatcgtttcctatggcgagcatgcagcgatgaatcattattcgccgacaccggagaccgatgtggaggtcgagccgcacggatttctgctggcagataccggcggacattatctggagggatctacggacattacccgtacctttgcaatgggggaggtcacgcaggatgagcgggatcattttaccgcggtactgcgcggacatctgaatctggccaatgcaaagttcctctatggctgtaccggcatcaatctggactatcttgcgcgccagccgctctgggagcgcggagaggacttcaagcatggcaccggtcatggtgtcggttactgcttaagcgtccatgagtctccgaatggcatccgctggagacggcttccagaccgcaatgaggacgcggtgctcgaggaaggcatgatcacttccaatgagccgggctactatgtcgaaggtgcttacggtatccgtcatgagaacctggttgtctgcaaaaaagcagagcagaatgagtatggtcagttcatgtgctttgagaatctgacgatggttccgtttgatctggatgccatcgatccggagcagatgacgaagaaggagcgtgagcagctcaatacgtatcacagacaggtgtatgagacaattgctccatatctgaacgaggaagaaaagagctggctaaaggaagcgacaagagaaatctgagatcaaaaaagtaaaaaggatacctgacggaaaggtcaggtatccttttttaaccgaatcaagcaagtagcgaagctaatccctgtcagcagagctgcagggatggattgcgaatatccgattgacccggtcaggaagccgcgcggttcttattataaatcaccatcagtcccttcagcagcagctggtcatcaatgataatcttatgatggcagtatgggatgatgactttggcaaggcctccggtcgagacgagggtacaggtctcgcccatttcctcctcaatccggtcaatgacaccgtcgatactgcctgcagtgctgtagataatgccgctgcgcatgcagtcgacggtattggagccgatcacctttttcggcggatcaaggctgatcttcggcagctgagaggtgcgggacgtcagagaatccagggagacgcgaagccccgggataatcatgccgccaagaaaatttttgttgcggtcgatcgcagagatcgtcgtggcggtacccatgtcgatgatgatgagcggagtcgggtagtcgtggatcgcagccactgcgtcagcgacccggtcgcttccaagctgtgccggattgtcgagcatgatcttcaggccggtacggatccccggtccgacgaccatgaccgctttgccggtcagacgtctcatagctgcttccatcgtatgtgtgacggacggcacgactgaagagatgatgcagccctcaaaggtgcggtggtttaaattgttgagctccaggatgtttttgatcaggattgtgtattccagctcagtggaattctgattggtagaaaggcgctcagtgaacagaatctgttcattttcaaaacagccgagcacgatgtttgaatttccgatgtcaacagctaagatcaagtggaaacctccttaataaaatgatgatgataccagggtcaaaaggtattaagcaatcgtctttgtgcgtgtcgcggtaaccggtacaaagtgtgccttatacagtgcaagtccgaccgcgccggtaatgaccgttgaagaaatcatctcgcatacggcattgacaccgacaaagccgcagcagaaggcgatgacattctttccgcccatcaggttctgcatgtattccgtattgccgaagagcacgacgagcagtgtcatgaagaataacgtattcaggaaggctgagaaaaatccggtgacgaagcaggctacggatgtgttgagtgacttacgcacgccacggaaaatgtaaccgagcaacagtccgtccagcatacgcggaatgaaacgctggataaatgcaaataccgggttgattccgaacagtacagcacccattgcgctggtaccgccgacgccgatgcactgcagaaagctggtcagtccgaaaacggatccgacgatcgctccgcctgccggcccgagggtgatcgctgcgactgctaccggaatgacattgaaggtcacggcgagcggtccgatattcagatatccgagcggggtgtaagccatgagcagcagaatagccgtcataaggccaagaatgacgagttgagatgtgctaaatttggttttcataattgtgttttcctccttgttattattcccgatcaatgtgtgctgcaagacaaagcacctgcgggcagatgcctgcgccgaagggcggcattgccatcacatccagacgtgaccggtattgtcctgtgaggtacgatcctttgtggcacgtatggataaaagctgcatcacatttttatgggatacaatacaattacagccggagtatatcattttctttttaaaagtacaagcaaaaagaaagactgtatgaaaaattaaacaaggtgcaaaagcttcaatgcatgtttgaagctgcacagggctttgatttttaccggaaatatggtaagatggtgcggatagcggtttcaggtcttttgaccaacggatgatagaaagaggaagtgaatgctatgttaaagggaaagacggttatccttggggtgacaggaagcattgcagcttataaggcggcaaatctggcaagcatgctcaaaaagcagcatgcggatgttcaggttattatgacaaagaatgcgacacagtttatgaatccaatcacatttgaatcactgacaggaaataaatgtctcgtggatacgtttgatcggaattttcagtttcaggtagagcatgtagctttagcaaaacgggcagatctggcgatcgtcgcgccggcgacagccaatatcatggcaaagcttgcacatggactggcggatgatatgctcacgacaacgctgctggcgtgccggtgtccgaggctgattgcaccggctatgaatacgcggatgtatgagaacccggtcacacaggacaatatggatattctccggaaatatggatttcggattattgagccggcagtcggatatctggcatgcggggataccggagcaggaaagcttccgccggagacgcttttgctggagtgtattttagatgagattgcgatggaaaaggatatgaaaggcttacacgtgctcattacggcaggaccgacgatggaggcaattgatccggtgcggtttatttccaatcattcgacgggaaagatgggctatgcgctcgcaagggtgtgccgtcggcgcggggccgaggtgacgctcgtctccggaaagacgagtctggaagcgccatacggtgtgacgctcgtgccggtgacttcagcacaggatatgtttgaatcggtgtcgtcaagagcgaaggaacaggatatgattatcaaggcagcggcggtggcagattatcgtccggtgacggtagccgaaaataaaatcaaaaaaagtccgggtgacatgagtatcgcactggaacggacgacggatatccttgcatggctcggtgagcaccgaagagaaggacaggtgctctgcggcttcgcgatggaaacggagcatatggtggagcatgcgaaggaaaagctcaccgggaagcatgttgatatgatcgcagcaaataatgtcaaggtcgcaggtgcgggttttggcacggatacgaatgttgtgacactgatcacggaagacggagtggaggagctcgcgaagatgagcaaggaggaagtggcatcgcggatagtggatgcgctgctaaggctcaggggaaacatggaataacaataacaggagatcagataacatgaaaagctatgagacaatctgggaaatttttaataaatgtccgaacaaccagatgcgggatgtatttatcgacgaggtagaggtggcggatacagatgcctacatccggcagaaatttcaggataaaaatgcaacgtgggaaaagagtgtgctgccggacgggacgatcgtgtacgatattaatgcatctggaattttgcagcgcttttccttcacggaaatataaaatgatgataccaggggccaaaggtcaaaagaccgttcatgcttgcatgataaggcttttgaacttgggacccgccaaacatgagaaagtagcgatttacgtagtaaatcagcggatttcgaatgtttgcagaattgcgggagctgcttcgcagcggagcaattcgtaggtatcatcataaaaatagaatccggtgtatcaggattccgggaaaaacaaggaggaaaaaagatggatctaatcatccactctttagaggaacagggagtaagcgcggcactgctgcgagacattgcggcattccgggagcaatatccggtgtcggagtctctggaaggcaggatcacgccgccgccgatcccttattatggaaaggaaacatttgagatggcggcctgtgccttactgcagggggagcatattctgctgaccggagcgaaggcagccggaaaaaatattctggcagagaatctggcgtacctgttccatcgtccgtcttacaacatttccttccatgtaaatatggacagcagcacgctgatcggctccgatacgtttcgaaacaatcaggtcgagcttcggaaagggccggtctatctgtgtgcggaaaatggcggctttggcattttcgatgagatcaatatggcaaagaacgatgcggtatccgtgctgcacgcgacgcttgattatcggcggattatcgatgtgccgggctatgaacggattcgtctgcatgaggcgacgcgatttatcgggacaatgaactatggctatgccgggacgcgggaattaaatgaggcgctcgtatcccggtttctggttatcgatatgccgggcgtgacagaagagcggctgtgcaggattctgacggcatcctttccggatttcacagcggaagggctgaagcagatctgcggtctgtttctggatctgcagctaaaggccggaaataacgagatttcgaccaagccgctggatctgcgaggcctgatcggggcgttaaagacgatccggggcgggctttctccgcgggcggcgatccggatgggcatcgtaaataagagctttgatttgtttgaacgggagatcgtggaggatatcgtgatgacccgcatcccggagagctggactcccgcagagatttttctttgaacgcagataagcattcccccgctttaagtgcgcggagcactaagcggcgg

SEQ ID NO: 3951 - DNA, 32759 bp, Unknown
  16S sequences of unknown bacteria
gcgggcctttttccctccgctgcctatcgccgctctgctcccccgcagctggcgctaaacagactcaaccaatgcgagttgggatattacattataccttggaggacttcgcagcgcagaaaaactaggtttgatttttcttttgcgcatgatactatccatacacaaataacaccgcttgggatgtttcgccgcggcttgaatttttttacaacacaaaatgccagcgtgagtttctatccacgctggcatttttagcgagccatgaggcctgtcgccgaatggcggtcttttctattcaactgacaaggaatccataccaaactggcgagccgcgaggcctgtcgccgagcggcggtaactccgcagccaacttactttccctcgtgtgccccgcgcccatagggcgcggtatggggtcaaggggcactgccccttgtgcgagccggagggcctgtcgcctgacggcggtcttttctattcaagcaacaaggaattcaaaccagacccgcgagccgtggcacccatcgtgccacggcggtaaaaccccagccaagccgcatgtcaccctacgcccctgcgcgccgagggcgcgcagggatgggtgcagggctttagccctgctaacggatgctttgatcgatctgctggcgggtcatgcggatgtcggtcagcttttcgctgatagtgcgatccagctgagccagcacttcgtcaatatgctggtatacgtcgtgatagagccgctcgatttcttccttcgtggactgcttcagttcttcggcctccatgttagcccgggcggtgatctcctgctggctgaccagttgggcggcgcggcgctctgcgtcctgcaccatattctgcgcccgctcctgcgcctcctgcagcatggcgttggcctgctgaccggccttgttcaccgtgtcctgcgcctgctggtttgccgccgccaccgtcttctgtgcctgtgcctgtgcgtcgttcagaagctgattggcgcgagccgtggcggtctgcttggtctgctccgcacggtcgctggcctccttcagaatggacatctggttgtccaccacaccctgacactgggtgaaaaccgtgggcatctccttcgtcagcgcttccagaatgcggctcatccgatccttgtccaccatgcacatggcgctcagaggcaccttcttggcctgcaggatcagttcttccagttcgctcatgttctgtttgaaattcaaaatatcgtcagactgcatttttctttcctcccatggtcagtctgcgttcagaccggccttgatatcctccaaaatttcagcgggcacaaagggcgtaatatccccgccaaaatgggcgatctcccgcacggcactggagctgatgaagccttcctccgggctggcgggcagcagcagcgtctccaccttcggaaataactgccggttgatctgcgccatttgaaattccgtctcaaaatcgttgaccgtgcgcacgccccgcaggacggtctccgccccggtcttccgcagataatccaccaatagcccgccgaaagcatctatgcgcacgttgggcagatgagcgcaggcgcggcgaagcatgtccatgcgctgttccacggtgaaggcgttctttttcgccgggttttgaagcaccgccacgatcagctccgggaaaatacaggctccccgctcgatcaggtccagatgaccgatcgtgggcgggtcaaagcttcccggatagacgcataatcctttcacacgccttcctcctttgcgcggccttcataacggtacagaagcatttccgtgtccccataggcgcgctgtttcatcagtgcaaacgccggagatagctcgtttttcgtgccggtgcggcgttcccacaccacgacggcctccgggttcagcagcccagccccgtccagctcgtcgcacagaggccccaagtcgtccatccgatagggcgggtccagaaacaccagatcgaacttccggccttcccgggccagctttgaaaccgcctgtttccaatcgcaggtgagcagctccgcccgatcctgaaagcgcagcttctcaatgttgcggcggatgcactgggccgcttcccgcgactgatccaccagcacggcccggcttgcgccccggctgacggcttccagccccagtgcgccgctgcctgcgaaaaggtccagcgcagcgccgtcttccagctggccctgcagcatattgaacagggattccttcaccttgtcctgcgtgggccgggtgtccatgcccttaggcgccaaaaggggcgttccccgggcgcttcccgcaatgatcctcatgggtcagatcagcctttccggcgttttggcgctggcctttttgcgggccttcttttcccgctgctgcttgcgctgcttcttgttcacgccgatcttaatgccggtattgatgcgctcccgctgcaccgggccctgcagataacccacgccgtaggcaacggcgggcagcagcaggaacagggggctcaggcgctcggccagcagagccgcgtcggtgcccagataggtagcgatgctcatcatgggcatacacatgatccgcacgatgacccgcagaatttccagtgcggtcaaggcgtgagtctcctgatagtagcgcagcgcgtcgccaaattcatcctgcaaaagcatttcctgcgtccaggagggcagcgtgcccagtgaataagtggtgggcttggtcatcacggcgaacaccagcgccaccagcacatagggcagcgcgcccagcagcgcctcaaaaaagcccttcagcggatgatagcagcggtcgctgtccagtttgtcgatggttttgccctcctgctggcgggcgtacatcatttcaccgtagcccacgtcgccggtgccctgttccatgcccttggcgaatgcgtagtacagcgcggcagccacgatcatcaccgacacgacgatgcgcatcgccagactgtcaaagttcataatcatcgacgcaatcgcgtaaacgaagcagatcatcaacatgcctgcaaagcgcttcggcacagtcttccatgcgtcctttccgcagaaagagccattcagatagggctttttgactggttccaccttgggttgtttcgccgccatattcttccgtcctttccttcccggatgaccgggcgttcctcttgagattgatatgggttctttattaattctcgcaaaaacgtcaggcgtgcagccacacccggtgaactcgccgggtgatacccagcagcacctcatagctgatagtgcccgcccactgggccagttcttcggcagaaatgcactgaccccgctgttcgccgatcagcgtgacacggtcgcccagctgcacgttcggcacctccgtcacgtcgatcatggtctgatccatgcagatgcgccccagaatgggacaacgcttgccgcccaccagcatgaagcccttgccgctgaccgcccggtgatagccgtcgccgtagcccacggccacggtggccacccgaatatcccgatctgccacgaaggtgcagccgtagcccaccggatcgcccgcatgaagggtcttgaggcaggaaacctccgtatcccaacgcagcgccggttcaaagggcagctctgtggggacgggcggatagccgtacagcgaaatgccctgccgcaccatggcgaaatcgccctcgggcatcagaagccccatggcgctgttggacacatgggcgggaatggacgggtcgaagcaggagcgcagttccttgaaccgggccagctgctgccgggtaaaggcgttgatcccgccgttttccagctgttcgtccgccagacagaaatgggtgtaaatgccggtggccttcacatggggagcatgtttgagagcctccgccagcgcttcggcctcctgaaaagtccgcagaccgattcggcccatgccggtgtccagcttgatgtggatcaatgcgtcccggccctgcttttccgcttctttttccaaaatttccaccatttccggggtaaagacggtctgggtcaggtcgtggcggacgcattcctccgccgcttcctccatggcgggacccagcaccagaatttcgccggaaatgccgccttcccgcagctccacgccttcctccgccagcgctacggcgaaatgcttcgcgcccatggaatgaagggcggtggcgacgggaaccatgccgtgcccgtaggcgtcggccttgacgaccggcatgatctccgttttccggggcaaaaggctcttctgtaaaagatagttctggcgaatctttcccaaatccaccgtgaccacgttgttgcgcagcatatttcagactccttatcgcttgctgaaagaaacggcccaaaattttccgaaaaaagtttgcccattttgcgccggtttatgcctgtcattttcagcacgaggacaaacgtcccgccgctgtgaaaatacaactttcagtataccacgattcaccgctattacaagatgcgtttcatgccggggatgcgccgcaggagccatgcacccgccagcgcggcggcgaacgcaacaacctcccagcaaagtgccgccccgaatgctggcagcttttcgcacagaggaaggaacagccggtttttactttcggcgatgagcagatcctgtaacagatacattccgaaagcgcagccgcccagctcggtcagcagccgtccgctgcggcaggagccgaaaatgcaccgtgccagccagaacagcgacagcgacgcggcgatcaccggcagagcgggggccgttcgttcgtccatgaaccagtacatccgcccgggctccacccggtcgaattccagccgggtcagcgcccagcagacggccagcgacaaagccagcgagaccgccgcaaggagaacggaattgcggcggggctcccggtattttaccagataatggcctgcgaaaaacagccccagataggcgcaggggatcagctgatccagatatttcggcagcgccagcaccggaacataatggctcaaaagcggccacgccgcgccgacggtaaaggtcagagccatcaagtactcatagtcccgcttttccatggccgatgccatcctctgccagaggggcaacgtcagcagcaggcccagatagagcggcagataccagaagccgtccgttatctcgccccgccatattttgccaaacagcgcgccaaagtccactgcccggggccacaggccgtaattcacccatgcgtcccacaggaaatacagataggaagccagcaccagcgccagcaccgtccgcagaatgcggcggcccgttttggcatagctgtcccgcttgcccagcagacacgcgccggagatcatgataaaaaggggcacggcggtcttgctgacatagtaccagagaatgctccagtgccactggctgtcaaccggggtcagcgtcttgaacacatagctgttggtatgattgacaatcaccagaaatgccgccagaatccgcaggaaatccagaaacgccgcgcgggcttttgccttgttcgcagaatcgacggcagtcatagcgcgggctccttttcgtcagccttgtgatgccgaagcagcacaaagctgaggtacagaagcaccgccagattgatcagcccgcccacctgcaaagggaagaagggcttgcggaacatatactccgaataagcgctcagggtggtcagcgcgttcagcaccacgcagacccagttttccgggcgattccggcacacggcccagcagagcagcagcagttcgcccacgatggcatagcgctcgtgcatccggggcaggaagaacgcgcagcacagcacgcaccatgcgcccagcaatacggcatactggccggatgcctcccggcggctgcggatgatctgcaccgccgccacccccagcgacgccacgcacagacaaagtcccgtccgggagaacattcccagcgtcgcctgcttctgctgcaatgcatcgcccagaatggcgtacagattgggacaattataggtgatttcgctgtacatccccgtctgtcccagatagatgttcaccacgaacagcgggctttcgccgatcaacgacatgggcagactggtcaggagcatcacccccggcacggtcagaaaccagaacagggaaaagcgcttccggcccgcgaaatacgcgatcaggaacaggggcagcaggaacacggcctgtaatttccacgccaaagaaacgcccagacagaccagcccccattggggtttatccttcaaaagcagcaagacggccagcagcgcgaacagcgtatagaaaatatccgtctggccccaacccgccacgttccacagcatcaccggactcagccagaccagcgcgcagcccagaaagcagccccagctttgcttttcattaggcagggcggttttgaggaggctatacaccacgatcagattcagcacttcaaacagaaggctgcaccctttcagcgcggtataggtggaaacgccgggcaggagcagactttccagccgccacaggtacagatgcagcgggctgtaggtatacagaagctccggggccagcgcggccttcatgccaccttcccgaatggcgtcataccatgcggaattcataaactccaagtcagccgccagattcggcagataagaccagcgcaggaacacccccagcgccagcaccgccgcccatgccagccacagcacgtggtcgatcagccagccgcgcagcttttcttcccatttcatcattggtcggttccccctgttgttccgccgaagtaccggcggacggttatcagaaacattataacacaacagccggatttcgcaaacgcgcccgttcagcggggcatttccagccgggagcagccgttgaaggcggcgaatttcagcagtcgcttttccaccgcggcggaaagcgcccgcccgggcgtttttccatcctcgtaccagatgcggcggacctgcagcgtgtctgtctcccggtcgggcacggcctccacccggccgacgaaattctctccataaagaaggggcagcacgtaatagccgtactttcgcttttccttgggagtataaatttcccacgtataatcaaagtcgaacagttcccggatgagcctccgatcccagagcaggcagtccagcggggccagcagctcacaccggggccgaagggcttcggcggacatggcccgttccagcagcgcttcttccccggcccggcagtacagcgggcagcgaacgccctccaccgacagttcctgaacgcgcccctccgccagcagccgtcggaagcattccgcccgtttttcggcattcagtccccaaaggttcagccatgcgtccgacgggcggttccacaaaagccctatcgcgccgatgcgccgttctacccgccacgccagatggtcgttttcttccggcaggggatcaggggcgcttaaaagcgccggcggcaggtatttttccgccaggtcgtaatatttgcgtgctccttccttatgatggatcaccagttcgcctgtggaatacatctgttccagcaccgaccgggccgcgccggtctgaccgtgccactggccgctccaatggatcatggaatgccagtacatctgcccttccaccggcagcgtgtcggaattgaccgggccgttttcccggagatactgccgggtccgttcttccagctccgcaaggccctcgaactgccggccaccctcccgggcgctgcgacggtagcgctcgaaatagggccagtcctctgtgggaaggatagacagattcttatcgggataatccaccagcagccggtcacggtacaaaagctgccagagggtctgcttcgtaaagccctgtacccgggattgcagcgtcagctcggcgtttttgccgcacacgtccaccgggtcgaactggatgcagcccgcctgacgcacaaaatcatacgcgccctgctttccccggaaacgatacgcgccgatcagcccgtggtgcagcagcagaaagcgccgcgcctgtctcctggtcaaattcgtcacctgaatccccctgacgttcaaaagtcgctggggctattatagcaaaaaatcggcaaaaatttagcagaaaagtaaaaaagcaagtgcaaaacaagcttgcgaatcgtttttccttatgctatgctgaaaaacagccatattccattttcccttgcttaggaaaggagtcttccccttgaaaagcaccccgaaacgcatcgtttccctactgtttttgctgcttctctccgccgtgatgatgacgggctgtatcaaagccaatatcgacgtagtgggcggcgaagttaccgccgcgccgtccagcggcaagcttcgtctgctgctggaacaaccgagcgcgatgcctattgacgctctccccgcgaaaaatcttacgctggaggaagtgaatctgaccgacgacagcgaatttgtattggtcgatctctcgaccggcaagagagcttccaccgtaaagaacgcctacattgaaaaagacccccaatacacgagcattacgtggacgggcgaaaatggttttgagtgtcagatttccattttgatcccttacgatcttccggccggtacctatcaggtacaaacctacaacgcggcggtaaggtatcggacagaagcgggaacttttacggagagagagctcaatattgattcctccagttacaacaggacctttaccgtagtcgaaaccattccgcagacgggcgaccatgccgcgccgctgctatgggccggactgctggttctggcgggcgcaggtttcgtgctgcttcgccatcgcaagcacgcctgatttttccaaaacagattcgaaagcgccatgcgatttcccgcatggcgctgtttttttatccctgccggtgccagagaatgacctgctgtcccgctacgccgtcctgcagatcggggttcatgcgtttcaggctgtcgcagctgacgcggtagcgcttggcgatatcccacacgccctcgcccgcctgactgaagcagagcagaatgcccggttcggcgggctgggcgggctgctccgtcacgtccgtcaccagcggttcatcccccagcagcacgtcgtagcagctcaggtgcaggatgtatttgacctccacccggtcgctggtgatgccggtcagttcgatattggagggcgtcagctgcaaactgtcctgacagcacagctcgcaggtgtagctcatgcggaagggttcctccgtctgataggtctggggcacgtcgctgtcgtccgtcatgtacagaagggtgacttccatcatgccctccacgttcagcttgccgccggaacggctcacatccgtcacgatgggccgcaggctggcccggagcggcgtgcgggccgggggctggccgtccagaagcagcgtcattttgccgctttccgccgtgtgcagctggtggtgcttcaaggcgcgctgcacgggctgggtcacaggctccagcagatcgccctgtgtggtgtacgcgtccagcatcaggcatacgtcccggctggcggtggctcgcacggtcagccccagcagcacctccgcccgcagggtgcgttcgccctcgccggaaccctcctgcgacagcaccgccacgtccttgaccacagcgtcgcagcaaaggctatcgccgttttcccccagcagaggcaccgtctcctcaaagggcagtgtgtgccgggtcacgaccacgggccgggagggcatctgactgcggtgaaccacttccagcaggatattgccagacaccgtggccttttcctcgccgcccatcacgtcctgcacggtggcgaaggccgttgcgtacagggtgtccgcgatctgcagaacgtcggccagctcgcattcctcccgcaccagcacctcccgtgtgccggaagccgccgcgctcaggcaggagagcgtctccgttttcagcatcagcccttcggccccgtgaacgcctgttaccacggaaaggggctcatccgagaaaagccgggtctgggccttcaaaatcgccatcaggtgcagccgcccgccctgggcgctggcctccacgtgctccacgctcaggctgagcacggcggccatgccgtcctccgcgccgggaaaatctacgctgtgggtaaactccgctgaggcctccaacgcgctgaccagcgtcgggtcgccctgggtatagagcacatggaaggtgactttgccctccgcgtccacccgccccggctgaacatccgtctgttccagcaccgccatggcttcggagcacaggacgcgggtctcctcccgcaggccgccgggaagcgccacttctccctccaccaccgcctgactggtcttttgcccctcaaagcgctgcatgggcagttcttctctaagaatttccggggtctgggccccgccgtcctgtttccgctccatcctgcattcctcctaaaactttgtatcaaggtatgcggcgaagggggcgaatatgccttccctcgggccgtgttcagggacttcttgcctttccgaaaaaggctatgttacaatagaagctgtcattcctgttatttcccatctgtttcctgatgagaggaggagtctcccctgcaagcctcgcctgaagccagccgttctcctatccgcacggcccgcccggacatggcggcaatgatgtcccttcggatgatctatcaatttttgtacgcttccattctttccagcgcgttaacgtccctgccggtgctgggctgcgcgctgtttctgaacagtcaggtctcactgatgctgtggcggcttctgcggggccgtgatcgggcgttcctgacccgccggatgcgccgggtctgccttgcgctgaccgtgctgatgctgctgggcacgctggggatgatcgccatttaccccatggtgctgtcctcggcggcgctgtgggcgctgtttgccgctgtcgccactgccgccctgcgggaaaatctgtgccgccgcctttggggccgccggcttcgggaaacagtcagcccgcgggcgttctgggggctgtgctttctgtgccacctgctgtcgctggggctaacggcttggccgctgctaagctgcctaaccgtcaatgaagcggtgctccttctatgcggttacgttctgggcgcggcgctggagggcttcagccactggcgcagccgggaaaccatcgccttggacgagctggaagaaacgccctcccccgaaacgctgaacgagctgaacgtcggactaaaccagctgaacgccttcaacgcctaccgcaagctgcagcttttcattctgatggcgctgcagctgacgttggtgctggcgtacctgttcatcggcctgacggtggacgagctggttctctgcacgattctggctgcgctctgcacgctggtcacccacgcggcggcggaggcggtgctccgggccctgcgtcgggagggttcggtgcaaattctgttggccgggctgtttctctgggcctatgggctgattctgttcgaccggcagctgaagctgccctctaccagcctgacgttgagttatctggcgctgtgcctgtgcggcggcgggctgggcatgagcatgacagcgctgactcatctggaaaaacgcatggcggacgtggcccgattcgggctggaaggccggatggacggctatgaccgcatccgctccgtcagtacggaaatggcaacgctgctggggcagatggccgcattggggatggtgacgtttctgtgtctgccccgcttcctgccgcaaacgctgaccctagagaccctttccatggcgctgcaccgctggatgatcgtgccgccgctgcttttgctggctatggccatcgtatgcgtgctgcgctttcccatgaacaaccggcattttgccaaactggcccgctggctgaccctgaaggaagaaggcggcagcaaccccgccctgcgggagcagctggaaaacgtggtggtgaagcgtcacaagaaccgcttcggcgtaaagctcatcatcgccctgctgcggccgctgtactatcacaaggtgatcggcaaggaacacctgcgggggctggaggacggcacgatggtgctggtgtgcaaccacggcgagctgtacggcccggtggtggcgaatctgtacattcccgtcaccttccgcccgtggaccatcgcggaaatgatgaaccgggacgtgatcatcgagcacatgtatcagggcaccatgatgcggcagaaatggctgcccgaaagctggaagcggcctatcctgcgcatgatcacgccgctgcttctgtgggtgtttgacagtctggaagccattcccgtctaccgaaacgacccccgcaagctgatcggcaccttccgggagaccctcgacgccatgcaggccggggacaacatccttcttttcccggaaaacgacacgggtcacgccgtgggcgaacggggctacgcgctggagggcgtgggcaagctgttcaccggctttgccatgatcgcgccgctgtactatgccaaaaccaagaaaaaggcggtctttatccccgtgtacgcctccaaaaagacacgcaccgtccgcatcggtcagggcatcgaatatcagccggacaacggggccaacgacgaaaaaatgcgcatcgtcgacgggcttctttcccagatgcaggccatgtacgaggaggagaaatagccccgccttcctttgacttttcggccctccaaagcccgacattcccattttgccttgacggataagcccattcaggatacaatagccttgcttttcatccggcggccgtatcctgaagggcttcttttataccgctatgatcttttcttccgagggaaacggcgcgggcaaggcaaaaccaggcgacagaaaggaagaatgcccatgtttggacgccgccccgaaggaaagcgggtcaagcatctcgaccccatcgttcagattaccccctacctgatgccctggcggtgcgacgcgcaggtctttttggcctacgacgcggaatacgagccgctgctgcgctacatgagccacaagagccgggagggcgtgaagatcaccttcatggaactgatcatcgccgcctttgtgcgggcgatttctcaggtgccggaggccaaccggttcatcatgaaccgcaaattctacaaccgcaccgagctggcggtgagcttcgtggtgctgcggcctacggagaacggacagcccgaggaaaacgccgtcaaggtgaaattcgaccccagcgataccatcttcgaggtcagcacccgcgtgaagcagaccattgaagaaggccgccggacggacgatgacagcgccgccatcaagctggcctccgccctgctgaaggtgccccttctgcccaatctggtggtgcatgtcgccaattttctggatcaccacgatctgttccccaaggcgctgatggacgcgctgcctttccataccagcctgtttgtgaccaacatggcctccatcggcatgacgcgggtgtatcatcatatctacaatttcggcgataccaccatgtttctgtctctgggctgcccagagcgttcccacgcggtggacgctaccggcaaggtgttccgcaaatgcaccctgcccatgggcatgaccgtggacgagcgcatctgcggcggcgcggtgtacgcccggctatttgcgtccatgaagcactatctgaaacacccggaggagctggaagcgcccccggacagggtgtattacaacgagggcgcggaatatcatgtgcccaagccggacaacgtagcgctgccccattccgtcactctgaacgcataatcaaaatttccgccgtgggatagcgctggcgaatgtcccatttttcccactcttcattataagcaaagcaccgggcgctggccccgccaaagcccagcgcgtcgcagtggaacccctgcagggtctccactgctttttgtatgcgttcgtcgctgagggccccgtccatgcgggtgcgcctgccaaggcagacgcgcagctgggtgcgctccccgtcccagcccacctccagccgggcggctttggccagccgcagcacggtctgggtggtctccgcatccagaaggccgctgacccggtcctccccaatggcggcgctgccggtatattccaccggattgctgccggtgcggggcatccgcccggccagcgccccgggcacggagaaggcctcgtcctcgatattgccccgggcaaaaaccgtctgactttcctgcgtctgctgttcttcgtcgccttcctgcggctgggcttcttcctgcagggccggattgacggcgcacaccgcaatgatgggatccttcatttccgtatccagatcccgcagaaggcaggtcaccgtatgccgaggcgtcagcttggctttttccagccggtccataaaaatatccagataggtgctcagccgcatcccgaaatccggcttaatggcgtgcagcacctcctcgccccggcccagcgccacggcgaccatggcgttgggccgcatggtggagatggtggtgatcttgtgcagaagcggctgcagccgctcccgggaagccagctcgtagccgaagacgcacaatttcagctggcagaaattcacggtgcagggcgtggtggcggtcagcacggccatcgcgtcctcaaagctggctcccgtggcggtgaaaaccgagtattccggcgtggcggaagtatcgtcgccgctgccgttcaccggggtctgaacgcttagggtcagcccgccgttctccgccgcgtccacggcaaaacacagggcgtaggtttgccgctccatcacggagatcacgtcgcagcccgtaaggcagcccaggcaaaggcccagcgtccagaaaatcagccagaactttttcatgctttctcctttcgggggcggcacagacaaagggcgcaggccgcggccagcgacagcccgtaccgggccggcaggatccacgggatcccgtccagtatggcggagggcgaaacagccagcagtatcagtcctggcagcagcagagcaggcggccacaggcccttggggatcttcggaaaagcccgcgccaaaagcagcttgcccgccgtggtcgtccccagcagggaaacgggcagcatcagcatccagaacagaatgcccagcccgtagatcagaatattggagccgtattggttcagccccgccagtttgcggcctgcgtcccagctttcctcgggctgccacggttccagcatgctcagccacagcgcccagaggacgcagcacaggagcggcacggcaatgaacagccagtccttccgttttcctctgctgccgggctccgggcttccgcgcctgagagggaacagctccagcagcactacgccccatacggctcccatgcccggcacagcggccagcagcgttttgccgatcccgtcccccagcaggggatggagccgctccagactcacatcgccgccggagaagaccgtggagcatagcaccagcgccgccagcagccagcgcagcgtatacgccccgtaggccgcgcccttgtcccggctcagccagctggataccaccgggaaaaacgtcaccaccagcggccatgccagcggcgttttcgccggaatcagatcggaaatcagcgaattggaggccagcatgcacagatatgcgtccatgcacaggttagggatcaacagcagcgcccagtaacgccggccgccttccagcccgccccggcaggcccgccgccaaaggccccataacagcagtgtggggacggccagaaaaacagccgcctgccaggtggtctgctgcagatggtcatagccgaactggatcgcccataaaagcagctgtgtcgtcagctgcatggctcccagcacccgaaaggctgcccgaagccccgcgtcccgctcccgctgcatggcgctggggccgtctacctgcgtccgggtctgacgtgcccggcggatccatgcgatcattctttattcctcccgtcaaagcggcgcatccggccataggcccgcttcatttcctccgggttgctcaaataggtgcgcaggcgctgtcggaaggtgggggcgcgaagcagcaaatcggggttatgggtacggcgggggcttcccggggccagaaagggctggcccaggctctccatggccgccacccagcacaacagcatcacgacggcatagcacaggccggaaatccccgtaatgcccgccgccagcagcagcaccacctgccccatccgaaaggcgaaggacagcggataattgggcatggcgtagcttcccagcccggagagcgccaccacgatgatcagcaatgggctgaccagccccgcgtccaccgccgccgtgcccagaatcagcgtactgaccagtcccagcgaggaacccatcatgccgggaatgcgaatggccgattcgttgatgagggcgaacaccgccaccatcaggagggtttcctcaaacagattgatgggcacgttggtgcggctttgcatgatgctggtcaaaagcgtcatggggatggtgatgggatgatacaccaccagactgacgaacaccgcgggcagcagcagcgtcaccagcgcccccagcaagcgcagaagccgcatgaaggtaccgtactgccagcgcatatagctgtcgtccggcgcgtggaacaggtgccacaggctgacgggaagggccagcgccctggggcttccgtccagcagcaaaacggcctgtccctccatcaggaagctgaccgcccggtccggccgctccgtgcccaccacctgcggcaggggcgcgtaggggtcgtcctcgatgagctgctccagcgtgccggaggtcagcacgtaatccagctccacggcgtccagccgccgctgaagctcctccaccgtctcccgggggcacacgccgtccagatagcaaagcgccgcctgccccggcgtttccgtgcccaccttccgaagctggcagacgaagttcggcgatggcagccgccggtgcagcagcgtcaggttatcccgcagggtctcgttaaaagcgtcatggggccccaccaccaccgtttcgtttcgggggttggagacgggccgacgggcataggcgcgcaggtcgatccgcagggcctgatcgcaggtatccatcagcaccagacacaggccccggagcagatcgtccagcgcctgcgaaacctccggaccgctttcgacctccggcacggtcagcacgctctgcatgacctgctctgcggcgcttcgtcccgccagagcgagcgggctgttcatcatgggccgaagaatatgctgggccatctgctccccgtcggaaaggccctccacatacaaaagagcgcagtcctgccccagcgcgtcgaagcgtctcagaaccacgtcgtcgtttacgtccagatggagccgttcctgaagcgccttcaggtttttttccagattccgggaaaaaatcgtctgcatgtgtcctgcttcccctttggctgtttggttcgtttgcgttggtagtatggcccggcgcaggaaaaaaatgcagaaatgccatccaagagaactaactgtgcttgttcttcttctgattcggtgctaacatagacgcgaatcaatggggaaaggaagaagcacatgagcgactggcttaaggtcaaagccgccgacgtggtggagctgatcgaaagacgaaaggatcgtctgccgtggggctatcgtcccgaggaaatctacagatgtctcatttttcaaaaggacggacgaatcttcatgacggtcgatcagttccgcagggaagaaaacggcggctatgcctgtcttcgtccttataccgctgaaattgcggagaccatggaggactatcggaatatgcccgacgaggcatttgtaaaaaaagcctacaacaccttcatgtcgggcgcgaggtaaaaaagcatcggaaacacgaccttgtttccgtgcacaggtgcgatttccggcttttgctgacagcgcagttgcaaagcaggcgttgtacacaaatggataaggagaattatatggagtggctgaatccttttggactgctcatcattgcggtcattatgattccaaacattcttttcgccgtcaaatgcaaagacagctttgcgaatcgctggagcaataaagcggttgaaactatggaacaaatcggcaggttcggctgttttggtttcatgatcttcaacattcccgggacctgcttgggatggtggtctgacgcggcgttcatagtctgctttatggcggatgctgtattggtgatcctttactgcgcgatctgggctgtcttttttcagaaaaacagtttgttcagagctctgacactctccatcattccctctgttttgttcttattcagcgggatcatgagtcgttcgctgcttttaatcttcgcatccctgttgtttgcacccagtcatattctcatttcgtacaaaaacgcaaaataatctttccccgcagagcaaacgcagttgcatttttggggcgcatcatccaacccccggcttgaaaaaagtccaaggccgggggtggtgtcgttttttcacacgccgctttcgccgtagttggccagcacgcgggcggaggggtcatccacgtcgcagccgggccaatcccggttgggcatccagaagccggacaccatggcggcctgaccgggataatatttttcgaaaagctggcggtacaaaagactttccttggtaaacggacgggcaaaatcatactttgcgcatccggcgcggaaggtctcatccgtgtaaagggattcggcataggctttcagatcgtctaccatagaatgccctactgcgtcgctgaaagcggctttctgccgccaaagaatctcctccggcagaaggtgatcgtcggcaaaggcctgacggatcaggtatttgcccatatcgtgacgattcattttcagcgccgggtcaatgaccatggcgtagcgcacaaaggccagatcgccaaagggaacgcgggcttccagcgagttgacggagatgcagcggtcggcccgcagcacatcgtacatatgcagttcccggatgcgcttttccgcctcatgctggaacgcggccgcgtccggggcaaaatccgtgtacttgtagccgaacagctcgtcggaaatctcgcctgtcagcagcacccgaatgtccgtatgctcatgaatgtacttgcacaccagatacatgccgatgctggcccggatggtggtgatgtcataggtgcccagcagcgccaccacaggctccagtgcggccagcacgtcctctttggtgatgatgacctccgtgtggtcgctgccgataaactccgccaccttgcgggcgtatttcaggtcgatagcgtccacatccatgccgatggagaaggtgcgcaggggtttgttcagcttgcgggcggcgatggcgcacaccagtgaactatccagacccccgctgagcaggaaccccagcggcgcgtccgcgtccagccgcttctccaccccggcggtcagcaggtcatgcagtccccggcagacggtgtcttcatcggccataaggtattgatctgcccgggccgggtcggcgtaacggacaaattccccgcccgcccagtagcagcccggcggaaagggcaggatcgtttcgcacagccccaccagattcttggcctcgctggcaaaggccatggagccatccgccagcatgccgtaatacaggggccgaatgccgatggggtcccgggcggcgataagtctgccggactttgcatcgtacagaatcagggcaaactccgcgtccagcaccttgaacagctccagtccatattcttcgtacaggggcagcagaatttcacagtcggaatcgctttgaaaggtatatttttcttccagccgctttttcagcggacggaagccgtacagttcgccgttgcagaccacgtaactgccgtcccgttcaaagggctgcatcccggactcgttcaggcccataatggccagccggtggaagcccagatagccgcagggaatttccgtcagccgggacatatccggcccacgggacaaagtacggtcaaaatgctcccgcagggtctccaccgggatcgacttgctttccacaccaaaaatcgagcacataaaaagcacctccaaagtttcccgcggcatcgtctgatgatttcaggacgaatgccgcgctccgtggtgccacctgatttgcttctttgacgggttctgacaaaccccggccgctgtaacgggcgaccggcccgccgcccctacttgcgccccggcgctttcagtttggactcggaagggttctttcgctcgggccgcccgcaggcttttcagctgccgcccgctctctttgggtgcgggaaccgaggtactttgcttcctcaacgctttgcatatcaataaaaaagacaagggcatcagacgcttctgcgtcgtcggcacccttgccttggttggaagtatacaacgggtcacggcccgcgtcaacggaaaattttgtttttttcctgttttacacaatcggcttcatttccaccagacggtacccttcggcctctgccgggtcatgagtgaccagcaccaccgttttattccgggtgtactcccctaccgcgccctgcacggcccttttggtttccgcgtccagccccttatagggttcgtccagaaacagaatgtcgaagtccgccagcagcgcccgggcaatggcaacccggcgtttcataccgccgctgaactcccgcacagaccgggaaaggctctccttttccagcccaagccgaaggagcagcgtttccgtctccaccggcagaccgccgcacacgaaccgcacgttttccgcggcggtcagctgttccagcagccggtcttcctgaaaaacggcgctcatgcgcagaccatccagccccgcgatgccgccgccgtccgggcgttccagtgccatcaacagccgcagcagcgtggtcttgccgcagcctgaaggccccatcaggcaaagatgctcgccgctttccatcgtcagcgagaaatccctcagcacgggctttccgtcgtaggctttgcacaaatgctcgatgcggatcatgcgcaaagcctcctttcgatcagtcccaccagcagggacagcagcttttcgcagcccacgctcagtagcacgatagtcagcgtccaacagaacagatcgggcgtttccagataaatcttggcctgatagagcttttcgccgatggaaccggagggcattccgataacctccgccgccacgccgcttttccagcacaggccgatggcgatattcatgcccgaccgcaggtaaggcatggccgagggcagatagatgccccaaagccgccgggcgaaaggcacccgaaacagccgtgccatttccagaagctggggatcggtgtggcacaggccggtcagcgtgttctgatacagcaccgggaaggcgatcatcaggctgatgaggatggacaggttccggctgggcacccacaaaagcgccaaaatgacaaaagaagccacaggaatggccttcacggtggcggtcaggggactgagcagctgccgcacccaaaggtgacggtagctgagcactgccagcaccagcgccagcgccagactcaggaaaaagcccagcagaatatgccccagcgagaagcccaccgattgccagaactggggctgccacaggagctgaaaaaaacgctggatcgcctgcaggggcgataccagcaaaatgggctcgtccacccagcgggcggcggcctcccagcaaagcagccagaaggccgccgcccacagggggatagagcgctttttcttagcgctggaagtagaaagcgtcatccggcagcgcgccgcccacggactgggggttctggtcgaagagcaccttcagatagccagaaagctgctccttcatttccgtcccttcgataaacacgatctggcaatagggcagagccttctgagccacagcctcgggcacgatgtcaaaggcggcgatcagcttggcggcgtcgtccacgttggcgttcacatattccacggaggccttgtagccgtccaggaacttgctgacttcttcgggatgctcggccacatagtcggtgcgggcaatgacgatgccggtcagcatggcgctgggttcctcgctgccttcctgcagcttggcccactcagcggtcagatccagcgccacatggacgctgtcctgcttcatctgggcggtggtcacgaagggctgaggcagcacggccacggagccttcgttgctcaagagggcggccagacactcggaatgctcggacttgtattccacggtcacgtctttttcagggtcaatgccgttgccttccagcaggtagttcagggcatattcgggggtggcgcccttgccgctggaataaatggtgcggccccgcagatcctcaaaggaatggacggtctgttcgccgttttccaccacgtagagaatgcccagcgtgttgatggccagcacctgcaccttgccctgggtgttgttgtacagcacagagcccagattggcgggcacggcggcgatgtcgatctcgcccttcaccagtttgggggtaatttcgtcgatcgcggaagcaatgctgaaatcatagctggcggcctcgtcggtcatcagcttgctcaggcccatggcggtgggtcccttcatggccatcacccggggcagggcttcggttccctcggcgaaagaaacggcgcacacagacagcgccatgcaggcgaccagcaaaacggaaagtaactttttcaaagcgttcatatcaggtatttcctcctgttcaatcagattcattggtaggattgggtttggactgcaccagagcactcttgacctgtacgccgggaagattgcccatcttgccggtcatggcccccagttgatcgttggtgccccggacgatcaggcagatcacagactgcccccgggacgggctgggtacgcccatgcggccttcgatcatggccgcaaaggaagacagaatttcgttgaccttcggcaccgactgccgatcctcgatcacgatgcccacaaagcccagacgttcctccgtcatccggcacgcccccctttttcaaaaacttgttgaaaacacaaaaaccgtcagacgcacctctgcgcctacggcccttttcgttgattcagcatatggctttccctccctcttcttggacgttgacgcatccccgtccgcaaattagaatgatgtttccgcggctggctctcacgtttccgctcgggtttgccgccagaaagagtataccccattttcggcaaaatgaaaagcccgggcgaaaaaaacatcaagacttttcaaaaaggctttttcagccgtctccttcccccgggccgcacagcaccagaatcgcgccgtctgtcgcgcgaacattcacctgataagcgtccagcacattgattggcgagcagaaaaagaattgccagtacggcacggacagaaactcgctttcatgaacaatgccgtattgtaccgtttggaaacgcgccagcgtcgcgtccgtttcgccataggcgtactccatattttcaatggcgatggccagcgctttttccagcggcatatccccctgcagcggctcgtcaaagcaggaaccacgcgccttcaagccttcaaaatacagcgtattttccgcgccctgcgcttccagaaggattccgccctgcgtcagttccggctttcgccccaacggctgaggaagatatcccgtcacgatccagccgcggatttcctttttctcttcagtgtcgtaaaaggatacataggccatttcataggttttcagccagttttcgtcctccggcaacccctgctcggaaggctccaccagctggtactcctcgtcctcctgcaaagtggcgatacactccagccgatccgaaaacacgggcgtttccaccgacacataatccgccagtgccagcgcgcagcacaggatcagccataaaaccagcgccatcaatctgcgaaaacgcttcatcggtttctccctctctcccgttttctttccccgataaaacgaaagaaggatggcaatttcatccatccttctttcgggaattttcttttgattacggcagcttttctaccgccacatcataggcgatcttcagctgtgggtcgttcatatcgccgatatcgtacatcacgtctttgttttcctccggcatttcagcgatcacatccggcgtgatgcccttgtgatgcacctcgttgccgttgggggtgaagtactgggccaccgtcagctgcattccagcgccccgggtgccaacgggcagcacatactgcaccacgcccttgccgtaggtggtcacgcccacgatggtggcgcggccgtagtcctgcaggcagccggagaggatctcactggcagaggcggagttttcgttcaccagcaccaccagcgggatgtcgttcttgccctgatggagctgatacgtctcctcgctgccgtcccggtagcgcagagaggccaccgtgccgctttccaggaacagatcggccaccttcaccgcgtcgtccacccagccgcctggattatcccgcaggtcgatgagcagcaccttcgcaccctcgtccagcaggctgttcatatgctccttgaatgccgtggagcagtcgccgctgaactcatagagggagatatagcccacgctgttttccaacatacaggagttgacgtaattcacatgcacctgcgcccgggtgatgacgaagtccatcaactggccgtcccggagcacctgcacgttgacgggcttgcccacctcgccccgcatgatgtccaccgcatcctgcaggctggtggcggtcacgtccagagcctctaccttggaaagaatatcgcccttgcgcagtccggcttccagcgccgggctgtccagaaagacccgggtaacggtgcacaggccggtctggtaattggccatgatctggatgcctacgccggcgtagttgccctcgtcgtccgcccacatcttggcataattctccggggtgtaatagaaggtgtagggatcgtccagaccgtaaagcaggcccatggccgcgccctccagcatcccttcctcgtccggctcctgataataatactgatcgacgatctgcttgatctcgtccagttcttcgtattgcttgagccgctcatactcctccttggagattgtgaccatctcgccgtcgctggcggtcgtgctctcgccggtcagcgcgtcggtaatggtggtgggcagcagcgagcagctggtcagcatgaccagcaccagcgtcagaagaaccgtcatcttgcgggccttggtccatttcatacgatcaccccatttccattcatttgaaaatcacagaatttctctgggtttttcctgtccgcagcgcttgagcttgtagaggatcttaaacgtcaccgcatcgtcgaagtggcgaagatccagacccgtctgccgctgcaccttgtccagccggtacaccagcgtgttgcggtggatgaacagctgccgtgccgtatcggaaaggttcagatccttgcggaagaacatttcgatggtttgcagcatttcttcgttaaaaagcttggccgtcttgcggttgaaaagcagcgaatgataccgcaggctgtcctcccggggcacgctcatcaagaagcgttccagcatgaggcggctgaaaaggaaaatatgctcctccggattgaacagctggcccacttcgatggcccgtttggcctcggcatagctttcgcccagcagagcaaggttattcttgctttcgcccacgcccgccgccatattcagggcggcttcttccatcagggtctcctgcacggccagcacgtactgttccagctccgccgcgccgtcgatgccctccatatccttaacaagggccgcttcccgacggttcatttccaccagcacgtccgtttcgcccagcggcagcaactcgcccagcgtactgtaggcgctggccttgtcggtatcgtccagctggaacacaatgacgcagcgattcatttccaacggaattttatgttccgccgcccgggtcgccagctccgcgccagtcagctcctgccgcagcgccttgcggtatacatcggaatagccggaaatggaaagactgctcttgagcagactcatgaccatagcgtccgcaaggcacagcacgtcgcccgcgccgggcgcggaggcctgcgccgccagatacagtgcgggatgaatatccagaacccgcaccagcgcgtcgcccacatgatggttgatgccggaggccaaagtggaagcaggcacggcaattcccgggccgtcctccggcacgatgcaggctccgtccgcgtccaacagacgcaggggaagactcaattcctgaaaaactttggcgattttgcgaagataccgcttttcaatatacacgcgaggcttgctcctttcctgtcccggccagcgccgggaggccaaaagaccgcattcattatagcggattccgacaaaaaagtacagtcaaaaccctttgggaaagaagcggaaaagttgtaaaaacaaaggaagaccgaaggaaacaaagacgaagttataccgggtaatcgtccaggcgctcgatatctgcgcccagcaggcgcagcttttcaggcagattctggtagccacgctcgatatgtcccgacgggtcgctgagcagcgtttccccctccgccatcagcccggccagcatcagcgccgcgcccgcccggagatcggtactgcgcaggctggttccccgcagcggatagccgccctccaccagcgccacgttgttctccacccggatacgcccgcccagacggcagagttcggccacgtgcatgaaacggttctcgaacacggtttcgtggatcatgctctgcccgtggcagcgcaaggccaccacggtcatcggggcctgcatatcggtgggaaagcccggataggctaacgtacgcacctcgaagggcgagactgccgaaccgctgagccggatgcccgcgtgggtctcccgaatgccaacgcccgtctccgccagcttgaacagcagagagcgcagatgctccgcacaggctccccgcaccagaacgctgccctcggtgacggcggcggcgcacagcagcgtccccgcctcgatgcggtcgggaatgggccggtataccgccccgtgaagccgctccacccccaaaatggtgatggtctcggtgcccgccccggaaatgctggctcccatcaggttcaggcagttggccagatcgacgatctccggctccttggccgcgttttccagcaccgtcagcccccgggccagcgcggcggccatcatcaaattttccgtggcgccaacgctgggaagatccagataaattcgcgccccggaaagccgtcccgacagctgccgcttgccgcccagcggatgcacctgcgcgcccaaggcctgcaagcccttcaaatgaaggtcgatgggccgctgcccgatggcgcagcctccgggcaatcccacacacgcactgccgctgcgggccagaatggggccgaggatcagaatgctggcccgaaggcggcgcatgttttcctcatgaagcgggctttggggctgcagggcgcagacggagacctccgttccgctgcgtgtcacctgcgcgccgcaatcccgcaagatggtcagaagcgtttccacatccgtgatgcgtggcacttccttcaataccagtggttcctccgtcagcaatcctgcggccagcagcggcagcaccgcgtttttggcggcgtgcacctccacttcgccgctcagcaccgggctgtgacggatgagataagttgccatgttcatccctcctgtcgcggtcattttgaccccggcgcaaaagccgcatgaggggtggaaaggtttttcagccgccccgaaaagcttttttcagccgttcttcggcaggctttgtcagcatagcgtccgttttgcgcctgcagccgtcccttggctggcggcatttgtctcgcccgttcttttccgaaacgggaaagcgtgctataataaagccagtttttggaaaggatcaggttccgatggatcgatttgtcttgaaggctccctaccccgccgcaggcgaccagcccgccgccatcgacagtctggcccggggcgtgctggagggcaaaaaaaatcaggtgctgctgggcgtgaccggcagcggcaagaccttcaccatggcctccgtcatcgaacgggtgcagaagcccacgctggtgctggcccataacaagacgctggctgcccagctttgcagcgaactgcgggctttttttccggacagcgcggtagagtatttcgtctcctactacgactattaccagccggaggcctatatcgccgccagcgacacctacatcgaaaaagacgcttccatcaacgaggagatcgaccgtctgcgccacagcgccaccgccgcggtgcgtgaacgcaaggacgtgattatcgtcgccagcgtcagctgcatttattccatgggcgaccccagcgaatatgaaggcatgatggtcagtatgcgccccggaatgcagctgagccgcaatcagctcattgcccgactggtggacatccagtacgagcgcaacgatatggacttttcccgcggcagcttccgcgtcaagggagacgtgctggagatcattcccgccaacgagcgggaacacgccctgcgcatcgaatttttcggcgacgagatcgaacgcattcgggagatcgacgcggtcagtggcaacgctatcagcacgttggagcacgccgcggtcttccctgccactcattatgcgatggacaaggaaaagatgctgcaaaacctcagccacatcgaagaagatctggcggtgcgggtgaaggaactggaggacgagaaccagcccctttacgccctgcggctgaagcagcgcaccaattacgatctggaaatgatgcggcagatcggctactgtcagggcattgaaaactacagccgttatttcgacggacgcaagcccggcgacgcgccctactgcctgctggactacttccccaaggactacctgatgattatcgacgaaagccacgtgacgctgccgcaggtgcgggccatgtacaacggcgaccacatgcgcaaaaaaagtctggtggactacggcttccgtctgccctctgcctacgataaccggccgctgctgttcgacgaatttaacgagcggctcaatcaggtcatctacgtcagcgccacgcccggcgaatacgagctttccattgccgaaaacacggtggagcagatcatccgccccacagggctgctggatccgctgattttgctgcgccccgccaccgggcaggtggatgatttggtgggcgaaattcacaagaccatcgaaaagggcgagcgggtgctggtgaccacgctgaccaagcgcatggcggaaagcctgaccgaatacctgagaaatctgggcatccgggtgcgctatctgcacagcgacattcaaaccatggagcgcaccaagctgatccgcgatctgcggctgggcgagtacgacgtactggtgggcatcaacctgctgcgggaagggttggacatgccggaggtcagtctggtggccatcatggacgcggacaaggaaggcttcctgcgcagccagaccagcctgatccagaccatcggccgcgccgcccgcaacgtggacggccgggtcatcctctacggcgacattctcaccgagagcatggaaaaggccatgaacgagaccaaccgccgccgggctctgcagcaggcctacaacgaactgcacggcattacgcccaagagcgtccagagcaccgtacaggcgctgctgcgcatcaccgatgacatgaaggctggcgcgccggagtccatgagcgaggaagagctgcaggccctgatgcagtcggtggaggatcagatgctttccgccgccaaggcgctggattttgaaaaggccgccaagctgcgcgaccagcttttcgagctcaagggtgagagcggtaaggaacagcagattcagaaaccgcagactcgccgccggtggaaaaagagaatctgacaaatgcctttctttttcgtggtttctgtgctataatgggctaaaagtttccaaatcgaataggaggcatctttatgacccagaccaagacggaaaaaaagaaccctctggtaagcgtactggctgttctgctggtcgtcgcggtgatcgctgcggtgatcggttttgtgggcaaaaataacgccatgaacgacagcgccgcctttgccgcacaggtaaaggaactgaccgagcagaccgagaccctgcaggccgacgtggacgaaaaggccgcttctctggaagaagtgcagggcaagttgaccgaagcggaagcgcaggtggagacgctgaccaaggaaaacgagaccgctgccgccgacaaggatcagctgaccaaggatctggaggacgtgaaggcctctctggaaaaggcgctggcggatgcggaagccgccgccacgcaggccaaggccgatctggaagccgctaaggccgcaggtgacgatgcactggccaaggccaaggaagacgccgctgccgccgctaaggccgccgaggatgagaccgccgtgctgcaggcgcagatcgacgaactgaccaagaagttggccgatgcccaaaagaccaatccgtaagggaactttcatagataggtgcagccccggcaaattttcgccggggctgttttttcctgtttttggatgaaatatgcccgtacaaacgttgaataggcagataccatccaaggaggttcgatcatgcgaaagattctgtgctgtctgactctgctccttttcctgcccgtggcggcgctgggaaaaaccatcactctcatcgacgacgaaacaaccgcgcgtcaattcgccctctgcttcttcgccaatcctttcgtggatgaagcggttacagacggggaaatgcaggtcaaacgcatcggcgaggattatcacgtcgacgttcccgccaacgaccggcacggcgcgctgatgcttcgcttcgatgctgctggcgttatccggcagtactggaatcagacgtggcgctttcccaggctgaccgcgtgggatcccggctggaccggcgtccccaaggacgagcaggacgcgatctgcgacgtgacagaagccttcagcaggatcctactcagtggccgtttctacgaccttgtagcgctgatgcgcagcgacgaaaacgagcggaagggaatcttcaccctcctgctcaatcaggacgaggcctatatggccctcagcgccgagcccctgaagctgtatggttttctggatataacctgcccggaagccgttgattatggcgttgcggtatcctttgtgaacgcttccgtcctggccagaagcgcggtggccgaccagctgacccgcgactcccagaccgttctttcgacggaattgccgtttttcaacgccatgggctccaccgccccgaacggttcccccatcccggtctgggaagtgctggtacacgtggaatatacggatcgcagcgacgtctattacgtgatcctgaatgcccaaaccggcgaaatcctccaagtggaactgcaggaacatcaaagtttgggataattttccaacaatataaaaaacagccagcgtttcttggcacgctggctgtttttgagctataagattctccgtcgattggcggcttttttcgaatcgactggcacgcccccctgccagacccgcgagccgcgaggccttccgccgagcggcggtagttccacggccaaacaacttttccacgaatcccccgcgtccgcagggcgcggtgtggggtgcaggggcactgcccccgcctgctagaagttttcgaccaggttgatgtcggtgtaacgcttcatgcccgtaccggcaggaatcagcttgccgatgatgacgttttccttcaggcccagcagcggatccaccttgcccttgatggcggcatcggtgagaacgcgggtggtctcctggaaggaagcggcggacaggaagctctccgtggccaaactggccttggtgatgcccagcagcacgcgcttggcgatggcgggacggccgtcggcctcgatggccgcgcggttggcttcctcaaagcggtaaatatccaccagagagccgggcagaagcgtggtatcgccgctgtcctcgatgcgaaccttgcgcagcatctgcttgacgatcacttcgatgtgcttatcgctgatgttaacgccctgctgacggtacacgctcaaaacttcgcgcagcagatagtcctgcacagcctttacacccagaatgcgcagcagatcgtgaggattgatggaaccttcgatcagctcctgaccggcttccaccagctgaccctcctgaaccttcagacggctgccgtagttgatggcataggtcttggattcgctgggattgtccacgttggtgacggtcacttcgcgcttcttcttgttttcgcccagcgtgacgcggccgctgatctcggtcaggatagcgtcgcgcttcggcttgcgggcctcgaaaagttcctcgacgcggggaagaccctgcgtgatgtcctcgc

SEQ ID NO: 3952 - DNA, 29316 bp, Unknown
  16S sequences of unknown bacteria
caataagctcccgcaacagcggtgcggtcagctcgtccatctgcataaactttcggatggcagcgataaacttgtccttaacacagcacggtaatcaagtcattgtttcggatatttgattgacgatttgtgacggcttcactccgtcttttatgtttttcattttttgttatggtttctatttttaacgcccaaataaagcaattggaaatcgtatcacctatgatcagctgttttcaaatcgatcgtctgattggatgcccgatttttataaaatggctttaccccttgatatgtaaatgatgagatagaaaaaatcaaacgttttttgcatcatatccgtctctgatacccccgctggcaatcggctcttgttcttttaagccatccttgctataatagaaatgatattcttaattctttcagccaaaggagtgtttggaatggaaccgatgaaaaatcagctttggaccgataaaccccacaattttctgggacttgccatcaactttacaaggtacatcatcacatcggagaaatttattacccgcaaaggctttttgaatattcacgaagacgagattatgctctatcgaatcactgacaaaaagcttgctctgcccattacgcaacggatttttggatgcggcaccattacgctgcatgccaaggacagtgacactcctaccaaggaactcaaggctatccggaatccacgcgccgtgctggagcttttggacaacaccattgaacaagcccgtcaagccaattatgtgcaggggcgcgacatggtcggcgcccttaaccgggatccctgcggtgatgagaatgaatgcgattttgaataattcaattactctaccctgtgaaaggaagggatctgattgaaaaaaagttcccaggcggattttggcaccgggagtatcggtaaactgctgttcactatggcagtcccggccatcaccgcccagattatcaaccttctgtataatattgtggaccgtatgtatatcggtcatattcccgtgattggcgccaccgctttaaccggtgtgggcgtgacctttccaattatcacgctgatcaccgctttcagttctctgatcggcatgggcggcgcggcacgagccgccatttttatgggccgccaggataataatatggcggaggaaattctcggcaactgctgtgcggcgttggtctgcatttcagtagtgctcaccactgtcatcctatttttttgtgagccgctgctaatggctttcggcgccagcgccgacaccattggctatgccaccggttatcttcgtatttacacagccggtaccatttttgtgcagattgttatgggccttaatatgttcatcacttctcagggatttgcacaggtgggaatgaaaactaccatcatcggcgctgtgtgcaatatcgttttagatcctgtttttatctttctgtttgatatgggcgtacagggcgccgcattggcgaccatcatttctcaagcggtctccgccgtttgggtcttggtgtttttaaccggtaaaaaaacgattctgcgcatccgcctttcccggttgcgcttgaaccccaaaattatcggtccggtgttggcgctgggagtttccccttttatcatgcagtccacggaaagcctgctgtccatttgcttcaacacccagctgcagcggtttggcggcgatctggcagtaggcgctatggccattttgaccagcgtaatgcaattcggtatgttgccgttaatggggcttacccaaggtgcacagcctattatcagctataacttcggcgctcgcactgccgaccgggtgaaaaaagcttttcagcttctgttggtctgctgcatgatttttacctttgtcctttgggccggctgtatgttggttcccaaagcctttatcctgattttcagctctgattcggcgctaacggaaatctcagtctgggcaatgcgcatctatatgggtacttttctgttttttggcgcgcaaatcgcctgtcagcaaacctttattgcactggggcaagcagccgtttccctgtttttggcattgctgcgcaaagtaattctgctgattccgcttatttttatcctgccgctgttcttctcagatcaggtgttcgccgtctttttggcagagccgatagccgattttctagcggttttggtcacggtgctgatgttcaccttccgtttccgcaaaattctagccggtctacggctgaactctgccgcagccaatccggtggagaaagcatagccattcttttcaagcggtgccgcggcgccgctttcttaatgctttcttaatgccctttcgcattgtttttctatgctgaggcgtgtataataatgttgccggtcaaaaagacaagtctgccctgtttcgccgttacttttcaaaaagctaatccgggcaaaactgggataccgccatcagctgcggcagtcttttttattttatcggctcggaggatactatgaatattttgattgttggctgtggcaaagtcggatctatgctggcatctgagctggatcggatggggcacgatgtggcggtactggatcgggaggaagcccatttcacattgctggattcggatttttcaggctataccatcagcggtgtacccatcgaccaggatgtgctcaagcgcgccggcattgagggttgcgacgccattctggccatgaccgaggatgacaacgtcaatattatggtctgccaaatggctaaggatatttttcacaccaagacggtgctggcccgtatttttgacccaaaacgggaaaagattttctccacctttaatatccgtaccatcagccctaccaaccttacggtagacatggtgctgtcggccctatccggaacctacgaggcgcggcatacagtaatcggcaatgccgttctttcttattacaccgtctatccgcagaaagaatggattggccggtatttaaaggatctgcgcgtgactgacacccatttgctggggactttgcatctcaacggagattttaccctgattcaaaacgatcaggaaacactccgccccggtgatctgctggttgccgcccgtatcattgattaaacttgaaaaatggagttactgctatgaaagtgattgtagtcggcggcggaaaaatcggattttatctgacccaaacgctgctggagcacggacatgagccggtgctcatcgaaaaggatcccgatgtctgcctgcgggttgccaacagccttgatctgccggtaatccagggggacggaacggtattggacacattggaaaatgccggcatccgaaactgcgacgctctgattggtgtatccggtcaggacgaaagcaatctggtggcctgccagctggccaaacgctatttcggtgtggaacgcactgtggcccgggtgaacaaccccaaaaacctgtcggtcatgaaacagctgggagtggatatccccatcagcagtaccgatagtatcgcccgtttgctggaacatgaagtggatactgccgttatcaaggaactcatgagcttaaaccgcggagaagcctctttaagcgagttggagctgcccaaaaattacaaattccatggcagaaccttaagccagatgcagctgccggtggaatcgattattgtctctattttccgggacggcagcctgatcatcccccgcggcaacacccagctgctcagcggagaccgaatggtagtcatgtgtaaaagccaagccatgcacgaactgtgtcggctgctggaattgcagtaaggaggagctatgggagaagagttttgctgggaagagctgtccccttctctgtttatctgtgtgagcagcgctcacaaatttggaaccgatgcgtttttgctctctgattttgccgctcccaggcggaaagatctttgctgtgatttgggaaccggctgcggtatcattccgctgttgtggttccgagacgatccgccccgcctgtgctacggggcggatatccaaaagcaggcaattgagcaactggaacaatccattcaaaaaaacgggttaaaaaaccgcttcatcccacttctgaccgatctgaaagaactttcttcccttccctgcgggccgctggatctggtgacctgcaacccgccttataaagcgcagggcagcggcattttaagcgagaccgacgcggaaagaattgcccggcacgaggtattatgtaccattgaggatgtttgccaagccgcatcccggcttttgcgtttcggcggaaggctatgcctttgtcaaagaccggaacggttgtgcgacacactatgcgctatgcgcagcgccggaatagagcctaaacgagtgcgctttgtccagcagcgtccggcctctgccccttggctttttttagtagagggcaaaaaaggctccaaaccctacatgacgatagagcctccccttttggtagaaggggaaggcggtttctcgcaggagattttgcgtatctatcataaaaaagagaatctgtaaaacaggagggtaccttttatgtccggaactttatacgtggtaggaacaccgattggaaatttatcggatttttccccacgagcggtccaaacgctgcgtgaggtggattttattgcagccgaggacacccgggttacccaaaaactgctcagtcatttccagatcaaaaagcccatgatcagctattatcagcataatctgcgggaaaggggagaagaaattctggcgcggatcgaagcgggagaaaactgtgccatcgccaccgacgccggtatgccctgcatctccgatcccggggaggatctggtagggctgtgtgcggccagagacattcctacggtcgtcattcccggtccatcagctgccatctccgccctggcggtttcaggacttcccacctcccgcttttgctttgaaggctttttgagtaccaaccgaaaaaaccggatggaacatctgcatcagatttccggcgatcagcatacgctgattttttatgaagcgccccataagctgatttacacccttcaggatatgctggaggtactgggagatcggcgcattgccctgtgccgggaactgaccaaactgcacgaggaaattattcgcaccaccttctccggcgcattggagcggtacagggaaaaatcccccagaggagaatatgtgctgattattgaaggggcgccagagccggaaaaaacctccctgaccctggaggaagcggcagcgcaggttaaagcattgcgggaatccgggatctcagtttctgacgctgcaaaacaggtggcaaaacaaaccggatacaaaaaaggagagctgtaccggcttgcgttggaagatgaaaattccactctttaacacagaaccgtgcagcctggaacaaaggtatcatcagccgtcgggttcttcactggaaggggcggttccaacaccttcttttccgtttcttttctgcatattcttttagcagaaaggaggcggattttttgcgttttttactctttttttccgttttggcgctgatttttgtcaacggctggaccgacgcccccaatgccatcgccggcgttgtagctaccggcagcatgccttaccgtgctgccgcctggatggctgccgcctgtaatttggcaggagcgttgtttttctgcctgatgggtggtcaggtagctaaaaccattctgaatctgaccgatttttcccaatcgggagaggccggtttttgcgcactggcaggatgctttttatcggtagtcttgtttgccgctgccgcttggtattgggggatccccaccagcgaaagtcatggactgatggccggaatgctgggcagcggcctggcactaggcacaggcggcgccgtccattggcaggattggcagccagtgctggcagggctctttctttcgctggggctgggttttttgctgggatggattttataccgtcttgcaggacctatactttaccaattgggagaaaagcgcctgtccatatggcaaaaagctggcgctgctgcttgcgcagtgatgcacggaggacaggacgggcaaaaattcgctgccatgctgggattggcctggcaaatggcggcgaatcttccatcacttggcaagcagccaatctccatagctgccgtattgtgtgccgcagccatgggaatcggaactttgtgcggcggacggcggattattcagaaaaccgcagtcgagatggtcaaaattgataaatcccaaggggcagcagcagatctcgcctccgctgctgctctgcttgtcctttctctgctgggacttccggtaagcactacccacaccaagactgcctcattagccggatgttccgccgcacgctgccgcaaatccgtacagctttcggttgccggacagatgttgtccgcctggctgctgacctttccactatgcggacttctcgcctggctgttgacccatcttcttctggctctttcgcaatgaaaaagcaaggttctctcacaccggatgaaccactgcccccaaaacagccttacactacggctttttcgcctgtcccgttattttcctgggctgcgcgtgtgaaatttagaaaaagctataaaaaggcgggaaaacccgcctttttatagctttgatatcttttaaagcgtttcatcccgccgcggcatgccattttgctcaaacaaaccggcctccatcatcggatcgtcccgccaagcccgacgatcagctgaaagctccgggtgcgcacgcagcaaatcctgaagctgttttctaagctgccggatttggacgtctgcccccactgccggaacagcagaatccgcttgcccttcataaggaaccgaagtgccggatgacacagaatcgttccatgccataacgaacggttgagcctgctgcgaagccgcctggactctcagatcattataaacctggacaatccggttccaggtttgctgaccgataatactgtctgcggtcaggccaaactgccgttggaaagctaccaccgcgctgcgagtgacatttccaaaaattccgtcggttgctacgcgagggatattggtataggtattggcaatgtaattgagataccgctgcatcttcagcacattggcgccgctggagccaacccgtaacggtgtgccaggatattgatccgaggcagttccagtggcaatctgcgttgaaacttcgcacagccggttccatgtggcctgccctacgatgccgtctgcggtcaggccataattccgctggaaggccactactgcattccgcgttcccgcaccgaaaattccgtcggaggcaatcttcggaataccgggatcgtagtctgcaatatagctcaaccaagcctgcagcgtgctgacatcccgaccgaaatcgccctgccgcagcggtgtaccgggataagacgggcagctggtcgtggagccaggcagctgcaccaccagttccaaatatattttatacaatttgtcccaagtggcttttcccacaatgccgtcctgcgtaagattaaactgacgctgaaaggttctaaccgcgttggcggtttctggtccgtatataccgtcgatgtccaccgcgggtaccgtttgataaaacatattaactgtactcaaataaaactgtataatagaaacgcccagaccggtggacccctctttcagtacattgccgggataagagcccgcgttggacgggaggttttcattttccgcccccaattccgccaatttggtcacggcgacatagatatatgaaattttataccaggtggcttttcctacgatgccgtcctgtgcgagattaaatatgctttggaacgttttaaccgcattttcggtagcagtgccaaatactccatcctctgtaatactgccgataaggggatagttacgccggatacggttgagcttcgcctgaaggatctgcacataggtcccctgggaacccagccgcaaaggtgtaccgggataggattgaggaatatcctgaatattgttggtttccagcagttcaatattgtcgccataatagtattttaaaattcccagcggcgtatagccttgattggccaaatctaccgttccccattgctttagtccggagcagcttacctgccgcccatcgcaatattcggtgaagaatggccctctggagccaatgcggctgacgtagacattaaaaatatcgtccacaatgcggctgatattctcaaaaatatttcgtcctttgacatatttctggtcatattgggtagaattcgtaatttggaaattatatccttggctggggtaccattccgtatagacccggttgagcgccagggaaatctgcgcgtaaatattggcgcggatagcattttccggccaggtagggtaaatttcgctggagcaaacattttttatataatccggaaacgaaacatagacattttcagcattggagcggggtgttcccaaatgcacgacaatttgactgggaacaatcacgctttgcagtacctgtgggcgcacttctcgctctaagggattctccggcagccgtggctgatctaattgttgctgtggtgaacaatccggctcgcagtcggcctgtgccaaactgtgagcaggcgtttcgaacataaagtctgtattattggtataagcttctcggtcaaaggggatcaattcaacttgctgcagcgttgtctgagcctcaaacacctgcacccgtcggatcaactggttggcaaaattaaatgcccggatggtaatatcataagtagtatatggaactccttcatatgtttcgtccaaagaaagtgatttgggaagcgcatcgacttcgatcggttccgtttttccttcccgatccacctccaccgtacgaatgacgcttttccctccggtgcccgggcgggaaatgataacggtggcgttcgtgatgggacgggcctgccgcgctgtaaaaagctgtgcgacaatatagcctttgctcataaaagccctcctttatacagatcaaaccgtttcaacggttcttaccttattttactatgcaaaagtgtagaaaaatccggtgccgctctggaggcggcacacacataaaatttcagtgcacggggccggaaggcctatatgcgtgaaacttcatgcatcatccgccttgtacgtcatcgtggcatgcttcggatacatgatgttttgtgccaaagcgctcaaaaatattactgctgaatattcgttctagctaggctttcctgaatttggcttacttggggagagcctaggccggtacacaaatcccagcctttccgggcctgatataaacggctttccccttgtatgatatcataaaaatacggctgaggttccagataccggattccgccggccagctggtacagattctgcggtaatgccgtacctccccgctgccgaattccagccagtactgccgcccatgcgggcgcggcgaaactggtgccgccagctttgccccatccagcagagccggaaatctcaatactgtggtaaatggcaacgccataatccggatccgcacagaaactgacgtccggcgtgccgcgcatcccgtttgtctgttcctggataccctccattcgggtctgggccggtgtgatggaaaaaaattgactaggcccccctccgccgctataccaggctatttcgctgatccgctctcccgtatcagacaaaaccagactggtgccgcctgcggaaagaaccaaccctgaagtggagggaaaaaatggaacggcagactgatctccagcagagcctacaaatgctgtcgatggatataggcgaaaaacacgttccagctccgattggccggggcgctcctgctctccccaactcatggatatcacatccgcgcccaagcccgccgccagatctgccgcctgcatcagatccccaattcggtccgaagcggcgtagaccaatagcagatccgcctctggcgccagcgcatgggcccattctacgtccaatgtcgtttccaacgcccaatccgaatctaaaacctctgggacagcaccgatccgccgaattgtcaaacgagctgcaggcaaagaaaaaaagctgctgaaaaaggaaagatccgattctatattgggctgaagtccagtagtaatcagcgcaatagtctgaccaaggccggtggaatttgccgggaaatcataagcagaacggatctgctgtggcgtataaccgccctggaaattttcatccagcctggtagcgagccggacaaacggtcttgccttgcgcggtgcaaaaacatgctggttgcagcagcactgcaagggacattcctccttttcttctgatccggtttccatggtttttccgcctgtctctcccgaaaggcgaaaacgccaaaagaacagtcggcaaaaacggccggcgaaagcttttgcggatagcatatacttttcgtcggccgtccttttttaccggaataccggcaatgcgttcacaacagcagatagaggatgccaagcatcagcttcggatccgccttgtttacatataaggcgatcagaacgcctaacagcagcaatccatctttctgcggcaggtgcagcagcatgaggggactccctccgtctatttttttttaggattttcccctctccaaaagcttctgcgccgaaatggcggcttctgcggcggtgccggcgggatatagcgttcctcttttgccgccaccgcgtccggatgaaaaaccgggaccctacctggccggtccggtataaaaccgtccggatgatagggagaccgggacggcggcgaatccggtttcggcgatcttggctgccgcggatcggaatccaaaggcggtgccggtggcgctggtgaaacaggatgggacggcgctggcataacaggctgtaattctgacacggaaagacgcaatgtctcccgcggcggtgcagcctcttcctttgccggctgttccggcagaggaaacagatcatccggcgcaaaagccggcaaaacctgttctttttgaatatccgtcaaaaaatccgcctgaggcacattagattcgggcagattcggggaaaaaacgtcttcccggctttggccagcattcgccgacgctgcggccggaccattctgaaacccgctttcgctggaaaatcctatgttctcaatggtatgcgatatgttggaaaggctctgcagtaaatctgcctcaggttccgagggcaacggcggatgaaggtatcctcctggcggcaaatgggaggggatcgcgggtgtaaattctaaaagcctttccccggtttcccgctcgaccggcatagcaatcggccgctgcggtatttccggcgattcctgcaaaggctgccgttcattttgccagacaggttttgggcttccatataaaaaatctccggcatccaaccgatcgggacgatccggcagaatgggcggcgtttgcaaatcggcttccttcggctgggcaacggcggcatcctgcatcttctcaggagccgtttgttgcagcttctcctccggacgcgcggataacactttttcggatgaatttttcataacattcgaattctgtgcaggtgccttgtcaacgtttgcaaacgcctgctgctttttggctaattcctgcagctggcgcagggcattttcccgcatacggagaaattcctcccgggaaagccctcctttgttccaatgatccatagtcatctctcctcttcgtctgctgtttttgcttccgggccgctggaaaaacgaagcagcggcagcaggtttgccagccgcattatcttgatgacatcttctgtccgggcagcccgctccggggtaaggtgcggctgaagcgcccgcagcagccggatattcttatcatcatcctgcagcttggaaacaatgcgcaggatctgctcaaaatccgccgtatccggagctttcgcacccggcggttcctccggtgacggttctttcttctgcgatggagcggactgcatcagcccgcccagcagatcgaataaaccgtccatccctcccgaatctttccccgcctcacttcccaaaaggccgcccaacaggtcggaaagttcactcatgactctttctgcctcccgagttctttcaaaagcctgccgacaatgccggaattcagcagcatttctagctttttcgggtcggaaagcaggccgtatatctgctcatttaccacaatcttgccatcctgcatgacgccggagagtttttcctgcagctcccgcttggaaattcccgttttttcgctcgccagctgcagcaatccttccagcttttcttcctcaatgaaaaattcatgcattctgctcaccacctattccaattattttatttctatgatacatttaaattatctattcctgtccggacaaaccaaaaatgtgttgggacaggctttcgaccaaagccagaggacggaggtttttttcatgcgaattatcgtcatgtcggacagccatcgaaatttccgaaacgtacagcgggtaatggaaaagcacccggatgcagatctctatatccacctgggcgatggggaacgggagtttgaggacgtgcagaatctttatcccgaccgccgctatctgtgggtagccggaaactgcgattttggctctgagaccaaaaacagcgatctggtaaagttatccggcaaaaatgttctgattacccatgggcacacttattatgtcaagcactccctgtcggaactaaaaactgcggctcgggtttgccgggccaacgtagtactgtacgggcacacccatgtggcccacaccgaatacgacggcggtctttatatcatgaaccccggcagcctttcgattccccggcagggcggacctacctatgggattctggatattaccagccaagggattatgaccaacatcgtggaggtatgacaatggaggaaatgcctgttttacacacaaaatggtgtggaaagcactggattcatctggatgaggtcgcctctaccaacgattatctcaaacagggggattttgccgacggcaccgctgtcatcgccgaccggcaaaccgccgggaaagggcgccaaggcaaaagctggtcagaagcgcctgtcgggcaagcgatgtatctttcggtgctttttcattctatgaaaatcagtgatatggggttactgccccttttatgcggtctggccaccgcccgcagtctgggggccgctgcccgcattaaatggcccaatgacgtactgctgggcgaaaaaaaagtctgcggcattctctgcgaaagcaaaattcagggcggaaaagtgtcagccgtctgtggaatgggcattaatctttgccaggacgaggatttttttatccaaaacaatctgcctcatgccacttccctgctggcatttgatggtcaaaggcgaacggcgcaagaagcggcggttcttcttttagaggaattggaacctattttagagcagtaccgccaggaagggttttctcctttcgcagcatcctactgcgaccgctgtgtaaccctaggtcggcaggtccgggttatccgcggccagcaggaagtaacggcgcaggccatttccattgcaccagacggcggattgatctgtcaaaaagccggagaaaattttgtaatccggtcaggagaagcttcagtacggggactttacggatatgtctgactgccgacggcaacggtcctgacaattcgcccacaaaaaagaatgccgatggaaccggattgtcaagcaaacaaaaatacagtataatatgattaaaaacaagatgataaaaacggcaaatcgccgatgtggaggggtgcaatgaaaaaccatcaggagccggattgggaaaaattaatcagcgatacgatcgaaagtgcactgcattccggtgattttacccagctgaagcaaacgttgggcacgacctttgaaaccgtaaaaaaacaaaccgcagaaggtttaaagcgtattgacgtacagaccgaaaaaattttcacacaagcgcaaggcaggcagcaaaccagcccgcagcaggtacggcagtctccgccccaaccagcgatgcagcgggttccatcgcgttatgccaccgactggcaaaggccgtccaaccgggttcagcccaagcaaaaagccatgaagctgcccaacaaaaaggctgctgttatcggcgtttttgcagggttgttttttggagtttgctttttacagggtgcatatcagtctgtaacagatcttttttctctgccttttaaattttcaatgatcaccagccttttgatgctactgcttctgaccgcggcgagcttttggctggccgcccactgcattggaaaattccgcaaacgcagatatctgcaatatctgctggctatcggcacacggcaggtttgcgcgatcgacgtgctggcaaaagcagtgaataaatctactaaattcgtcatacgggatttaaaaagcatgataaaaaccggtttgttcccccaagggcatctggacgccgaaaacacctgcctgattctgaccgacgaggcctatgggcaatatcgggttggccaggccaaccggaaacagcgggagcttgaagaggccaaaatccaggagaatcccaacgggctggaagccgtaatcgccgaaggacggggctgggtccgcaagatccgggaagccaacgatgccctacctggtcaggaaatttccgaaaaacttctccaactggaaacggtcaccgggaaaatctttgcctgtgtggaaaggcatccggaaaaactgccggaaatccgccggtttatgaactattatctacccaccaccgtaaagctggtgatatcctaccaggaattcgaaaatcagccggtacagggagaaaatatccgcaataccaaacaggaaattcttgatattttggatacggtaaacaacgcgtttgcttctcttttggacagtctgttccaaaacgatgccattgacatctccgccgatatcagcgtactgaaaaccatgcttgcccaagagggattgaccaatcaggaatttgaaggccggtcccgttaacggattttatacaggagggtattacaatggaagaaaagaaaatggacactgccccgcagctttctctggatacacaggaagttccaaccctgacactggatctggaaactgctgtggagcagcctttggcccccaagcccgagcagccccaagccgccgtttttgacgaaagctccctgtctgatgcagagaggaaaatggtcaacgattttgccgagaaaattcagattagcaattccaacctagttcttcaatacggttccggcgcgcagaaaaaaatcgccgatttttctgaaacggctctcaacaatgttcgcaccaaggacatgagtgaggttggcgaaatgctgaccaacgtagtggttgaactgaaaaaattcaatgtagacgaagaagaaaagggcctgttcagcttttttaagcgttccggcaataaaatttctacttataaagccaaatattccagcgcggaggccaatgtcaaccgcatttgcaatgtgttggaggatcatcaggttcagctgatgaaggacatcgccatgctggacaaaatgtatgagctgaacaaggtttatttcaaagagctttccatgtatattctggccggcaaaaaaaagctggccgaggtggagtccaccgaactgcccgctgctcaagagaaagcccggcggaccggcctgccggaggatgcccaggcagctaatgatctttccgccatgtgcaatcgttttgagaaaaagctgcatgacctggaattaacccgtactatttccattcagatggcgccacagatccgcctgattcagaataatgatacgctgatgaccgaaaaaatccagtctactctggtcaacaccattccgttgtggaaaagccaaatggtgctggctttgggtgttgcccattcccaacaggcggcagacgcccaaaaagcggtaactgacatgacgaatgagctactgcgcaaaaacgccgagacgctcaagatgtcttccatcgaaacggccaagcagtcagagcggggtatcgtggacatcgaaacactcaaaaccacgaatgaatcgctaatctccactctggacgaagttatgcgtatccaacaggaggggcggcagaaacggcaggaagcggaaaccgaactgcgccgcattgaaaatgatctgaagaacaagctcttggaaatgcggtagctttttggaaaaaggagttcatcccatggaaatccaaaacatcgatcttgtcatccgtggcatgattgcacatgatgccggtcaccctcatttcatccagcattttctgaaggtccacgaatttgcccgcctgatcgggattggcgagaatctgggaaaatcgcagcgtttacgttggagactgctgcggttgtccatgacatcgggattttaacagccgaacgaaagtatgacagcaacgccggcaaatatcaggagttggaaggccccgctgaagcaaaggatcttttatccggtcttggctggccgcaggaagtgatcgaccgggtctgctatctggtgagacaccatcacacctacgccaatatagacaagcctgatgatcaaattctggtagaagcggattttctgataaatctgctggaaaatcatttgacagaggatgcccagaaaagtacctatgataaaatctttcggacgaaaagcggcaaaaaccttttccggttgctttatccctgtatgcagcaaaaaacagtataattttgtaaaaaacaaaaaaggcgttcggatttttccgaacgcctttttgcaagcattgttactgattactgatgaatcacatcaatgatatgtttcgcccaatttttgatatcggaaatgctttcatcagtgactttagagccgaacaggccggattttaccggtaccagatggggctcatcaacaacgttgatattgttggagcggataatgttagccagttctttggccgcctctacgccgcctttggtagtagcgccgaacgcaacgttctggcatctggtgttatccaggttccggcagaagtccaccaaggcctttttcggcttcgaagcaccgtcatcgatgcagaccaggatcagcttttcattttcaaccgggtatgcaggcgggatctgatccgcttttacgcggtactcgcgggaaagctgttccatcagttcttctgcgacaccctctgttttaaagaagaatacgcgcattttaaagttcatcttttataacctccaataatttccgtactcgccgcaatactttgtcccatactcaacaatacaaggaaaacggcgcataagtttattttacaacagatagaaacccaatttcaagtggcatttcctacgataagcgtaaataatttatgaacaccaaaaacaaatcgcagataaatggaaaaattttaaggatctttggccaaatccgttcttctcctatacagaaagggaggaatctgctataataaaaaatattgaccccgtacaaatttgtgcaatgatacgaatttcaagcggataagctgccgctgatcttattgatgggaaaggaaaaaagcaatggcaaatgcaaggaacttaaccactctggccgttaaactggggatgcggtattacgaagaacaaaaccttgtgttcggcaagctggctggatatgagtgcgccgtccgggagcagccggacaaaaaaatgatgatggttcatatggtggctaagcctgacaaatcagaggatgccagtatggaacggctgctggggcaacttcagcaggaaaacccggcggtgaccgcggctgtctacgaaaatttcactgccagcctgcggttaaatacggtaaaagaagaagagccgcttcagcaggcggaaaacctgctgcgccaaattgcagattttgcccaaaaagaaaattaccatccctgttgcagcgggtgcggaaaaacaaaggatgtacggcgctttttgctcgacggagacgccagaatgctctgccctgcctgccgcgccaaggcggaagccggtctgaccgatcagtggcagagaaagaaatttcagcatcacagcgcactgaaaggttttatcgtcgttttggtgatcctgctcatcggcgctactgcctgggtaggtgtttacaccagcggtcactctgctgtgctgattggcgtggcaatgacagtcttaagcttttgggggtaccagcatatggccggacgtatgaaaaaaggcagcgtgattggcatactgctgggacttttggccactgtgtttttctgccataatctctgtgtggcttttgagctggttgtcgccatcggtcagcagcaggaaattaccattaccagcgcgctgatgtttattcccactttcttaaaggacccgatcaatcgggaggtttattttttgcagctggggctttccgtattggcagtggcactggcagcagcacctatgctgtggtttgtccactattcctggcaccataaagagcggttggaatctctggaggagccgactgcataggatcataacattacaaaggaggttgttttcatgaaactcattggaatcgatcattttgcaaatttcgcttttttaaaccacctgaaggtcagcgatggcgggaaagcggcctttttgatcaaaagggcaaatctggaggaaaacggctatgattcggacctgtacctctggcgagacggtcagccggtccagctgaccgataccgggaaggtttcggacttttactgggtaggggaggaaatttatttcccggctatccggaagaaagccgaccaggaatatatcaaaaaaaggctgcctctaacggtattctatcgcctccctttaaccggaggtgaagcggtagaggctttccgcgttaaggaaaaaatcaaatcggtgaaatttatttcgccggatgagttctactttgtggccgattatgaccccaaagcagaatgggctctggaaacagccggcggcaatacagacgaggcggctgcgctgctaaaagaggaagcggattatactgttttcgatcaactgccgttctggtcaaacggagtgggcataaccaatggccatcgggaccggctgtattattatcggaatggagaagtgaccgccattaccgaccgctataccaatgtaaaggactggaaacttctagaaaatggcaaccgggtactattcatctccaatcgctttgaacagaaaaaagaaacgcctactcagcttaaattatacgaaaaatccaccggttccattactgatgtgtcgatggaaacgccattctcccacagcatgattaccctgttaagcggcgacgaaattcttctgctgggctctgaccaaaagctatatggactgaaccaggacccgaatttttatcgctacaatatccgaaccggagaacgaaaggtgctggatgaaagccacatgcacgctaccggctgttcggtgggcagcgatgtaaaaatgagcaatatttcctcgccttggtattacgacgggaaagacactgtctattttaccgaaacggtggatgacagctgccagctggctgccattgacctgaaaaaaggagagatccgccatatcacccgggaaaaaggtatggttgttgaatttgcaccgtatgaaaaagggtttctgaccctctgtatcagaggcaacgacggcatcgagctgtatcgcactgaactatctggcaagcagacgcagctgacccatttgaatacccatctgaccgaagagtacaccatctccacgccggaagagctgaccttccaaaacgaagcgggagacgagatcaaaggctggattatcaaaccggtaggttttgatgacagcaaaaaatatccggtgattctggacatccacggcggccccaaaacggcctatggaccaaactttttccatgaaatgcagtattgggccaacttgggctatggtgttattttctgcaatcccactggctccgacggaaggggtactaagttctctgatatccgtggcaaatatggtaccattgactataacgatattatgacttttgtggatgtctgcctggaaaaatccccttggatggatgcagcgcgcatgggggttaccggcggcagctacggtggttttatgacaaactggatcatcggtcataccgatcggttccgttgcgccgcctctcagcgcagcatttccaactgggtatctaaatccaataccaccgatattggctactattttaataaggaccagattggcaccgatgcttgggacgatcacgacaaaatctggtggcattcgccgctcaaatacgccaatcaatgcaaaacgcccaccttgtttatccatagcgacgaggattaccgctgctggatggcggaagggcttcagatgtactatgcactcaagtatttcggtgttgacgctaggatgtgcctattcaaaggcgaaaatcatgaattgagccgcagcggcaaaccgctgcaccgaatccgccgcctgaaagaaatcacccagtggtttgaccgatatctgaaagattaatcaggattctaccaaaaaatgcgccttgtttagacagggcgcattttttgaacagaaacagtctgttatttttcgttgcttgcggcaacggcgtaccggatgatacaatacggtcaaaaaggaggggatttttatgatacaggaaaatctaaaggtgctacgcctgaaaaagggaatgtctcaagaggagctggcagtgcggattcatgtcgtacgtcaaactgtctccaaatgggaaaaagggctttcagtgccggacgcacaaacactgattcagattgcgcaggccttggaagtaccggttccagcgtttttgggcgaaacaatccaggcggaaaaagaggaggacacgctgcaaataatggcaaaaaagctggaggaaatcaacacttgtctagcggaacggtccgctcgtactcgccgcagaatccggactattgcgattgttatgatccttttggcttttgccggaatcgttctccttctgcttttttctaccggattgctgcatcagccgccttcgggtcccaatgtaatcggcggagcagatggggctaccggcattctgatagtcggtaccaaccggtttgcgttcggcgtgggaatggcagtttgtatctgcgcacttatcgccggcggaattttattgcaccgatcaaaacggctgcttttttgcgtatctgggcgttatgacagctgatcctttttacacgccaatatttgcagacgttttcatccatcttaccgtgccttttcaaaaaacaattctactttgagaatttttctgcaaaaaaacttttttaaaattgttgttttatctatcagttttttttatactgttatcgagcggactgcttgcaaaatcctgttttgagggaggagccttcatatgaaccgaaagctgcgcgattttcttttgatgaccggcggcaccgttttggtagccattggcctgtactactttaaaatgcccaaccacttttccaccggcggcgtatctggtatttctattatcctcggtgctctgattccaggattgtccactggtacgatcaactttctcatcaacatgctgcttcttttgctgggctttttggtattcggcagaggatttggtgccaaaaccgcttatgccagcgccttgatgtccagcattgtctgggtgctggaacgggtgcagccaatggatgctccttttaccgacgagccgttgctggagcttttctttgccgtcggcctgccggcggtgggttccgcgattctttttaatatcggtgcgtctaccggaggaactgatatcattgccatgattgtaaaaaaatacagcagcgttgacattggcaaagcgctctttatcagtgactgtgtcatcgtgatcactgcctgtatcgtttttggtatgcagacgggtctgttctccattatggggctggtactgaagacacaggtggtagatatggtgattgaatcaatcaacctatccaaattttttacgattattaccagcaatccggaaccgattgtcaaatatatcaatgaaaccctcaaacggggtgccacaatcgaagtggcagaaggttcttacagccatcaaaaacgctacattattcttactgctacccggcggcaccaggcagtagcccttcgcgtttatgcccgacaaatggatccccatgcgtttatgatgattaccaactccagcgaaatcatcggcaaaggtttcagtgagcattgattccccttccagatgataacggggttccccctttcagtcatatatcataccttagaaaaagcttcggggatcgaagctttttcttttttccggtgtttttttatgttatactaaaagtaccatccagattggaaaaaaggttctatccacaggatggtaccttttttactttttaaccgactctacccggaaaaggaggagaactatagagatgccttttgaaggagaactgccattgtaccaacaacttgtggaattgctgaaagaagaaattcatgtgggcaggtataaacaaggacaaaaactgcctaccgaactggaattgtgtaagctgtaccacgtcagccgcaacacagtgcgcagcgccttgcaacagttggaaaaagagaatctgctattgcggcaacagggaaagggaacttttgtcagcaaaaaaaagtacaatcaccatattgtccctgctcgcagttttaccgatatgtgtcgggaaatcggctgcaaacctgatgccaaggtaattaagtcggtcatcaaagacccttctgaggcagatgttgtttttctggatctgcgcccggaggcgaaaattatcgccattgagcgcatccgatacactgacggcgtaccggtcgaactggagatctctcattttccggagtccttttcttttttgctcgacgaggatctgaaccattgctctatgctggaacttctgagggaaaaatatggaatctggtttaccaagtcccgcatttcgctggaagtcacttttgcttcttacgaaatgtctcactatttatccgttcagaaagactatccccttttgttgatcaacagtgaactcagcgatcaaaacggaatgcccagttgccggtgtgtccaatatgtagtcggagacaagttcaagatgatcttgtaactctggatgcggcctgcgttcactgaacaaaaagcacataaaactttatatgccgacacacccgcaatgacatgaaaatcggatggcagatgaagctttacgcatgtgaaccctgccggttcatagcgttgtaatgttatgaccgtgtcgccccaagcggcacatggccgtttttactttacttttgcataaccaaacaatgacgattcgtcatcaaaatattgactattggtcaatattcggatatactgtactggacacggacggacaatggagggatatatgaaatatcaactgatcttacaaagccagaaggacttttttcatagcggcgctactttgccagttccctatcgtttagaagtgctttctttgctggagggcgctatacaaaaccggcaggaacaaattgaatccgcgctggccgaagacctgggaaaatcccaacaagaggcctattctactgaaattgcaatcgttttaagtgaactgcgccatgcaaagcggcatttaaatagctgggcccgaagcaaaagagtaccggttcctttgagccattggcccggtcgtcagcaggtcacaccggtcccttatggatcagtactgattctggcgccatggaactatccgttccagttgtgcctttccccattaatcagtgcactggccgcgggaaactgcgcagtcgtcaaaccttccgaactggcgggacggacggctttggtcatttgtgcgttgctggaagagctgttctcccccgaatacgtttcggtctgcctgggtgaatctgacaccgccgcagcgttgacagcactgccttttgacaaaattttttttactggcagcggcacagtcggaaaaaaggtcttatccgctgctgctgtcaacctgaccccggtcacactggaattgggtggaaaaagcccttgtatcgtggattcttccgcagatttgaaaacggcggcccggcgaattatgtgggggaaaattctcaattgcgggcagacctgtgtggcgccggattatgtcctggttcaacggtcggtgcaggaaacgtttatcctgcaatgccggatggctttggaggaattcctcggagtaaatccgttggccagtccggattacgggcatattatcaacagtgctcactatcatcgtctgctgggacttttggaagggtgtcaaatctgcttcggtcgtgagatagacccgcagcatctgaggctgtctcctactttggtggacaatcccagccttgacgcaccaattatgcaggaggaaatcttcggtccgattttaccggtgcttccctttgatcgtttggaaggcgccgtccaaatcgtgcagaaccaccccaacccgctggccgcctatttcttctcccggaacaagcaggctttgagggaaatgaaaaaggctttttcttacggaagctgctgtatcaacgatacggtactgcatctggcttctccttacttgccttttggcggtatcggtcaaagcggtatgggaaaaagtcatggaaaatacgggtttttgactttttcccatttgcaggggtgttaccagcggtacgggcggatagaaccatcttttcggtatcctccttataccgaaaaaaagctggcttgggtaaaaaaagcaatgtatttgttttaattttaacagtttttatccgtatattttttaacaattccacattttgcacaaaaggtaagagccttttgccgttactcttccgaaaatgtccagcttttccaaatttgacgcggattttattgttttttctccctatctcctgtaaaatgttaacttggagatatctggtgctcttttttcagatagtcgccctgctaaacaggcgatgtctctacttttgaaatcaaatcaaagcgtggtgataaaatgggacaggatacgattcaggcaatccgagatgcagaacaaaaggcggatcaaatcgaacagcaatcggcggcagagtgcgtttctcttttggcgcaggcacgcagccaagcaaaaacagaaacggcagaagcgctggccaacgcccgtgcggacagtcgtcagattttgcagcaggcgcgccagaaatcggatgaaacgctggcgcaggcggttgttgatgcggaatccgaaattcggatcatgcgtgaaactgcggcggccaaaaaagaggaagccattcggataatcctatccgaactgatttagtattctacgattgattctgaaaggaggcctcttatactatggcggtactgcagatgaaacgtattaacatctgtgcattgaaaaaagaccgcaaaccggtactggagctgttgcagcggcgcggtgcggttgaagtggattcggttttgcccgaggacagtgtgttttcccgcactgatacttccgccaaccgttctgtttttcaaaaaaacatcaccgctgccgcgtctgcgttggagattttgggccaatacgcgccggagaaaaaatccatgttcgcctcgttagaggggcgtgaattaaaaaccggacgggattatgatgcgtttgcccaaaaatacgacacagtcatggaaaatgtttatcagatcacggcgctgtcccgctctattgcggaaaacaaatcggaaatcaccaaactggaaggccaggtggaagcgttgcaaccctggcttgggttagagctttccatgcgctttaaaggcactggccggacccgtgcttttattggcaccttaccgggcgatatggatctggaaaccatactgaccgggctggcccagcaaaatccagagctgccccctgtccacgtgcaggtagtcagttcctctcaaaaccagacctgcgtatttgtcctttgtcacaaggacggcgccacacaggttgaggaggcgctgcgcagtatcggttttgctcagccttccaaccctaccaagcattctcccgctcagcgcaagcaggaattggatgagcggattgccgaagcgcaggacgaaatcgatcaggcagaaaagaaaattctcgcccttgccgatcagcgggcggatatccaatttgcgattgattatttcaccatgcgttcggagaaatatgaggtcatcagcgaacttgtccagtccaaacggacatttgtcctcaccggatacattctggccaaaaaagcagatgctttgaaagccgaattggaaaaacgatttgatctcgcggtagaacttgccgactgcgatcccgctgttgatccccccattatgctgcaaaacaaccctttctccgcgccggtagaaggcgtactcgaatccttcggcctgccaggccgcggagaggtggacccctgcacagtcatgtctgttttctactatgtactgtttggactgatgttgtccgatgcggcctatggccttttgatggtaatcggctgcggatttgcactgttaaagttcaaaaacatggaaagcggtatgcgtaaaaccctgcagatgtttttctactgcggaatctctactacattctggggcttcatgttcggcagcttttttggcgatctggtaggtgttgtggctactacctttttcggccgtccagatatcgctttaggacccatctggtttgaaccggttaaggaaccaatgcggatgctggtattttctatgctcatgggaatcatccatctgtttgccggccttgctatgaaagcatatcaatacgccaaacaaaaagcctggctggatattttatacgatgtgggcttttggtatatgctgctgacaggactggttgtattcgctctctccaatcagatgtttgtgggcattttacaactgagttttattctgccggttttggcaggcaccatcggtatcgctgtggcgggcattggcgcagtcggcattttgctcaccgcaggccgggaatcccgcagccctttcaaacggcttttaaaaggcgcttacggattgtatggcgtaacaggctatctgtctgacattctttcttattcccgactgctggctttgggcctggctaccggcgttatcgccactgtagtcaactctatgggcagcatgttgggcggcggtatcgtcggcgccattgtatttattctggtgttttttgtcggccatacgctgaatctggccattaacctgctgggtgcgtatgttcacaccaaccgactgcagttcgtcgagtttttcggtaagttttatgagggaggcggcagggcgttccggccgtttgccgttcatacacaatattacaatatcaaggaggacttttaacatgaataacctgggtattattttcgcactcgcaggagctatcatctctgctttggtggctggcattggttcggcaaaagcggttggtatgtgcggtgaggccgctgccggcgtctgtagcgatgacccctctaaattcggtaaagtactgattctgcagctgctgcccggtacacagggtatctacggcttgctgattgctttcatcaccctgtctcagattggtatcctcggcggttccgcagatctgagctggcagaaaggcctcttgtacttcctcggctgtctgcccatggctattgtcggttacctgtcggcaattaagcagggtaaggccgctatctccggtatttctttggttgccaaacgtcctgaccagtcttctaaagctattatcttcgctgcgatggtcgagacctacgcaattctggcgctgctggtttccatcctggctgtttccggtatcggcagcctgaatatctaatcggcttgccttatgaaacaaaatccgaatacgataataaggagagccggcatatgacaggattagagaaaatcatcacccaaatcattgacgacgccaaagccaacgcccaaaaagccaaggctgcggcggaagaagaagcgtccaagatcctggcgtcggcaaaaacacaacgagaagaacaggtggcacagatccaggcggacacacaggcgcaggtagcggcaatcggcgctcatgcgcagtctggggccaagctcaaacagcggcaaacgctgttgtccgcaaaacagcagctgatctgtgagatcatccagtccgcaaaggattctctcctggaactggacgatggggcttatttccgcttgatctttcaaatggccgccaaattcgctttgccccagcagggcaagctgattttaaacgaaaaagatctcggccgcgcgcccaaggattttaacgcgcagctggaagcggcggtgaaagcaattcccggcgcagctctttcgttgtccgacagcacccgtcccatcgacggtggatttgtgctggattacgatggaatcgaagaaaactgttcgttcgacgcattgttttactccagccaggaggatttgcaggataaagttcaggaacttctgttccaataaggaggttggatcatggcgaaacccgattatatctatgcggtagcccgaatccgcgccaaggagcttttgtgctttggctcccccgcaatggaacagctgatggcctgcaaaacttatgaagaatgcctgcgcatgctcaacgaaaaaggttgggggaacggctccgccggccaaacaccggaatcccttctggacggcgagcgcaataagacctgggagcagttgcgggaactggtagaagatatgagcgtttttgacgtatttttgtacgccaatgactatcataacctcaaagcggcgatcaaggaaaactatgcgccctcccacggggcggatatctacagctccaacggaaccatcgacccagcagttttccgtcaggcagcagatgggcatgatttttctgttcttcctgccgggatgcgcgatgccgcggaagaagcaatgagcgttctgcgggaaaccggcgacggtcagctttgcgatattatcatcgacaaagctgcgctgaatgcgattttgcaggccggcaaagcttcgggcgatccgctgctggcattttatgcggaacacacc

SEQ ID NO: 3953 - DNA, 17223 bp, Unknown
  16S sequences of unknown bacteria
ttttccgcggcggggggataaagaccgtcgacggaaagaaaaccccgaaaaaacgcggcggcaaggcttcgcttcataagggtgcgcgggtttgaaaaagccgcgcttacaaagacttcccgttctctcccttgcgcgaaaaggcgcgaaggggaacggatcactgacaggaggcaggatttataaaatgaaaaaatcgataaaaaggatagcgatctcgctgtgttcggtgttcgtaatcgccgcggcggcaggctgcggcggcgacggcggcaagaacaaggacggcaagaccaccatcgaattctggggctggggggactatatcgaggtggacgtgttcaaatctctggtcaacacgttcaacgacgcgcacgacgatattttcgtcaactttacgccgaggcccagcagcacctattcggtggatacgctcaaacagcttcaatcccgccgtccgcccgacgtcgtattcgtcggggacagcgacatcaaaaaatgggcgtcctcggaaatagacgttttggaggatttgactccctacgtcgaaaagagcgacgtcatcgatctcgacgacatctgggaaggacagatggcgagattcgtgttcgatcaggaaacattcgaaaattccgcggacgcgccgatctgggggcttcccaaggatttaggcgcgacggtcatctactataacgcggacgcgattaagaaggcgggcatcaccatcgtcgaaggcaagacggcagacgaagtccccgcggacgaggcgaaaggattttacgtcaaagacggaaaaatgtatttcaataactccattcccatgacgcagactcagctcgtcgaaatgggaaaggtgctcaccaaggaccaaaacccctccgcgcccaccgatttcggctattactgccaatggtggtttaatttcggctggtcggtcggcggcgacgacgtcgcctatatggaaacggacgaccccgcctataagggcggatattacgaattcgtcctcaacgacaaagcgcccaactatcgggtgaaagagggcgaaacactttccgtgaacggcaccgcttatcagggcggtgaactgatttcctatcacgacagggcgaagctcacggcggagcaaaagggacaatgcaacgagcttgcaagcatccgcgaagtgttcgatttctgggtgtctttggcgacggggaaagacgcttcgggcaaggagaacggcaataaaatttctcccaatcccaacgacaatatcgacagcaccatgtttaccaatcagcggctcgccatgtacgtggagggaagatatatggtccccgagttcagaagggactgtaaattcaattgggacgtcgcgcctctcgccctttgggaaggcggcgtggaagcgggacacagcggctccatgtgcatctccatgtccaaaaacagcaagaacaaggacgcggcgttcgaactcatcgagtacctttcgggtcccgagggacaaaaggaactgatgaagacgggctttaacgtccccaatcagaaatcgatcgcccgcagcgacgcgtttctcgtcagcgatcagcccccttacaacaacgcggtgttcgtgcgcgcggcggaggtgcagcggggcggcgactggacgtatcttcccgacgacgcctggatcgaggaatgggcgcccactttgaacggcgacgttttaaacggcgtcgtcaccgtggatcagctgtttgcccgctatacggctaccgtgaacaacaaactcaaaacgtatacgcaggtcaaaaacaaataaaggcgaaagcggacttgcgtttccctgaggaaacgcgcgccttgaaggccgccgcgggcagacgcggcaaaattttctcgccgccttccgcccctttgttcgctcccgtaaaggaacgaaaagaggggaggcgcgcaaagcgttttacggacggaaagggcggcgcggcggaaaagcgattttgcggaaaaagagaggcgcgggtcggcttttccaaaaaggaagtccccggcggaaaagaacgcctttgcgccgcctgaaaggggcgcgcgaaaatacgcgcccttttgaaggaaacgttttgtgaacgcgcaagtcggtctgagtccgcgaggaataggaggaggggtatcacgatggaaaaaatcattcaaaaaattcccaaaagattcaaatcccgtaaaacgatgttcggggaaaacttctgggggatactgatggcgtcggtgcctttgatcggggcgtttttcttcatgctgattccgctcgtattttcgctgattttaagcttttgctccatgaagggctttgatcccgcaagcatcgaatttttgggcgctaagcatttgttcgacaattacgtctatatcttcaaggacggtctgttttggaaatcggtgggaaacaccttttacgccgttctttccctgcctctgtccatggcgatcgcgctggcgctttcggtggtcatgaattcagagctgaaaggcaagacgattttcaggacgatcttctttttgccctatgtctgttcggtcgtcgccctcacgaatatgtggaggctgatgctggacacgaactacgggattttaaacgagtttctcgggattttcggcgtcgataaaatcaattggctgtccaacgaaaagacgtatatgcccgccatgatcattatgggcgcgtggacgagtctgggcttcaatatcattttgttctccgcggcgctcacgggcgtatcgaaatcctattacgaagcggcgaggatagacggcgcgggaaaattcgcgcagttccgttccatcacgctgcccttgatctctcccacgaccttttatctgctcgtgatggggctgatcggcgggattcaggactttacgcgctttcaggcgatcagtttcggggaaacgggacccaacaacgcgggtcttacgatggtgttctatctctatcaacagggattcaccaataattacacctacgggatgggctttgccgccgccacttcatgggtagtggcgctcctcattctcgggctgacggtcgtcaatttcaaggtttccaaaaagtgggtgcattatgactgaaacgaaaaaattgcggaacaaaagtttctccgtagtgggaaagatcgtcaagtattgcattctctccttggcggctctgaccatcctcattcccttttacgtcatcgtcatcaccgctttcaaggcgtcgcacgccgtcgctacgcacatcccgtttatctggtttcccaagttcgacgagctttctttccgcgccttcggcaatctgtttacgacatacacaatatcgacggggaagagcatggtgctcacgggtatcatcaatacctttatcatcgtcattcccaataccgtcgtcggcatgatctcttccagcgtttctgcctacgcctttgccaagctgaaattcaaaggcaagaatctgatgttcgcgctgctgctgttcacgatgatgcttcccggcatcgtcatgctcattccttcctatatccttttcgacgcgctctatctcacggatacgtactttcccctgatggcgcccgccatgttcggttcggcggcgtgcgtgttctttttgcggcagttcttttcggggattcccgacgaggtcatcgacgcggcgaagctggacggtctgagctatccgggcatctattggaaaatcatgctgcccctgtccctgcccgcggtctttgcgcaggcaatcctcggtttcgtggcggggtataacgactatctcgcgcccctcatctatctcacgtcgcccgaaaaatacaccttgcagatcgctttgcaatttttcagcggcagcaccttgaaggatctgcccaccgtcatggcgggcgccgtgctcgccctgcttcccacgacgttgatttacgtcttcgcgcaaaaatatttcgtcgaaggcatcgccattacgggtttgaaagggtaacgcgtatcccgccgcgcccgcgctttttcgcgtcgtccgggttttccccgcgcttccaaaaagccgtgtttgcgcctcggtgcgagcggttttttgaaaacgactgcggacgagtgccgcttaggcagcgggagatgagaaacttataaacaacatgacttttgcgctgtgtgaacacgctctgaaacgcccccggaagaacagcctcgttcgggggcgtttttgccgcatcggagattttcgggaacgggaaacggacattcttcccgcaatttccctcggcggaggaaaagagcgcgtttgcttcctgcgcggcgggtaaaaagactgaaaagggtcggcaaagaaaaagaaaaaggaggaaaaacgcatttttcaaaagccgctcggtcccttgtccttttaacgttctccccgtcggcgtttcaaagccgtcttcaagggcgattcgcgttctccccgtcggcgtttcaaagccgtcttcaagggcgattggcgctttttcctcgcgcgaaaggtcgtttccgtccttctaaggaacggggaaagtaggattcgccgccttgtccgcacgccggagaaaaccgttttcaaaactttgtccgcgagcctttttttaaagccgcccgatgcaaaaggaactacgggagcgcgcaaagccgctccgcccccgcaaaaagaattgccggggattgaaattcgtttggcgccgcgaaagggaaaaaggggaaacggcgggaagcccgcttagcgccgcaaaagaaaaaattgcggacgcttcctgaaatcgccttgccgccgcaaaaagagcagactgccggttctttataaagccgcttcgctttcaaaatgtaaattgcgattgtaaagaaaaattagcaaaaggaacttaaaatagttgacaactgcattttaatcgattataattgtatatataatcaatattatcgattgaagtttggaggtaactacatgaaaaagagcaaaaagatcgttttgactcttatggctttcggccttgccgtatcgctgtatgcgtgcgggacgaagatcaccgattcctccgtttcgggcggcggaagttcgagcgacgcgagttcgtccgcggattcttcgacggactcctcgacggattcttcgacggattcttcgacggatgcaaactcttcttccgactcgcaaacctcggatagttcagacgacagttcggcggaaccggacgtacccgtggacgtgggcgcctttgcgcggcaagtctgggtgggaaaggacggaacgctggattttgcggcgggtaccctgacgggaacgacggcgtttaaggtgacgggcatttccggcgagaaggcggaaacggagatccgcgccaccgcggacgggaacgattacatattcaaactcaacgaggcgggcgcgctggaaatgtacgcctccgcaacggctgcggaggaagggagcgctcccttaaagacctttatggccgacgcttcctccttcggcggagcgtggtgggcaaaggggtacggatattatgtcatttcctcggtgcccgatgaggaaggctttttcgggtggaatatttacggcttggacggagaggcatacgacgagccgtccgcggcggtgacgaagttcgccttcgacgaagagggagaagcgcaggtttccttttatgcggacagctgggggtacacctacttttacgaggacggagttccttatatgctggacacctacgggtatacggacgaaatagaggcgtattccgccgtgttcaaagattcctatttaagcgaggcgggggataagattctcctcgacgcggcggcgggaaagctcactttcaacggcacggaaaccgagtacgccgcgggctacggcgcatacggcgcggggctttcgtttacggcgggcggaaaggaatattctctgatctatatgctcaaaggcgcgtatgcgttcgcggaaggggagtcggctctgtatgcggattataatcccgagcggatcaagggagcctggtcgaactcttcgggggcgttcacgatttccgtggacgccgacgacaagatttcttttaacgaaagcgaatatccgctcaaagcgtacgcgaaagacggagaagtgctgtacgatttcacggtgaacgaagtattgtatacaatccgtccgatcgcggatgtggacgtggcgttttcgctggaaacggaggcggtgcgctatcagggatattacgtgctcgacgaagtcaaaaaatcctacgtcgcggagtatacgaataacgtggaaagccttgtcgtggacgaggattacttcatcacggtcacctctcttctcgacgcggctgcggagcccgccacttatcaaggctccttcacctatgtgcccgaacttcaatgcgtggcgctcgtctacggcggcaacgcggcgacgatgaaaaactatctggtactcgtggaagacgcgggcatttattggtcgctcgtaaaatcgggaagctcctatgcggtatattcgagctattatcttttggagcttgttcccgaagtggaaaagctgttcaatgcgggattgacggacgaagcctccgacttttatacgacgggcggcaccgatcccgaatctatcagcttcaatttcgcggagggcacggtagtctggaacggttctccctatcgctttatctggaattacgaaacgaacgaaatgggcagcgcctatccctccgtcgttttcctcacggatattcaaacggacgcggacggaaacgccgtcagctataactatcactctatccgcattttcgatcaagggctgcaaatgtccaccttcaacaccgcttcccaggaggacgacagcacgtatgcctactatatttccgactccgtttttcaggatattctcggactctctttcacctatcgcggcgaatattacgacgaaacgatgattctgaacgaagacggcagtttttccatcgcgactacggacaaaacgaactccgacgccgccgtttccatggccacgtatccctatttcctccaacgattctttgatacggaaggaagggaaaatatcatcgtcggattcaattcctcgggcactctctatatttacgcgtatattgtggacagagagttcggaagggtattcgatatcgtttacagcgccgacgacgttctggattttatcggcacctattacgcgggaaccgactccgtcgaatttacgcgggacgcaggcgtcaaagtcaacggtacggctgcaaaggtcacgaatgtgacgaaaacgccttcctccgtcacgctgacgtatacgcacgaaacgacggaatacacggcggtgttttccggcgatacggcgacggttactgccgcgggcgccgacgccgtgatttataccaaaaacgaatttacgcgcgaggcgttcgtgggaacgtacagcttcaacggaaaagagatcgtcgtttcctcctcggcggtgggaataaactccgcgcctgcgttgaaagtgactgtggacggcgcggcggttacggcgcagctcgctttcacggcggacggcaaacagcagctttctttctcgaccctcgattttgcgacatttacgaccactgaatacacctttattttagacggcgaaacgctgacgatttccgacggcacaaacaccgcgacgaaagccgcggcgaagtgggactattccaaattcgtctttgaagggacgaagacgctgacggatacggcgggcgcgacgcatacgctggtatgtctgcccaagaacggcggaaaaacgcccctgttcctgtacgacggcaacgaaagcgctatgtacgacgtgacgatcgccgcggacggctcgatgatcctggaagtgaccagcgcgggcaccaccttgcagatcaaggtagccgcggacggcaccgtgacggcggattataaaccgagcgacattcctctgccgcccccgcctcctcccgcaccgtaaaagcgcgcggcgaaaaaggaccgggactaagagagggaacggtcgattctgtgccctgtaaaattaaaaaaagccgtggacattcccccgtttctatgcaaggacgacgggggaaattgtcgttaaaaaggcgcaaagcggctgcgcggcgcgctcataattgttaggacctgtaaagttccgattcgtcaaaagcgcggaaaaggagtaggacaggcaggggacagatctccgaagggacttttgatagacgcggaaaggggcaaaagggtttcccgcgatggttccgccgcgcaatcggcaggggacaaaaagcgggaaaaaagaaaaaaggaacgagcgtcctatcgctattcttattcagatagttgccgaaaagaaaaaggaacgggatagccgcggacgttatgccgcggaaggatattacagacaaagacaggggaatggctttcgccgttttcttcgtctatggattctgcaaaaacggcggcgataaaaaacaggtacgagggaaaaacagggggcgcaagccttcgtagtacgttcgcgaaattttcctgcgtttccgccgcgaagcgccttgcggaggaagagaaggggcaaagcgttttcagggagggggtatgctctctaacggtttgtcttcggcgccttacggctttttctcctctcagggggagtaagaaacggcttattcgaaagctatttcttaaaatgcgtttaaacggcgtttattttcgacgtatgcaaaaaagaaacgcagtccgagggagaactcggactgcgtttttaaactctttaaaacgcgtttaaacgaacgtttttattttttctttttttcctcttcggctttgcgggcttcttcttcggccttgcgggcgcggtagtctttatagcccaccttatggttgtcgccctcgtcccattttttgccgcccgtcgccaatacggaaaagagtcccgcaacggcgatgatcaccgcaatgataggccagatataatttttcggaagtttaagcgcgaaaatgacgctgacaaccgcgatgatcaaaagggctgcgccccaaaagaggtcggactttttaagcacgcccgtctttttcgcaaacagaccgcgaagcagcagggcaagcccgcccgttccgcagatgacgaccaccatccaattgagattgaaaaatccgaatttatcgggaagaatgacggataacagccacaaaacggcggctgccagccatgccagcgccatcagaaatttagtgaagaagtgtttactcataattttccattcctttaaggtgtatttgtcctcgcgccgccgcaaaaacgtctgtgtttttgccaaaaaagccgaatctcggacaggatgaattttaaaaacgcaaagagccgacctcaaagagagtccccgcattttttaagaggaacctcgcctaaaaaacggcgccatgcctttttaagagaattttcgcccggcgagcgcgctgcgtgtttagcgatacgctctccccgaagcaattaaaattatttcttaactccgcaaaagacgcttgctgcctttaaaagcgcccgtctgacgatagcgagcggtacgccgcattcggtcttctcgcgcggcgggttttgtctgcgcctttttaaatcgcccgtctgactaactgtgcttattttcttctgtcaaacttatgcaaacgatatgcgggcgtttcgaagaccgtcgaaagaggggggtcagcgcaaaatgaccgtcgcggaaaccgcgcagacttcctcgccttcgcccaaaaccacttcgtcgccgtgcacgaaattttttacgagtcccccgacgcggagtttgaaattcctgtccccgccgttggcggaaagggcggtatagacgcccggcagaagcttgccgcccttttcggcgcggtagacttcgttccttgccaggataaagtcgttcggcagatgggtgacgttcatgccttccggatcggcaatcgcgtcgtcctcggaatagcggacgcccccgacgatttttactttcgccgcgcgttcctcccccgattccgcctgctttttgatgctgcggagtttgagcgcaagcgccagaagcgcgatgaggaaaatacccgcgcagatagccaatacgagaataacgacgtctttcggctgcataaattttttctccttgattcgtttggtttggataccgcttcggccctgcaacgagaatccgaaggaaagggcgcgccttcaagccgtcccgatttctttgttccttttcgggctttgcacgatggataaggatgagcggcttaatttcaggcggacagaaaatagacgagcagaccgactgctacggcgaccgcgacgcctatcgccgcggcgattgccgcctttacgggggaaacgggcgctttgcccttcactttgccgctcctgccgtttatgtagaaggaataggtcttgctttcgtgcgtatagttgcccgtatacatgggcagcaacatatatttgtaggtgacgcgggagtaggaagtgctcacgttgagatactgcaccacgtcgtagcgatactgcgagaggatctgtccgcggagcgcgctctccgcttccgcgcgcgcgtcctgccagcacgcctcgccgctcttcgaatacagaagcgccgaaaagccgtagagaaaatcgtcgtcgtatgccacgctgttgtgataatcgtagcgcatcagcgtgttcatcacgctttgaggcacggtgtccgtggcgttgacggcgatatcgtcgaaaaattgctgataggtgccgttcacggaaaaatagcgggtgcgctgtttgcgaacctccttgccgttctctctcgccgtgacgtaataatgctcccccaatctgccctgatagacggactgagtatccgcatcgaaggtgaaagcgggaagatatacgccgctcagattttcggggcgaaaatacgtcttgaaggatttgggcgcaaacagttttttcttcgcccaggcgacggctgtttcggaggccttgtctttgccgatgagaaagggcagcagcgcgttggggcggagggtgtcgatctcctcccgctccacgacggagggggagccgcagaaaggacagatatgcgcgatctcccgcttatccagcacctcctcggcgttgcagttggaacaatggtatacgtgcgtttcgttctgccagccgcctctcgccgcgcaaagccccgcgaaggcgagttcctgtcccgcctgcgcgagaatttgtttcgtcgtcccgcagctggggcatttgagccgccccgattcgggatcgaattgcagattgtccccgcagcccggacatttctctccgctgacggccgtctgctccttttcggagttctcgaaaactacgtcttttaaggaatccatctctcatacctcgattccgccgttttccgacgtttttcgatccgtcgggaaagttgccgctttcgcggaggaaagattttgataccctgcgtttgcgcgggaaggggaaaacttatttcaccttttcgccgcactcgggacagaacttggcgttcgggttgagtttcgcgccgcacttggaacagacgatcgaagtgggagcgccgcattcgggacagaatttcgcgcccggaacgagcgccgcgccgcattttgcgcacgtgcccgccgcctgaatttttgtgccgcatttcgtgcagaatttggcgtccgcggcaatctgcgtgccgcatttgggacagggtttggtcgccgccgcggtctgcgccgcgttgacgtttatgccgttcgacgcgctcatgcccatgccgttcatcgtgcgcatcatctgcgcgcccatgccgagcccgatccccgcgctcatcgtgctgcccgccatacccggatttttcgccgcgtctttgagcgcgtccgcctgcgccagctgcgtatatacgtccacgttgcggcggagcattcccagccgggcgctttcgtccatcgctttttccaattccgcgggaagggaaacgttttcgaaattgaagtcggaaagttccagacccatttcctcgaaacgcttatcgagggattttttgaccgcgtccgaaagctccatgaggttcgccgccatatcgaccacggaaatgccgctctcgcccatcgcgtcggagatcgccatcacgagcatacttctgatgtggtcggtgatgtcctccgtcctgaaagtggagtgagagccggaaagctcggtcatgaaaacgtaagcgtccttgacgcggaaagaatacgtgccgtagccgcgcacgcgcaccgcgccgaaatcgggatcgcggagcataatgggattggccgtgccccagcgctgtttggcaaaacgggcggtgttgacgaaatagacttccgatttaaacgggctttcgaagccgtatttccaggacaggagagaggtgaggataggcagactgtccgtttccagcttataatagccgggcagaaatacgtccgccatacggcctttgtcgcagaatatcgccacctgcccctcgcgcaccgtgagcgccgagccttttttaatgatatcctttttggtgtctatcttgtaaacgatggtgttggacgaattatccgcccattcgatgacttttaaaagagccatatgccgagatcctccgcgcgcctcgccttcgcggggctttttttgtgtttattacagtatactatatcccgcgaaaaatgtcaataatttaaaagaaatttgcgcaaactccgttttacggctaaatttagcaaagagaacagcgaaaaactccgtcttgcggctctctttatatcctttcctaaaacgcaaaaaggcgcgtttttaggcggcgagagaggggacggcgacgcggcgaaagagggacggcggcgcggcgaaaaaacgaggaggataaaaaatagaggctcgttcggggcgcgaaacaccggcggggaaggcttgaaaacgggaagcggaaaaagcaggggagtacacagcgaaaaagagcctcgacttcgcggggaacgggcgcgcctataagaagccgcacggggacggcgaagaaaaagcgggcgcaacggaaaaaaacggtccgtgaggaaaacaggacggaggaagaggcgtttttcgccgcgcgccgggcgggagaaaaccgacggacgctttctcttgggcaatacggtttattcgcttgacttttttttgtgtttttaatatactttttttactttaagaagcgcggcgggaggttaaaaagaatgaacgctgtcgagaaagcactcaaaaagcaactaataggaggaattcttctttcctgtatgttcgcgggcgggattcccatgattatcctcggcgcggtgtattccgtgctccccgtcatgatccccggcatcgcctttaccgtcgcgggattttacggcgctcccctcgtgtgggtgaattacggaaataaactgaggttgaagaggatcgtatacgcggtggagaaagagcatcttctcaccgtacagagcatcgcctcgcagctttccaaatcggaaaagtcggtgcgcgggcttttggacgagtgttttcgccgcggatatttggaaggatatattcggcagggagatggtatcgccctcaacgaagcgaaagcgcccgaggaaaaacgtcacgccgcggaatgcaaatactgcggagctaaattttcctatcagggagagcttgcggtgtgcccctattgcggcgccgtaaaggagcgggacggagcttgaaagcggagtgcgtccttttgcgtccccgtttttaagaggaaaaagggagagaaagaaacgggaaaaggattgacttttcaaggcaaaaggggtataatacataacggagttcataaggcttgtcctttttgacttactcaaatatctatcgggggttcgtatgaacgtcaaagacaaggtcgttatcatcacgggcggcggcaggggaatcggattcggcatttccgccgcatacgccaaagcgggcgcaaagctcgtcatcacaggcagaacggagtccactctcctcgaagccaaagagaagctggaagcttacggcaccagcgttctcaccgtcaccgcggacggcgcggacgaagccgccatcaaaaacgtcatcgccaaaacggtggaaacttacgggaaaatcgacgtcgtcgtcaataacgcgcaggcttccaaatcgggcaaaatgctcgtcgatcataccagggaagatttcgacctcgccatttattcggggctttacgcgacgttcttttatatgcgcgaagccttccctcatctgaaagaaacgaagggctgcgtcatcaatttcgcttccggcgcggggcttgcgggcagaatcgcccaatcctcctatgccgcggcaaaagagggcatccgcggcctttccagagtcgccgccaccgagtggggaccctacggcgtccgcgtcaacgtcatctgcccgctcgccatgaccgagggcttgcagaagtttaaggaagaatatcccgaccgttacgagcagaccatcaaagccgtgcccatgggcagatttgccgatcccgaaaaagatatcgggcgtctgtgcgtcttcctctcttccgaagacgcttcctatattacgggcgaaaccattaccgtacagggcggcagcggtttaagaccgtaacttttctctgcccggtccctttgaatacgattgaaaaagagctgtcgcaaagcggaacaaatttgcggcggctcttttgtcgaaaacggctgacgcccatcggggggcgggcgagcggaaaatcgacggggagaagaggagagaaaatacaggcgcgcaaaagtcaacggcgcccgtaaaattcatgcgagattttgccgatggatccgaaaaagtcgggaaagagaggcagcgggcttttttttgcgttaaaatgaataacgaaagacgggaaataaaggacgtttttcttttatcgagtcttcgggcatggacggagtccttccgcgctccgtgagagcaaagcattttttctgtgcggcaagaaaaaatacggcttttatcgataaaaaagcgggtaaaatacttgccgttttaggctttcttttactcgtctgttaaaaaatccgaataaatgtcacgggattttttcacctttgcggacagcccgcttttctttcaggaaaagcgggctgtccgttttgctttatagatggatgcggcgggacagaggggacggaaaaaagtacgggcgcggaggaataggaccgcttttaaaaggggatgggaggcggagcgtttaggcgaggaggttggcaaaaaaatgagaggaaatgtttggaaggtttttggaaaacggcgggaaaacgccgcggcgctaagcgaaacaacgggaattttgcccgattctaccgtgggtagagttctattctgtcattctactcgcctgaaaaacggagtagaacggaaaaaacggaaggaaatcggcgggactttttagtagacttaaccgtttggacgaatagagcgcttttcgggggaggtagactcgttttgcggggaatttgcttgaaatcgacggcaaagacgtataaaataagagagcgacaggaagaaagcgcgctttttcctaaaaaatcggtggttgtcgccgcaaagcgttgtctatggcggaattctattgaattttgcggcccttggaggaacggcaactgcctttttcaagcgcggcgccgtaaaaatgaggaatctgactttctggatttagccttataggggcagaatttttgacaagttgattttccgtaccgttgtaagattgaaaaatcgtagggattgatgtttccgattgggcgcgatagtcaaaactttgacgaattttcgcagtcggcgcgacgaaagtaaagaccttgaaaattgagtcctacgtacccggcgccgtaaaatagggcttttggtaaatttatttttcgaatgcgacaacgagctttgacgcgtcgcggttaccacccgccttatttgacggactttgacaaatcgagttttaaacttcttaggataaaatattatgcggcaaaccacggttgccgtaaagtaaaaaataaattgacggagtgaatatctatggataattacgtactcagctgttgttccacggcggatctcaccaaagcgcatttcgattcgagaaacattcgttacatctgtttccactatgctctcggcgataccgagtatcccgacgatctcggtcaaaccgtttctttcgatgaattttacaggcgtatggaggcgggcgaaatgacccgtacttcgcaggtaaacgtcgaggaattcgtcgattacttcactcccttcctcgaagcgggacaggatatcgtgcacgtgtgtctttcttcgggaatttccggcgtgagcaattccgccaatgcggcggcggctcttttgagggagaaatatcctcagcggaaactctacatagtcgattccctgggcgcttcttccggatacggcttactgatggataaacttgccgaccttcgcgacggcggcatgaacgcgtccgagcttttctgctgggcggaagaccacaaactcaatcttcatcattggtttttctccaccgatcttaaatattacgtgcgcggcgggagaatttccaaggcgtcgggatttatcggcaatcttttgaagatttgcccgcttctgaacatggacgatttggggcggttgattccccgcagcaagatacgcggcaaaaagcacgtcatcgaggaaatcgtaagcagaatggaagagtatgcggacgacggcttagactattcgggcaaatgttatatttccaattccgcctgttatgaggacgcccgcgcggtggcggatctcatcgaaagccgctttaaaaatctcgacggaaaagtggagatttacagcgtcggcaccaccatcggcagtcatacgggaccgggtacggtggcgttgttcttctggggaaagaagcgcacgagataaatttcccgagtcgatccccttgtccgaaaagggaacgttattttcacgcgcccgacaaagcgtttgaaaaaatcgcgcggagaaaaagtgaaaacccgccgcgcggggataactttttgcggatcctccaagaaaacgggaaatcgtaagacatacgccgcgtccgaagccattttgcgcgggaaaggaaaaaatcgcgcggagaaaaagataggcttgcctgcaaattttgataagagtacaaagctcagaaaacc

SEQ ID NO: 3954 - DNA, 2079 bp, Unknown
  16S sequences of unknown bacteria
atatgtggtcgacgttgtgtttttttgatcagcatggtacaattgcctatgaattgctcagccgtaaagcagctcccgcaattctacaaacatcatcaccatggagaatttgtatgattcaaaaaaaagaacccctgaatcaaaagctcgcccgtatggggctttttactgctctcggtgcaattttcggctatgtcgaatcactgctcccggtctttgccggaatccccggggtaaagctcggactggcaaatctttccgtgctctatattctgatgcgctattctctgaaagaggcaacacttgtctctgcattgcgcattctgatcgtcggcatgctgttcggaaacgccttcgggatcttctacagcctctgtggagcggcactcagccttctgtgcatgaatgccgccaaagcacataccaatgcatccacacggatgatcagcgtactcggcggcatttcgcataacatcgggcagctccttctcgccatgtggctggtaggacgcacgacccttcttttttatactccggtactgctcctctctggacttctgaccggactaatcatcggtcttctgacggaagaggtactgaaacgcattcactgactaattttcttctatgtgctcctgtccctgtgagatgattgtgcggacatgctcatccgccagagaataaaataccgatttcccttccctgcggctcttcaccaggcggctctgcttcaggatccgaagctggtgggagattgccgactgtgtcatgtttaatgctgctgccagatcgcagacgcacacctctgcctcaaagaggacgaacagaatccggatccgcgttgagtccccaaaaatcttaaacagctctgccagatcatacagctccgtctcctccggaatcgtctctcgtacaattttcaggagattttcatgcacctctgtcacttcacagcatccgatttccttttcttccataatgctgtatcctttctataaattcttcacaaacagcgtacggatcgcattcagcacggccagaatcatgactccgacatccgcaaagatcgccatccacatgtttgcgataccgagtgcgccgagcagaaggcaaagaagcttgataccgatcgcaaaataaatgttttcatagacaatgcggatacatcttttcgaaattcggattgcagtcgcaatcttcagcggatcgtcatccatcagcacgatatcggcagcctcgatcgccgcatcgcttcccattgcacccatcgcgataccgatatctgcacgggataataccggtgcatcattgatgccgtctccgacaaatgccagtgtttcgtttttgcctttcttcaagagcagctcttcgacgcgggataccttgtctgccgggagcagttcactgtgcacttcatcaataccgagctcttttgccactgtatctgcgacctgcttccggtcgcctgtcaacataacagtacgggtaacacctgcctttttcaaattctcaatcgcctgctttgcatgcggcttgatccggtcagagatcaggatatgtccggcatatgcgccatctatcgccacatgtacgaccgttccgacctggtggcactccaccgcagggataccgagccgttccatcagctttgtattgccgaccgcaactgcggttccgtccacctttgcggtaataccattgccaccgatctcctcaatatctgatactctgcatcggtccagcggctttccgcaggccttctgcagactcttactgatcggatgtgaagatgcgctctcagccagcgccgcatactccagcagcttctgatcctccatactgttgtgatgcacgccggtcacttcaaagacgccctccgtcatcgtaccggtcttgtcaaatacaacggtcttcgtctgtgagagtgcttccagatagttcgaacccttcacaagcaccccggccttacttgctccgccgataccggcaaaaaatccgagcgggatactgatgacgagcgcacacgggcagctgataacaaggaatgtcagtgcgcggtaaacccagtccccccacatc

SEQ ID NO: 3955 - DNA, 8298 bp, Unknown
  16S sequences of unknown bacteria
ccctggctgtacggacgccgcagcgaaactgcacaaagccgcaggcatggccccttctgggttttccacgtccccggcttttctccggcacagaggggatgcgcattgtctcgctcccccgcacgctgctcttgtttttatgtgtgatagtggttcttattataggcggttttcaatagaaaagcaataaaaagatacaaatcgttcgagcgggcgcgccatgtccggcctgtcacagggccagccagtcctccaccacatcccgggcgcagacgggcgacacagcaaagcggatcagttttcccagaagcgcatcaatcctgctgcggcgcatcgtgatccccggcaccacggctgttccgccctgtccgcttttgacacacacgccatacccctttgcatcttccaggcgatagtaggaaaaccggtgcggcgttccggctccatccgtaacttctttcactgcaatcaaaatttctttcacgctgttcacaacctttcgcagtcgattatagcaaaacagcagaatcggaatctcacggtttgcggcggttttggaaaatttatatggaattttccaaaatatacggataaaaccggaatctccggaaaccgggccaacgtgcggcatatcggctcggtttccggagattctgtttcatgccttttccattttcacagcggaggatcgccagcctcctgccgaccaaaaagcgccttgcagtatgcttccaattccgcacgctccaccagcagattcaacgcatccagcatggcgttggcgctcaaatgctccggcagatccagtcggagcagcagctttttccggcgttcggcgctgtttggtctgccggaaagccccagcgcatacaaatcctgcttggtgatcgtgcggcacggaactgccgccgcgccgtccatggtggcaccggcctggcgcagcgcatccaaaagtacttccgccgtcatcccttccacaccaagctttccctctttacccggccggcgtttccggcgttcctttccatacacatccggcacataggcctgcttgagctgctctttgggaatcgcccctttcagaaaattacgaatcaaaaagcccgcgccgtcgctgtccgtcagcacaattaaaccgcgctgcgccgccaggcggcgaaaaaacgccagcttttctctatcctgaaacacagaaaagccgtccgttgtcacaatggcggcatccacaatctgtgacagtgtgttcttatcgtattttccctccaccaggatcacttctcgcacaaaaggtttcttgtttttcactccttcacctcctgcgccaaacgcatcagcagaagtttcagctccccttcgctgtcaaagccagtctggctcttcatttgtacatccagcactttgcacatttcaatgccactgcggcaccactctttggaaaaatgcttggccgaccccagcagaagtttcgccggataatccgaacgcatattccagatatccatcaaccagtagcggtcctttccaccgtccaacgcaatgcgggccgtgtagagtttgcgcagttcttttccgatcagggaaagaatgacgatgggttcttcctgcattttcagcagcttccccagcgtgtctgccgccgcatcataattgcggcgggaaatctcattggtaatatcgtagatcatagcatcgatcactggatcggctacagcattgatatcctctatggttatttttgctcccctggtgtaagcggcaattttttcgatttccggaatcaagccagtcatcaggctgccgcaggtaaaaatcaggtgctccgcactctgtcggtcaatctctttccccagcgccttgaaacgccgggtaacccagttgatcagatcgctctgcccctgagttttgaattctacgatctgcgccgtactggtcaatgcagtgtaaagttttttcatctttttatccggcttatactcgagaatatcgtagacaaacaccaggcagcagtaatcggggaaatcgctcaaaagggcgatcagctggccgcgctgctcttcattcagcttgaaaaggtcaaaatccgtcaccgtcaccagcgtcttttcgcacatcatgggcagagcttccacaatgtcgctcagaacctgtacgctcagcgctttcccttccaacttgtggtagttgaattcctcaaatccggcaggaatcagctttttgcgcagctgatccagataatactcccgtaaataggtctcttccccatggaacacatacaccgtacagagctgaccggttttcagatcctgtttcaactgggtatagcccttatcttccacttcctttttcaaaggcactgcttttcacctcaataaactgtaatagatatcgtgccgccgcgatccgtacgccgcacctcagcacccgcttcttccagacgctgcagtgtttccggtgcaggatgcccataggaattgtctcccactgagatcactgttacctccggtgcggttgcttccaaaaaggcggcactgctggaatgtttggagccgtggtggcctgcaaccaatacctccagatccggcaggtttgccgtctgaagcagaagggcctccgtttcgctgtccatatcgcctgtcaccagcatatcaaaatcctgacaggaacacaagagggacagtccttcttcgttgataccccctgcgcccagaggcggataaagcgtcaacacagcctccccaagagaaagctctgtttcttctgccaagcgcagcgtgggtatgctgtacgcttttgccacagccaacacctccgcctgaagcgcctgctcctccgcgccgtgtacttccgggatcaccagatatttaacggaaacgcgggacaaaagcgtttcgatcccattggcatggtcggcatggtaatgcgtcaaaatcaaataggtcagcgccatctgccccaccgtattgatctgatttgccgccacggaaccggcattgatccacgaattggaagaaccgcagtccaccagcgccgacgatccacccgaaacaaagaaaaccgattctccctgccccacatttaggacagatgcagtcattctggcactgccgctggccagcaccggcagtgcaacgacagcaccaagcgtactcaccgatagcgccgcggccaggaccgcagtgcgcaaacagcgttttttctccaaaagcaccacggccaacataagataaacgtaaacaatccatccgggaagataggcattgctggtatagaccgcatgatacggtatctgtgcaaaaagccgcaccaccgccataaaatagtccagcgcagacgttgccggaatcgcaagaatagccgcgaccggcagatatacaaatccaaccagcagcgaaagaatccccacatagaacgaaaaggacacagcccaaagacacaacagatttgtcaacggagaaatcaaactgacacaatcaaaataatatgccaccagaggcagcgtaaacagggacgcggaaacagtggtgctcagcgcgctccatacaaggcaccacacagcgctctgccgctttgctgcaccagcccggcacctgccgctcaatactccgtaaatccgattggaaaacagcaggatgccggctacagaaaggaatgaaagctgcaggccgatggaagccgctgcataggggtttcccagcaaaatcagcagcagggctgcactcatggttgtaacgctgtcgttttccctatgcagcagcggggctgcagacaataaggcaatcataatacaggcccgcgttaccgacggagccgcgcccaccatcagcataaaaaagaacagcagcggaatgccaacgagggccgctttgcggcggtttttcaccagcagccgcaccataccaaacaaaaaggcgcaatgcataccggaaaccgccgtcacatgcgtcacgccggtttccgaaagctggctgtagagcgtatcgtcaaattctgtgcgcgtaccggtcagcagggccgtcatcaaaatacgtgcgtcaccctcataaagctgggcaattttttcctgcagcaggcggttgaaggaaagcggaagatacacaagcgccggccggccgactggttcgatcgacatatccccttttgcatacaggagcagatgcattccctttgcagtaaaggacgtgacctttttctcatgaatcatctgcgcactgcgcagcgaggcgtttgtcgtaacccggtcaccgggtgcacaggaaagcagcgtttcatcgccatagagctgtaccttcaccggtcggggggcgcccacatccagcagcgccgtaacctttgccccataggtatgttcctgagcataatcgctcagcgttacggtgactacttgctctgtacccaccagcgggcgtactggatcgacccacaggaagtcatacagcgtctgatagaaaacgccgaacgcgacgccggaagccagtaccagcgcggccatccgcctccgctttttctgatacagtgcgtacaagagaccccctgtggaaacagcgacaaggaacagcaccacccaggctgggccatactgcaaggcaataatcgctgcagatgctgaaaaacagaacagcgccagccaccgcatcttatccgccccctttttctctcttttttagaatactacaaaccgcctacccttggcaagaaaaagtccccaaaagcgccaaaaatcgtcttttggcatcttttttctgtaatgttctttcgctttacatagattggtaatccatttgtttttctgtttacaccctgcgcaggcacaaggatcgaaccatcagcgtacacggcaccataatttcgcctgcggcgacacccaaaccattcaaacaggcactatgctatcggcacacgcatgaatgccgtctgagcatatccttcaattcctcctcccccattttcggtagttttcaaaaacgtacggcaaccatttcgactgaacatagcaaaaagcacccgtaatgaagaatcattacgagtgcttttctcgattttgagctttatcacagctttgtttcaggtgtcatttcgctcgattttagaatgtcgactacattagcccggaggccaggtcatatcgcggccactgagcacatggaaatgcagatggcgcacactttgccccgcctgttcgccgatgttggaaaccacacggtagctatccagatgcagcttctgagtcaactccgcgatcacccggaaaatgtgccccactgcggcgcagttctcttctgtgacggcggaaaccgaggaaatatgcgctttgggaatcaccagaaaatgcaccggtgcctgcggatcaatgtcataaaaagcatagcatacatcatcctcatacaccttattggatggaatttctccggcgatgattttacagaataaacaatcactcattgcggatcccctcctctttcaaagataaaagtttttcagcattttatatactgtcacttgaattgattctgctgcggatcatactgatagtccagctgggcaagggtacgctcgatggccgggcgctcctcattcaaggcagcgcacagttcatccaaacttccgtattcgtcccgcagcttcgtgttaaccacgctgagcagcaacacaggatctttcggcagcatcgcttacaggcccagcttcatggataccacattgtccaccatggccaacgcgttatccaccatcagcagatccttacctccgcccatggcgctgtcaggcttaccgccgccgctgccgccggcaatggcggaaacctgtttgataatatctccagccttgacaccccgggccacagcttctttgccacacacagccaggaaggtgatcttttccccgtttactgtggccagcaccgccaccgcattgtccgctttgctgcggatcatgtcgcccatttggcgcagcttgttggcatccgcttccggtaccacagaggtcaaaaccttcaggccgcccacatcatgggcaccgaagaggatgcgatccgcctcaccaaccgcttcttttgctttatatttctccacagcgtggcgcagatcgcgcaactcgcccatcatctgctgcagcttttcctgcagctccgcgggctgggctttgatggcggcggcggcttcaaacatcagcgtctttgtcgcattcatctcttctaaggagacttttccggtggtggcctcaatacggcgcacaccggaagccacagaaaattcccgatcaatatggaatacgcccactttagccgtattgtccagatgagtgccaccgcaaaattccacactgtagccctcgcccatatccactacacgaaccgtatcaccgtatttctcaccgaacagcgcaatggcacctcgcttcttggcctcttcaataggcagaacatcggttcggactgcatagccctccagaatcgcctcattgaccaaatgctccacaagcgccagctcttctgccggcaaggcagagaaatgcgtaaagtcaaaacgcaggcggtcgggttccaccaaagaaccggcctggtgcacatgatcgcccagaactgtgcgcagcactttgtccagcaaatgcgtggcgctgtgggcacgcataacagccttgcggcgttcgacatcaattcgcgcctgaaccgtgtcgcccagcttcagcgtaccctcggccattttgccatagtgcatgtatttaccgcccttgttcttctgcacatccgtaacatggaagcgacaggaatgcgcaccggaaagaacgatatcgccatggtccgccacttggccgcccatttccgcataaaacggcgttttgtccagaaccacaatcgcatccacaccaggcatcagctcttcagcctgctcattttccacgaccaaagcaacaaccttcgcttcggaaatccccatattctcatagcccacaaattcagtggccggcacatccttaccaaattccacgccggcccagcccagatcacccaacgcttcacgggccttgcgggcgcgttccttctgctcctgcatcagcctccggaagccttcctgatcgacgtccatgccttcctctgccaccatctccaccgtcagatcgatggggaaaccataagtgtcgtacagtttgaacgcatcttcaccggaaaagacattcgttccgatctctttatgggccgccagcatttcgtcgtaaatcttcatgccgctgtcgatggtttttgcaaaattctcttcttctacgcgaataacgcgggtaatatagtcctgccgctcccgcagttcgggataatgaccctcattttcatgaatgaccatatcgcatacctgatacaaaaacggttcgttgacgcccaaaatctttccgtggcgggccgcccggcgcagcagacggcgcaatacatagccgcgcccttcattggagggcagcacaccatcgcagatcataaaagtggaagaacggatatgatccgtgatcacgcgcagggacacgtcagtcttgacgctttgaccatagtgcgcgccggtaatgtcggacaccttattggtaatattcattaccgtgtccacatcgaacagggagtccacatcctggcagaccaccgccaggcgctccaatcccataccggtatcgatatttttttgtttcagttcagtataatggccttccccatcattgttgaactgggaaaatacgacattccagacttccatataccgatcgcattcacagcccactgtacagccaggctttccgcagccgtatttggggccgcggtcataataaatttcggaacagggaccgcagggaccagaaccgtgctcccagaagttatcctctttgccaaatttgaaaatacgctcggcgggaattccgatctcctcattccagatacggaacgcttcctcatcggccggcgtcgtctcattcccttcaaacacagaaggatacagccggtccggatccaggccgacccactctggcgaggtcaaaaactcccaggcccagtgaatggcgtcgtgcttgaaataatcgccgaaggagaagttgcccagcatttcaaaatatgtgccgtggcgggcagtatggccgatattctcgatgtcgcccgtgcggatgcacttctggcaggtgcacacacggcggcggggcggctcctcttcccctttgaaccaaggcttcatgggcgccatgccggaattgatcagcagcagggattgatcgttttgcgggatcagggaaaaactcggcaggcgcagatgttccttgctttcaaaa

SEQ ID NO: 3956 - DNA, 4918 bp, Unknown
  16S sequences of unknown bacteria
cgccgccaccacatcgtcatgcgcatgggtgatgaaaatggcctttacccgatccttgttctggatgagataagaaaaatcaggaatgatgaattccacgcccagggtctcgctgtccgggtatttcagaccggcctcgatgacaaagatcttctcgtccacctccacgacaagcatgttctttccgtcttcgtcgagtccgccaagcgcaaaaatacgaactttactcatagtttcctccaatctgatatgttattatgtgctttacaaaatgccgcctcacggcggtatcttcatcacagtcatcgtcattataccccaaatatgaagaaaaagccatcctcaaacggctttctcttctcttctctcgatcacgaacgggcttcttctcccttcagcgaccaggtcctggcctccgtgatgatcacctcgacgatatcgccggcctgcgcgttttccgcggtgaaattgaccagcttgttggtctcggtatacccgctgtagatatgctcgtcttgcttgcttggcccatcgaccagcaccttcaccctgcggcccacatacgccttgttcttttccagggcgtgcgcgttccatcgcgcgttgagctgcgccaggcgctgctgcttcacttccagcggcacgctgtcttccatgcgtgcggcaggcgttccctcacgcggagagtagatgaacgtatacgcattgtcaaagcggcagtaatccacgatgtccagcgtatgctggaactgctcatcgctctcattgggaaagccgacgatgatgtctgtcgatatcccgcattcagggatggcggccttgatccggtcaaacagcgcgcggtactgctcgatgctgtagcggcggcccatccgcctgagcacgtcgctgtcgccggactgcaccggcagatggataaagggcatgatgttgtcacaggaagcgatcgcttcgatcatctcatcgctgaagtcccagggatgcgatgtggtgaagcggatccggtcgatccctgtcttcgcgctctcccgcagcagcgcggcaaatccgcctgctatgcccagatctttgccataggcgttgacattctgtcccagcagggtcacttcccgatacccctgcgccttgagctcgcgcagctcctgcaggatatcttccatggcgcggctgcgttcttttcctctggtatatggcacgatgcagtaggtacagaacttatcgcagccatacatgatgttgacccatgccttgtggcggccgaaccggcgcaccggcaggttctcgatgacctctccttcctgggagaagacctcgacgcatcgttcctgtcctgagatcaccgcatacagcagctgcggcagtcgatgcagattatgcgtgccgaagatcaagttcacatggcgatacttctccaataccgtactgaccatctcttcctcctgcgccatgcatccgcacaggccgatgaccagatcgtcgcgctgcacgctcagccgcttgagcgaacccagctcgcccagcaccttgtcttcggcgttgcggcgcaccgcgcacgtgttgatgaggatgacgtcggcctcctccgcctgggcgcagggcgcatagcccagcgattccaggatgcctgccagcgtctccgaatcacgttcgtttgcctggcagccataagtccgtatataataccgttttccctttcccagatcctgacattcaggcggaatggaaaacagtgatttttcgatcacgctggccgtgtgggtccgtttcgatgcggcgcgcagatccggcagcacccacccgggctgttgttttatcattacattacctccgtccgatgatgtttcagaaaaaaaccaagcgtaacgcctggtttactgagaaattgcagatactgggcaagtggatacacaagttccgcagtcgatgcaagtaccctcgtcacaaactgatttaccttcaccgtccatagataaagcagataccggacaagctcctacacaggcactgcatccaatgcaagtatctctgtcaattgttacagccatgttaaacttcctcctttacaaccgaagtcattatagcattcctgtctgtcaaaatcaaccgcaaaatgttactgctcactgacaggcccgttttgcggaatcgttttcctttcctgctccttgcgccgtttcagccgctcattgatgttggtgcgcagcaggctgtagatgaccgagcacagcgggatgaagatgatcatgccgatcacgcccatgagcgaaccgccgatggagatggccacgatcacatagagaggcggcagtcccaccgagttgccgacgacatgcggatagatcagattgccctcgacctgctggatgcagaccaccatgatgatgaaatagagcgcctgcatcggatcgaccatggcgatgaacagcgcggagatcagacagcccacgaatgcgccgaacatcggcaccagcgcggtaaagccgacgatcacgccgcctaaaaacgcatactggatcttcaagatcacgccgcccacggtcaccagcgatcccaggatcagacactccgtgcatgatccgccgatgtaattggtgaacgtcgacctggtcagctccagcacatacagcgtcttcgtatagacccgatcgctgcaataggccttcagcatcttctttccgccgatgatgaggcgttccttattgaagagcgcaaggatggcgaagacgaacgccacgaacagcgtgaccgcccacgatacggtggtggagatgacgctgatggcggaagcgaagacattgcctgcgccgccgctgagcacccagtccgacagcgtctgaaagagctcatcataattcaggttgctgaggttctcgatgctcgcgctttccgccagcgtacgcagctgcgggtatttttccgccatctgattgatccaggcgacgaaatcccccactgcgcgcggcagctgctcgatgatgttctcgaccgatgtagagaggtgcgggatgatcacgaacaggaagcagccgatgaccagcgcaaagatcagcagcgagctgatcaccgagatgatgcgcatcagccgcggccggatcggcgtgaagcgaagcagatcctcgatgcggctgaccaggatgttcagcacaaaagcgatgcctcccccgatcagaaaaggggtcaggatggagagcaggcgcatggcgatatcccagatcagcgacaggttctgcaatgcgaaatagacgaagagcgcaaacaggatgagcccgcggtatgtcttgatcttttcgcgatatttctgtgtatccggatgcataagattcctccttgctgcatataggaatactaacacattttcatcgccggttcaatgccgcagaaaaaacgcacccgaaggtgcgtcagctttcatcaaacttcgatgatcttcatcgcattggtcgcgccatatccggtcggataaccagcgacgatgatgatggtctctcccttatggatgccatagctcatcgcgatattgcgcgccagggaagcctcgttctctctggtgttcacggtctcggagaagatggcggtcacgccccagttcgctgccagggaacgctgcgtgcgctcatcgaaagtgaccgcgaggatcggtgcctgcgggcggaacttcgcgatgcggcgcgccgtgtttccgctctgggtaaacgcgacgatgcctgcgactttcatcgccagcgccgtatctgccacggaaatgccgatggcgtcattcttcgtgcgcgtgcaagagcggatagacttcttcaaacgatcgcggtaagggatgatcggctcgatggcatgcgcgatcttgaccatcgtggataccgcctcgatcggatagtgaccggatgcagattccgcagaaagcatgatcgcatcggtgccatccaggatcgcattggcgacatcgctcgcctcggcacgggtcggacgcggattatcctgcatgctctccagcatatgcgttgcggtcacgaccggcttgcccatctcattggccgttgcgatgatctttttctggtagatcggaacgagctccagggatacgtccacgcccagatcgccgcgggccaccatgacgccgtcagcgacttccaggatctcgcgcagattgtcaaatccttcctggttctcgatcttcgggatgatctgcacatcctcacggccttcttcgatgaggatgtggcggatggccagcacgtcctctttgcggcgcgtgaaggaagcggcgatatagtcgatgccctgacggcagccgaaacggatatccgcctcgtccttctcggagatgaacggcatgctcagcttgacgcccggcagattgcatcccttgcggctcttcaaggtatgcgggttttccacgcggcatttcagcgcgccgtcttccttttcgatgatggtcagacgcatcttgccatcgtcgatcaggatggtgcctcctacctcgacatcgttgaacacttccggacactgaatgtggaagcactcatgcgtgccgagcaccttttcccgtacgatggtgacgatctcgcctttttcataagactccgtcttgttctcaaagtctcccagacggacttccggccccttggtgtccagcaggatggcgatgctctttccggtctccttgacgatctcacggatcgtcttgatgcggcgtccgtgttcctcataatcaccgagggaaaagttccgacggatgatgttcatgccggtgtcgaccagcttgcgcatcatttccttgctctcggaagccggtccgatcgtacagatgattttcgtttttctctccatatccataaattgacttttttcctttctaaaccctttttaccatgtttatacgagacgctcaaacagattctgcagcggctttcgggaagtgcgc

SEQ ID NO: 3957 - DNA, 2015 bp, Unknown
  16S sequences of unknown bacteria
gtattcccgtaaaagaaatttaatgttttgtccgccagtgatcttagttagttttctgccacgcggaaaagcatattcaccgatatattccacgtccttgccgatgcatatctcttttaaatgtgataatcccataaatgccttggcatcaatcacctcgataccatctgaaacaatcaacttttcccattttacatcactgtccacacaaccaatttcttttacgggaataccattgatttttgttgggataacgcctgttttctccgtgccgctgtttacataaatcttcgctgctgttttattacgtattaagcaatacgaataattaccgatatgagacatatttttctcatctacatttgcttttgccggcgtagcataagatgcctttgcacggtctggttcatatgctgaagtgactgtcgcagtaacactgctacagattagcgctaaactcaatgccatgataccaaaacattttcttttcatttttaccaccattcctttctaaaaatcccttttataatttctcaactacttttacgtgccacttcttagcaaactttttgatccatttcttgtctgctttgcgaagttttttgttgataacgagtttctttgttgttgagttgcataatgttttaacctgatatttttttacttttacaggcatcttacgatatttactaacatctactgtaataccatacccggtatatcggcatttttcagcacgatcatactgtttataggatgtattaagctgtttcgaattgctcaatttaggtaatataatcttcttaaatcttgcctttctattagcatgaaagtacaccaattttttatttttgcttagatccaaatttcccatcgatgcctttgatttccgatcaattgtcaccccgataagatttggacatccggtaacgttaattttttttataaccttactgcttacatccaaatattttaagcttctgtttttaataataagcttcttcaaagaattactgtcaatgagcagcttctttaaccgcttgcactgattgatattcaaattcgtaagtttaccgcctacatatacttcctctaaattaggtaccacagataaatttaatgattttatcttgttattcacaagatgaatcgtttttaatttatttagttcacatttccccttggaatccttgacaacaaggcgttctaagctgccggcattacatgcttccaatgtttcaagctttctcatatgagaaatatctattgtttttagtgttgtcatttcttccaacggattgctattctgttgcaaatcttgccaactattagctacatctaagcgttttaatgtgtctttgtaaatcgaaagatcaaatattttattgccaccataatacgcaattgatatctgttccactctcttaaatccataaatctctttctctaaatcctttacataattcatctgcacaactctcgcattcggaaaacattttccccaatcctgactgtaaccgccaagcttagtatgcccatttaacgtcgaacacactgtcaattgttctactgacgttattggtgcattaacggaaacattagatgcagcaatttccaaatgctttagatttctgtttgctgtggaaagcgttacctgtcctgtggcaaatagattcaatttttcaacatacggaaacacagagaatatatccgtatttttacaattccaatatttgcagttatactttcccccttgaaaaagctgttccattgtaacctgtttaagatttgtaaaaatctccattccggtaaaatctatttccatcccggaagtaactccatatgtatacagattttgctcattccaatccagcttagtcactgctttaatttcagcatcagaaagttctccatcgcgatttgtgtcctgcttgtctgcgaaagttcgaacacatgcattcggaaatgtcttctcatcaattttaaccgatgccgcatctgctgttcctcctgca

SEQ ID NO: 3958 - DNA, 10197 bp, Unknown
  16S sequences of unknown bacteria
aggggcagccacgcggcaaccgacgcccattttttgaccccgatgtcgtcgaaatagaccatacgggcgggcggatcgggcgggaagaaaaggcattgaatgatatagggataaagcttcggctcgtcatatataaggctgttccagcccatgatcatggagccgacgcggctgttttgcataattccgagaacggcgggcagcagtataaacatactggcgcaaaggccgagcaccgactcggttatgactcccaaaaatctcgagcaggtataggcgacctctccccttttgaaggttatgttccagcttcccgacgcccatctcacgacaaaatatatcaccgtgaaaatgaccatgccgaagaagaaataatagtttgaaatcgacgaaagagccaccgcaaggaagaaaagtcctcggcggttttcggccatgataagctcgagaccgagcagcagcatcgggaaataaacaatggcctcgtggaaatggttgaagaaaatattataaaccgaaaagcccgaaaaggcatacataatgccgcccagcagtgcataggtcttattcttcacaaacttggttatgaaggcataagcagtcagcgaggcgcaggaaaattttaaaatgagcagcggccccatgagatgagggataaagctgttgggaaagggcaacgtcagccaaaagaaggggctgccgaggagataaaagctgtatgagctcatgaaatttgcgcccagatcggtgccgaaatcccacccaatgtcgaggtttctcacggcggcgtgggcaagcttgtagaagggaatttgctgtgcgttgaaatccccgtaatagacaaaatatcccttatcgataacgatatggggtataaaaaggatacaggccattataaaggcaagaccgaaggcggcgaagtacctttccttgggctttttaagtatcgaagaatttgccgaaatcgacatatcatcactccaacattataggtcttgtcattatatcacataattttagatttaacaataccgttttataaaaaaaccacagaaggggtaaaccttctgtggttttaatattcaaatcttaagcaagtcttgctttaagctcgtcgagctgtttcttaagctctgcggggagacggtcgccgaatttcttgtagaattcttcgattccggcagcctcgtccttccaaatgtccttgtcgacgttgagcaggtcggcaagagtctccttggagatgtcaaggccttccatgtcgaggtcgtcgatttcgggaacatagccgatgggggtctccttggcgcctaccttgccctcgcagcggtcgagcatccaaagaagaacgcgcatattgtcgccgaatccgggccagatgaagttgccttcgtcgtcaagacggaaccagttgacgttgaagatcttgggagccttgtcgcccagcttctcgcccatttccagccaatggccgaaatagtcgcccatgttgtagccgcagaagggcagcattgccatggggtcgcggcggagggttccgaccgcaccgcttgcggcggcagtggtctcggaggacatgatggagccgacgaacacgccgttgttccaatctctcgactgataaaccagcggagcggtcttggcgcggcggccgccgaacacgattgccgagatgggcactccttcgccgttttcaaactcgctgctgatgcaggggcagtttttggcgggagcggtgaaacggctgttgggatgagctcccttggagccgtcggtgcaatcccatttctcgcccttccagttgagagcgttcttgggaggattcttgtcgagaccttcccaccaaacggtgttgtcgtcgagattgtggacaacgttggtgaaaatggtgccctgacgggtgctggcaagagcgttggggttggatttttcgttggttccgggggcaacgccgaagaaaccgttttcggggttgacggcccaaagtctgccgtcgggaccgattctcatccaggcgatgtcgtcgccgacggtccaaaccttatatcccttgtcgcggaggtactttgggggaatgagcatggcaaggttggtctttccgcaggcggaggggaatgcggcggcgatgtattttacttcgcccttgggattttcaagaccgagaatgagcatatgctcggccatccagccttcgtttctgccctgataggaggctatgcgcagagcaaagcactttttgcccagcagaacgtttccgccgtaaccggagttgaccgaaataatggtgttgtcctgggggaactggcagatatatctcttttcctcgtcgatgtcgcatttgcagtgaagtcctctgacccagtcgtcgctgtcgccgagaacgtcaagaacggccttgcccactcttgtcatgattgccatgttgagcacaacataaatggaatcggtgacttcgataccgaccttggaaaacttggagccaacgggacccatggagtaaggaattacatacatggttctgcccttatagctgtctcttgcgatgtcggcaagcattttataggcttcgccgggctccatccagttgttggtggggcctgcctcctccttggtgggagtgcagataagggtgcgaccctcaacacgggcaacgtcgttaacggcggtgcggtggaggtagcatccggggagcttttcctcgttgagcttgatcatttcgccggtagcgcaggcttccttgcggagctcctcaagctgctcctcgctgccgtcgatccaaacgaccttttcgggctttacaagctcgatttgctcgtcaagccactttttgattgatttgttgttggtcataataaccgtcctttctcaaccttttataataatgagtttataaacagggtctgcggaaaaattttccgtgtctaaacctattttacaatagaatgagcataaaagcaatgcttttatatttaataatgtgttaattatcggaaaactcggcgttttcgcttcgactgtcgagcacaaggcgttcaagctccttggccgcaacgctcagcggctgttcctttcgcttgaccatacacaccgaacgcagggggattttctcggcaaggtcgattcgcgccacgtctggcattccctcgaggaattcctcggggacaaagcctataccgaggtcggaacgaaccatgggaagaatttggtcggcggtggccgcctcaatgtccggcaggaatttgagaccgtttttggtgaagaaggccgaatacatttcaaaggtcttggtgtcggtcccaagcgaaatgatcggatattccgacagctcctttagcgtcacctttcgggaaagcagctcgggaaatccgtttccgcaaaccgcgacctcccttatggtctttatcttcttttcggtcagcgtggtcgacttgaccgtcggggtggtgactatggcaagatcggcaaggccctccttcaaagcggttatggcctgaggcgtggaatggttgcttatgcggatcttcaccttgggataaagggtgcggtattttttcagtatcggcaagatacagcagttgagcgccacctcgcttgccgaaacgtatatcgcaccgccctcgagatttttgctgcgggagatttcctcctcccccgcctcgatgtgttcaagggcaattctgatgtgggaataaagcttttccccctcgggagtcagcttcattccgcggttggagcgcacaaaaagcgtgcagccgagctcaccctcgagattctttatggaacgggtcagattgggctggttgttcatgagcattttggcggcctgagaaatgtttccgtattttgcgacatagtaaaaaatacggtaataatcatagttgatattatacattctctcacctcttttgatatatgtaaaacacataaatcaaaccaaaaacatatatattacatataccagcattggcattataaccctaaagggaggctttgtcaataggcaaaacaaaatttttgttaaaaaaataacaaattcggcttttgcccgtcggcagcaaaaatttcctgtccgttgacagcggcgcaaaagggtaatataatgattaaaaaggaaggtggaaacatgaaaaaaggtcttgttctcgagggaggagccatgagagggctgttcacggccggagtcctggacattgtcatggaaaagggcattgaatttgacggagccgtcggagtgtcggccggggcggccttcggctgcaacataaagtcgcggcagatcgggcgggcgcttcggtataatctgaaatactgctccgacagccgttatgcaagcctttcaaacctcataaagggcggaaatcttttttccaccgacttttgctacggtgaaattcccctttccctcgacccttttgattttgacgaatatgaaaaaaatcccatggagttttacaccgtctgcaccgaccttgaaagcggtcgggcggtttatcacaattataccggcagaaacgacggcggatttgactggataagggcttcggcctccatgccgctggtttcgcaaatcgtcgagatcgacggcaaaaaatatctcgacggcggaattgccgattcgattcccgttaaatttttcgagaaaaagggatatgacaaaatcgttgtcgtgctcaccagacccaagggatatataaaggaaaaaaatcctctgctacctattatgcggattaaataccgaaattatccgaggtttatttcggccgccgagtatcgccacgtcatttataacaaaacccttgattacatcggcaaaaaggagcaaaagggcgaaatttttgttattcggccgccctttgagctgccggtcggaaaggccgagagcgaccccgaaaggcttaaagaggcttacgaaatcggaagaagggaaaccgaaatgcggcttgaagagcttaaggcttttttgagcggcaattgaacgtttttgatttttataaagaaaaacggacgcaggtctaagaagaccccgtccgttttttcatttacactcgatataataagggcaaatgtcctcgaaatgtccgtccttcatgcgaaagcctccccgaatgacgccgaggcctttaaagccgatgcgctcgtaaagatggcgcgcatgaacgtttgtggccacaacggcgttgaactgcaaaatcgaaaatccgatttctgccgcctttttaatgctgtggcgcacaagcttttcccccgcgtgaagcccgcggcagcaggaggacacggcatagcttgcgttggcaatgtggccgcaccgacccacgttgttgggatgaagaatgtaaagccccacaaccttttcgtcgttttcggcgacggcgcaaaagctttgggacgcgaaaaattcctttgccgactgttcgtcaagaggctgctcctgaggaaaggctattccctcctccacaacctcgttccatatttctttcattgcggcaaggtcgctttcgcggtattccctaatttcgacttccatgttctttttcttccttatcgtcgatttttatattcatcttaatgcggagatcgccgagacttttgtcatactgcgcttttgaaatcgcgccgtttttgagaaaaatgtcaagcgtctccttttgctttaaaaacagagcataatttttattttccgtcacattatcccctccgggttcatgtcggcaaaaacggtggtttttcccgccgccttgcccgcttcctttaatacctcggacatacattttcggaattttttcgtgtttttacacttgattattattctgtatcggaatttacctcccgccttggaaaccgtggcgggagaaggcccaagcacccgaacggtcaaatccgaatagctctgcgaaaccgtccttcggaaaatttcaagtgtgttttcggcggcctttttggcgtcgctttcccgcggggacacaaagcccaaaaggcaaatatcgcaaaagggcggatattcgagagccttgcgaagcagaatttcccgctcgaaaaagccttcataatcctggcaggaggccatttcgatgacctcgttttcggggctgtaggtctgaagcacgctgataccgtcaccaaaggcgcggccggcgcggccgataacctgagtgagcagcgaaaaggcccgctcgtaggctcgaaagtcgctgttataaatggcctgatcggcgcaaagcacccccacgaggcttaccctttcaaaatcaagtcccttggccaccatttgcgttcccacgagaatgtcgtattcgccctttccgaaggccgaaagcttttgctcatgggcattcttttgcatggtggtgtcggcgtcgagacggaggattcttgcgtcgggcagcagcttttcaagctcggcctcggcaaactgggtccccgctcccgacatttttataaactcgccgccgcattcgggacaccgttcgggaaggggctttgaggcgccgcaatagtggcagacaaggcggccgttcgccctgtgataggacatggagatgctgcaattgtcgcaggtcagcacctttccgcagcttttgcaggaaatatatgtgttgtatcctcggcggtttagcagcagtatcgactgcttgttattttgcaaatttttttccagaagctcaagcaggcggcggcttatgaccgaggtgttgccctcccgcatttcctccttcatgtccaccgtttcgacggcgggcaggcgggcgttgttataccgctcggtcattttgacgagggtatatttgccctcctttgccttggcaaagctttcgaccgagggagtcgccgagcaaagcagcagtagcgccccggattttgcggcgcggaaacgggcaacgtcccttgtgtgaaaacggggggcgctttccgacttgtatgtgtgctcctgctcctcgtccataacgataaggccgagattgtcgaagggagcaaaaaccgccgaacgggttcccacggctatctttgcctctccccttttgacccttttccattcgtcaaggcgttcgcccatggaaaggcggctgtgaaaaaccgcaaccgtttcgccgaagcgggcacggaaagccgacagcacctgaggagtcagcgaaatttccggcaccatgaccacggcctggcgcccgagttcgagagtcttttctataagctcaaggtaaaccttggttttgccgctgcccgtaactccgtataaaagcccgcagcccgccttttgctcgcgcagcatggcataaaaggtgtcgaaggctctttgctgctgctttgacagcacggtcttttgcggctttttgtcggcggcgacagcctcgggggttcggtatacctcgctgtcaaaaatttcggcaacgccctttttgacgagatttttaaccacaccctcgcccgctccggtaaaatagcatatttcctttacggtggcggcgccgtttgaaagcagaaaatcaaaaatttcccgctgctttttggtcagttctcccggctcgtcggtgcaaaggcgcagcgttctcaccgttgcgtcgcccactcccttttttgcgccgtctattctgacgcaaaagccgccgtcgacagcccgtttaagcagctcggaggaaaagccctcctttatgaggctttcccttaaaactccgtcgggattttttgaaagcaggccgcaaagctccttgattttccccgaaggcccgctcggaatattttcggcggcaaagtagcggctgttccttttaaggttcagcccggagggcaaaaaggccttatagcagtcgtaaagcgggcaaaaggtctgttccgaaaggaattttccaagctcgataaactcctccgacagcacgggttcgtcgtcgagaaggtcatccgcctctttaaggctttcgacgttttcggggttttccccttcatacatgacgacccccgtgcgaagcgcgccgccgcggccgaagggcacctgaacccttctcccgactatattttcacaacaaagatattccggcagaatatagtcaaagggcttgtcgaaatgataagccgtttgctccaccgccacgccgacggttctgaccttcatccgacaagcccccttaaatttttaaaattatttatcgcacttttcctcggccagctcctccatggcgagggtgaccggcttttcggtcaggattatttcctgctcctgggcgcgcttgcttatcatacgggctcttttggccacgtcgataacaagatcgtaacgattttcataagtgttaatgagttttcctattgcgggattaagcattttcaagcacctcgttaattaaatttatatttcgctcggtctttcggcggtcggaaaggattattctctcaaaatcctcggccgcgtcctccaaccggtcgtttacgacaacataatcatagtcaaccgcacgtttcatttcaagaagggccttgtcaaggcgcttttcaagctgctcggcggtttcggttgcacgccccgaaaggcgctttttcagcaccgcaagggagggcggcagaataaaaatactgacggcgtcgggcattttttccttgattttggcggctcccaccgtctcaacctccacaaaaacgtccttgccatcgtttatccaattttcaatgggctctctcggcgttccgtagtagtttccgcagtattcggcatattcaagcagcttgtcgtcctttatcagccgctcgaaattttcccgagaggtaaagttatatttttcgtcgtcgctcttgtctcttttcggccttgttatggtcgacaccgaaaattcaaaatccccgtgagcggcgaaatatgtctttaaaatcgtgtcctttccgcttcccgagggaccggaaataataaaaagtcttcccttttccatgttatcctcccaatttcccggcgctttccattccggcaagcagccgctcgggcgtcagatatgaaagcacaacgtgcccgctgtcgcagacaatgaccgaaccggtttttctcccttgggtggcgtcgatcaaaagcccctgtgctctcgcctcggtgaccaccctttttatgggggccgaatcgggatttatgaccgaaacgatacggtcctttgccaaaagatttccgaatccgatacctataagctccataccgtcaccctattcgatgttttgaatttgttctctgattttctcaagctcggatttgacgtccacgacaacctttgaaatttcggtgttttgggacttggagccgattgtatttatctcgcggtttgactcctgaagcacgaaatcgagctttctgcccaccggctcgcccgagtcgagaagggctcttatctgagcaatgtggctgcgaagcctcaccgtttcctcgtctactgcgattttgtcggcaaaaatcgccgcctcggttattattctctgctcgtcgacgcttttgtcctcgagcacctcggcaagctttgcctcaagtcttttgcggtatttttccaccgtctcgggggccttttgctcgacaatttcaaccatgcgaagaatgttgtcggtctttgaaaaaacgtcctcataaagcttttgaccctcggtctccctcatgaggataaatttatccaccgctttttcgaccacgggaagaacctcgttccagacggcctcctcgtcggtttctgcctttctcaccgaaataaccccctgaaatctcgaaagagcctcgggcgacacctttccgtcggcgccggttatttcggcaagctcggaaagagccttggcatatccctttgcgagagcggtgttgaccgtcacggtgcaatcctcgtcctcgcgggcctcggccgaaaggtaaaggtcgatttttcctctcgacaccctcgagcggacataggacttgagcttttcctcaagaaatcccatcgacgaaggcagacggcaggaaaattcaaaatatctgtgattaaccgacttgagctcgaccgaaatatttcttcccgaagcgtcggactcaaaacggccgtatccggtcatacttctcaccatagtgaaacatccccttatacagttctttatattataactcccccattcccctttgtcaagatgcggcagcctttgcaaaagcctcccgcagacatttttttgccgcacaatcggcgccagggaaagaccaatatcctggaggcagtt

SEQ ID NO: 3959 - DNA, 2010 bp, Unknown
  16S sequences of unknown bacteria
ggctattagcagtatccgcgatgttttgggagatatacaggaagaaaaactcgagcgtttattagaaaattatatccataagcacgaggaatatggcgaagaacttcatgctcttctgtcagccaatcaatccccgccagaagaaccaaaagcttctgctaaaacgatggctaaggtagtcactggcgttaagctgtttgcggatcattctacatcccagattgccaatttgatgattgatggatgcaatatgggagttaagtccatcagcaaataccagaaccagtataaaaatgccgatcaggagagcattgaaatatcagaagaattagttaaaattgaacagcatatggccaatggtctgcgcagattccttgcataaaataaaagccagtgtttttctttatcaaaaatgcaaaaaaccagcttttcattgactttttgaaataaatgtgttatagaataagagtataaaagacgttgacagagacagtacgctttaagcaaaaggtaaagcgagctggggagagtgcaagcccagcacgagtcacttttggcggaatatccctctagagtcgcaggctgaaagaggaatcgactaagctttgccggtatttcaccgttatcgaaagcacatatgttggtatggagcaatgggtggttgaaacgaagcacacgctttcgtcctgtttgcagggcgaaagcgtttttgttttccgtatcaaatgtaggacgatttgggaggtaaacagaatgagcaagtacgagaaagtatccactgatatgaattttgtggatcgagaaaaagcagtggagaagttttggaaagagaaccaaatctttgaaaagagccttgacagccataaagaaggtgagacctatactttttatgacggtcctcctacggccaacggaaaaccccatattggtcacgtattaacccgtgcgatcaaagatatgattccccgctatcagacgatgaaaggccatcaggttcccagaaaggcgggatgggatacgcatggtcttccggtggaattggaagtagaaaaactgttagggctcgatggcaaagaacagatcgaagaatatggtttggagccatttattgaaaaatgcaaagagagtgtttggaaatacaaaggtatgtgggaggatttttccggtaccgtcggtttctgggcagatatggagcacccttatgtaacctacgacaacgattttattgagtctgagtggtgggctctaaagcagatttgggaaaaaggacttttgtacaaaggctttaaaattgtcccctattgtccccgctgtggaacgccgctgtccagccatgaagtagcgcagggatataaagatgtcaaagagcgctcggccattgtccgctttaaagtaaaaggggaagacgcttatttcctggcttggactaccactccttggacacttccttctaatgtggctttgtgtgttcatccagaagaaagctacgttaaagtggaaaatgaaggaaaaacgtattatatggctgaggcgctggtagatactgtgctcaagggtgagacgaaaattttggaacactttgtgggcaaagatttggaatataaagaatatgagcctctttttgactttgtaaaaccggataaaaaatgttggtatgtaacctgtgaccgctatgtaacattgaccgatggtaccggcgtggtacacatcgcccccgcttttggtgaggatgacgcaaatgtaggacgcaattacgatttgccctttgttcagctggtagacgcaaaaggcgaaatgaccaaagaaacggactgggccggtacattttgtaaagacgcggacaaggcgattcttgtagatttggaaaaacgcggccttttgtttgaggcgccggtgtttgaacacagctatccccattgctggcgctgtggaaccccgttgatttactacgccagagactcctggtttatcaaaatgactgcggtaaaagacgatttgatccgcaacaac

SEQ ID NO: 3960 - DNA, 20909 bp, Unknown
  16S sequences of unknown bacteria
gggaagcaggcagtccatgagcatgacttcttccgggatgataacatattcggatgcgccgccgcagtacttgtaggagtatccgggagaagcgagagaacccttgtagtttatagcaggctgaataacaaacttatcgcccgccttgaacttgtccgcccactttgcgccgacctttacaatcttaccgcagaattcgtgaccgataataacgggattttccgcaacatcgtcgggaactctcttgtgagccgcgccctgtgatgcagccttatatgacgacatgcaaatactgtccgagatgatgcaggcaaggatttcgccgtcctttatctcgggaagctcgatttcctcgagacgaagatccataacgccgtgcagtcttactgctcttgttttcatgataaaattctcctttgtggatatggatatgttagtttaaatttgattgccgtaaaaaattactttttagctcttgtacattctgcggacttactatataatattatagagttttgtatacagtctcgcgtgaacggatggctttcagctttttcatcacgttgttgtccttgccgaaataatcatgcagcttcatgtattccctgtaaagctcgttgtatacgacgacattgtgcggtatcgggcggtaaaccgtgtcagagagcgaacccatgtgctcagacgctttggcaatcgtgtcgtattcgcctgaggcatatgccgcgagaattgcagagcctgtcgccggaccgtgagccgagcctgctatccttatctcctgaccgagcacgtccgcgtatatctgcatggtaacggggtcctttaccgctatacctccgcaggctgtcaggtcggttacgggaactccgtgcgagttgtagttttcaatgaccgctctgcatccgaaagccgtagcttcaacaagcgcacggaacatttcctccggctttgtcgtgagactcattccgacgaaaactcccgatagatccgagtcgacgagaatgctgcggttgccgttccaccagtcgagggcgataagtccgctttctccgggggacagctccgccatcttcctcacgagcagctttagtgtggatataccgccttcttccgcttcctttttgtattcggcgggagcaagagtgtcggcaaaccacgcgaaatgatctcccacgcatgactgaccggcttcgtaggcgtacattccgggaatgaatccgtccttgactatgccgcagattccgggaacgtcgtgtatctcgtcggagagcagcattgtgcaggtggaagtgccgagtatcatcagcatttttccgggagtgcatatcttagcggcaggaacagcggcgtgagcgtcggaaagatttacggtgactgcgcagcttgtggtaagtcccgtgagcttagccgcgctttcggttatgtaacccgctctctcaccgacggacagcatctttactttgccgtagccgagcttttcttcgggaacgttctccattcgagggtcgagcgcacggagaaaactcttgctcggatattttccgtcaatgaagatggacttgaagcccgcaacggctgatgagcgggtttgttctcccgtcagcatccacgtgacccagtctccggcttccataaagtagtcggcggcttcgtatacctcgggagcttcctcgagtatctgccacattttcgggaacatccactcgctttgtatctccccgccgtacagcctcagccagtcctcgccgcgttcacgagcaatatcggtgagccgtttcgcgtaaggggatgaggaatgatccttccacagctttacataggcgtagggattctcggcgaaccgcgggtcaaagcacagcggagttctgtcggcataaacgggcatgagcgtgcatatcgtaaagtcaatgccaagtcctacgatgtcttccgccgaaacgccgccttcccccattacctcgcgtatcacgtttgcaagcacgtcaaggtagtcctcgggagactcgagcgcccagctgtcaccgagctttattttctcctcgtcggatgtcagaagatacttgtccatgacgccgtgaggatacggataaaccgagcttgcaatctcagcgccgtcggatgtgcgaagaagtaccgcgcgaccggataacgtgccgaagtcgatacctatagtgtatttttcgatgtcgatctccacccctcgtcaaaatttctacacctacattatactccaaactcaaattaaagtcaatttaaaaatttgctcaaaaagaaaaatagtaacacaattctcttgtattgtttatcatgatttgttataataaaatgtgatgaatgttatttacgaacagaattgcacttttaacaggagagtcacatatggacgacaaaaatcttaacaacgaaaacgaatccaacgaggcgaaaaaactgcgcgttctcggcggaggagaagaggagcatgacgaagagccgctgaaaatagacaagctcgggaacttctggtatcactaccgattcagaataatcatgatagcggctttcgcatttatcataggcatagcgtcgtggcagtttctgacgcatcagaaccccgatataagccttatttacgccggacccgagtacataacagcgaaccagaataaggcgttctgcgaggttttgcagggtatgatgcccgactacaacggcgacggaaagaagtacgcacagctcaacgacatgatattcatgagcggcgaccagatgagcgactatatcgaaagcgttgccgaggaaggtgagactgcggcagtggacaagctgacgaacaagcagacgagcgaacgcttcacctacgagattttcggcagcgagtcgtccatatgcattcttgcggaagaccagtatcagtcggttgcttcggagagcggattcatgccgctgtcggagatatttgacgagattcccgagggggctatagacgactacggcgtgcgcttctccgagacaaagctgtgcaaattctatgacgccgcaaaaatattccccgacgacgccgttatcgcgctgagaagactttctacaatgtcggtgttcactggcaagaagaaggcggagaaaaagtacgagtacaacctcgacttcttcaagaaaatgctgaccttcgattaccccgagggatatgttccgccggaagataccgcatcagctgaataatcctgcaaaataaagataacaatatccgtgtccgttgtaactgcaacataacagacgcggatattttgttataattataaaaaagctcttgacaagaatatcattttgtgatatacttattgagaactaatcttaataagaacggcggtgagaaaaatgtcactggtaaagcacgccgcgggacttgcaatgttctctggcatgacggacgaagaaatagaacaggtcgttcagtgtaccggagctgtcgtgtgcaagtttgacgcgggcgagtacgtctcaaagccgggaagccgttacaagcggatagggataatgctctccggaaaagctcgtgccgaatggatagacccggacgggaacaaattcatcctcgacaccatagaaaagggcggcatattcggcttgtcggctgctatcagcgagaaacacggcgaaaacgctcccgagacgtatgtcagcgcggaagagagctgcgagatacttatgatggacgcgagccgactcttaaacgaatgcgaacggcactgcgacgcccaccgaaagctcgtgtacaacgcaatgttctcccttgctaaacgaaacgccgctctggtgtggaagtcctgccatatgtcacagcgtagcatgagaaaaaagctgatgtcgtaccttgccgtgaacgagcgggagagggaaaagccgtttgttatcccgatgaaccgacaggagctggcagactatctcggcgtagacagaagcgcaatgtccgcggagctttcaagaatgaaaaaagacggacttatcgaatactgcaaaaacgaatttacaataataaaactatcataatcggaggtttgagatgaaaaaagtaaccgaaagcgtattttatgtaggcgtaaacgaccataatgtagaccttttcgagggtcagtaccgtgttcctcagggaatgtcgtacaattcctacgttataatggatgaaaaaatcgcggtgatggataccgtggacgcgcacttcactcacgaatggcttgacaatgtcgcagaggttttaggctcacgcaagcccgattatctcgtagttcagcacatggagcccgaccactccgccaacgttatgaacttcgtaaagacctatcccgatactacggttgtcgcaaatgtaaaaaccttcaacatgatgaagcagttcttcggaacggattttgagggacagagagtggttgtagccgacggagaatcactaacactcggcgcacatactcttacatttgtgtttgctcccatggttcactggcccgaggttatggtaacatacgacagccttgacaagctcctgttctccgctgacggattcggcaagttcggtgcgcttgacaacggcgaagaaaccacacccgagacatggacggatgaggcgagacgctactacatcggaattgtaggaaagtacggcgtacaggttcaggcgctcctcaaaaaagccgcaaagctcgatatcgcaaagatactcccacttcacggtcccgttctcgaggacagacttgactactacatcttaaagtacaacacatggtcgtcgtatactgtcgaggaagaaggcattgttgtggcttacacctccgtctacggcaacacaaagcgcgcggctgagataatcgcggaaaagctgactgcaaagggatgcccgaaggttgttgtgcatgaccttgcgagatgtgatatgtcagaagccgtagccgacgctttcagatacagcaagctcgttttagcaacgacaacatataactccggcatattcccgttcatgaaggagtatatcgaccacctcaccgagagagcattcaaaaaccgcactattgcttttgttgagaacggaacatgggcgccccttgccgctaagataatgaagggaatgcttgaagagtcgaagaaccttaccttcgttgagcctgtcgtaaagataaagtccgcgctgaacgacgaaaaccgcgagcagattgaagccatgaccgatgagctgtgccgtgaatacattgcgcagtcgtccgacagagccaacaagaacgacatgaaggcgctgttcaatatcggatacggcttgtatgttgtcacctcaaacgacggcaagcgcgacaacggacttatagtcaacaccgtgtcccagctcaccgacactccaaacagagttgcggtaacgataaacaaagcgaactactcccaccatgttatagaacagaccggaaaaatgaacgtgtgctgcctgtccgttgaagctccgttcgctgtgttcgagaatttcggcttccagagcggcagaaacgttgacaaattcgcgaaatgtgaggttgatataaacaactacagaagcgacaacggtcttgtgttcctgcctaagtatatcaactccttcatgtcactcaaggtcgagaattacgtggatctcggcacgcacggaatgttcatctgctccgtcaccgaggcgagagttctcagcgacaaggaaacgatgacctacacctactaccaaaacaacgtcaagccgaagccggaaactgccggaaagaagggctttgtgtgcaaggtctgcggatatgtctacgagggagatacactgccggaggactacatctgcccgctctgcaaacacggagctgccgactttgagccgatagaataaggcaaagataaataaaagaatctccgatacctaaagcgggcgtcggagattttcttatgcaatttcataaaaaagaaaacagggatgaaccctgtctccttatttaagctttaagtttaacttagtgcttcttagcaacagcgtagcctgcgagggatacaacagcggcagcagcagcgataatacccatatcgaaggtctgaggagctgtttcagcggatgcatccgcagcgggagcttctactgtttcttcagcagcagcttcagtttcagcaactgtttcagcttctgtttcttcagcagcagcttcagcaactgtttcagcttctgtttcttcagcagcagcttcagtttcagcaactgtttcttctgtagcttcagcagcagcagcgtcgagaccggaacctgtcagaacgagttcggacatctggaagcatccggagagagcgccttcagaggtgaagtaaacgtaggaaacgttttcaacgggtgtaacagctgcagcatagtatgtgaggtctgcttcttcgaagaatgtgtcgtcaccgtaagcgataggagtccagttttctccgtcggaagaaacataaactgtccattcgaaaggagaacggttgttgtactgggagttgtcgttagcggtagccatgatgataccgtcaacagttacggggttagcgaactttgcgatagactgtgtcgggaattcgcctgtgcagaactttgtagctgtgtcgttgtcccagagcatgtcaggaccttcattgttgttaccgttggagccaacaacatatgtaggaacgagaaggggagtcttgccgatggaagcagcagcttcttcgagtgtagcgtagccggcgccggagttagctgtgagttccatgttcggtgtgtcaagaacagggcattctgcgggatcttcagcgtttaccatagctgcaagagatacggtaacaagagctgaaagaaggattgagagaaactttttcatactttttacctcataaaaaatattttttaataacaagtacggagtatgcccggcttgtcatgatgccattataccacaaaaagaacctgttgtcaattacaaaagtacctattatgaaaaaaatcattcacaaaagtgaaatatcgttacaatgcacgaattaaacacatttttttctgcggattataaaaaatagatatatagctaatatatagccataatctattgtgcattatagcaataagcttacaaagaaaattcggcgcggatttaatcaaaaatgagcaaaaacagacggataacgacagcttttcatgccgtattcgtctgttttgattgtgagcacaagactacagttatcgctttattgtgtcctttttacgggtcttacgtacttccagaaccttgacgtgtcatgatagaagtagaaaattctgccctcggtcatgtcaagctcatatcccgatgaagcgtagtcaaagttccgcatggctttctcaatctttgcttcaacagcggcgttttccgtctcaaaatcgaacggaccgtgctcgaagacgatgtattctccctcgggaatttcgctcatcgtcatttgagagggaatctctccgtcatagtcgagcggaagacgaactccgtagcattcaatcagcggaattccccagctgcatattcttcccgcatgatcgtttatataagccatgatctgtccgctgccgctgtcgtgttccgttccgcccatgtcgtcgagctttccctttatgctgtcgagaagtccgcatattgtgtcgcagtcctgtccggggatgaggctctgcttctgccagaagtcccagtagcctatgcttttgtagtttcgtatgtgcaggaatttgtgcgccggaatcgtgataaagtaggtttttacctctccgtttgtgccgttcattataaatcctccgtgttccattaaatagcagtcgaagggttttattattgtgcggagtacgacgggacggggatttttgcggaaactgtgcggtgtgacaccgtatgcttctttgaaagctcttgtgaacgcctcgtgtgaggaaaacccgcagtcgagtgcgatatcaagaagcccctcgtcagtgtcccgcacccttttcagagcgaaagccagacggcggtatctcatgtagtccctcagccgcattcccgatatttccttgaacatccgtgaaaagtggtattccgaatatccgaacttccgcgaaagaatggacaaagtaaggctctcgccgcagttttcttttatgcatcggtctatctcatcaattatgctctgcaccgtcttgtgcacagtcttgtgccggtcgtacattttttccctccgaactgttgatgatgatattatataacggatgacgtggaaaaacttgatacggattgccctttacgccgaaagatactccgactgcgcgctgaaccagtcgagaatgcccgcacaaaagccttccgccgcacgctctataccactctcactcatgagctgctcatattcctccgcgcttgtgataaatcccgtttcaatgagagcttcgggaaatttcggattacggcacatcgcgagcatctggtactgtgaaccgcgccagtatcgtccgagagaatccgcaaccgccgtactgacgcatcttgcgagaagccttccgccgtccatgcaccacagaccgagagttccgcgtacacgggttacgtccgaggtgtagtccattgagttctggtgtatcgacacgcacaaatccggctcaagctcctcaagcattgccatacggctgaaaaggtcgagcgttgtgtcgccgcttcttgtgagggttacgtccgcgccgagcttttcaagcttttccgcagtcgagagcgtgattttcaggttcaaatccttctcgttcatcccgtcaggtaatgctcccgccgcacctctgtcgtctccaccgtgtcctgcgtcaagcacaatgtttatcccgtcaagcggagtggaagagcgcgtgtctacggatatcgggtttctcagcgacactataacgtttccgtcacggtagtcaaggtcaaagccgtagaagttttccgtgtcgtacagctcaaacgaataccgtaccttgccgtcgagcttcacggtctcgcatgaggtgagaagtggatttttctcaataacggcgtcgggcgcggagtcggagttaatgccgtagaacgtcaccacaaactttccgttttcatctatgcacccgttgtaagccggatatccgtcgcaggcgagagaaaactccgtgttccgtccgttgtttgtcactttagcggaagacaaggttgaaaatgtgctttccgtcgtgtatcccagctcttccatgtcgtcggcgtaaacatatccgcccattctcagcttgtacataccccgccagagtgagagcgcgacgtcctccattccggctgactgaacggtgtagtcattgtaatacgagctgttttccgtaattttcagctgagtgtagtcgtttttcgcgcgtacctttataaaagtgttctctcccatcgagcgcaccgcaggaccgtcggcttgtgtagttccgtctcggtgaacaagagtgaattttatgtttccgcagtcctttatctcaccaacggcagtttcgggcagatccgcgctcccgctgtatgtcactcccgtgtaacccgacgcggcgtgctttgtgacagtctcctgcgtaagttcggtttcaactccgcctatgttcaccttgaccgccgcaccctcgggagcagtgcatgagacgtagattttcctgtcgtgagtggcaacgtcctgcgcaggataggtatttactatcgagaggttgtcgagcgacagcggttctgcttcctttgtcggaacggcggcggtgtcggggtcgtatgtgagagtgtagacgtatgtcattccgttctgctcaaagacaaagctgttctcccctttttcaagcgtcacgtacatattgaaaataccgctttttgtctggcttatcttttctccgttcatggtgagcgggtagtatgggtcagccgagccgagaatgtatgtgttcgccgaggtcatgacagagccgctcgcgggggaagctactgccactccaagtccggtcgactgaatatcggtgtaaactatgtcgtcgcggaaggctgagataatgtcgtcgctcgcaccgtttatgtttcggtttatctcgtcgtagccgtagaatatgcttccgcggtaagccttctcgcttctggcgtatgaaacctgctctgtcagctgtccctcgggagaatcccagtttccgtcctcgtatcggtatgaagcgtgggagacgtacagcttaacattacttccgtcgagcactgcgttccaccaccgcacaagaatgtcgaaagccgagtttgcgtcatcgaatgtccagtatatctgcggggagatgtagtcgatgcagccgccgtcaatccaagccgcagcgtcgcagtagagtgagttgtacgcttcaaatccgttcgtgtcgcttccgccgttctcgccgttgttgttctgccagatagcgaagggagacacgccgaacacgcactccggatcagtctcgtgaacggtctcgtaaacgcttcgtattatcttgttgatgttgtcgcgtctccagtcggcaatattgtcaaagtccgcgccgtatttttcgtattcctccgcgtcgtcgaactgtgcaagctttccgtcgtcgccgtatacgggatagggatagaaatagtcgtcgaaaactatgccgtcaacgtcgtattttgaaactatctcccgcacaccgtcagccacaagctcgcgcacctccggcattcccgcgttgagatacagctttccgtcgtcatatgccacagtccagtctggatggagctttgctggacttttgtcgtcaagtgaggagatgtcgtgtgtgttcatcgtcactcttagcggatttacccacgcatgaatgaaaatattcctctgatgagcctcgcggacgatgtattcaagcggatcgaaaacgagctttccctcggacgaaattgagcctgacacgggaaagatgtcgctgtcgtaaagcgcgtcgcacgatggtcttacctgaaagaatatggtgttgagcttgttcttctcgcaggtatcgagtatggagtcaatctccgatttcagctcctctgcggaaaggtcggcacgggaggggtagtctatattgtaaaccgaagctatccatacgccgcgaacctcggaatccgggtcaagtatgtgtcttagctgaatcgaggactgtgatttatcgagagtatccgcggtcatgtcgtagtcgtcgcggaagcatgaggacagcaaggacgtgagcataataattaatatgaaaagccaaagcgagcgttttttcatttgctctcctttcgtggaggtattgtgtgattttatgataacatacgacaggaaacaaatcaagcgtatgattattaaagttgatgagaaaaatttgactgcgcggttttgttctggtataatctatccgtatatttcagattacacggaagcggggcaatatatgaaggaaataattcttgtccgccactcgattcccgacagatgtcacgtaggggacatgccgctgacaaaagagggaagagcgaaggctgaaaagctgcgcatgaagctgagcgggtataagataaagctctgcgtttcgtcggacataaggcgcgcggatgagactgcggagataatgttcggcgcacacaggggtgacaaaagactgcgcgagagggaatgcggcgaggttttcgaaaaatccgactggataaagcagtacgaggacatcatgtacaaaacaagcggcggggagacattccgtgaagtcggagaaagaatgggcgggagtattgccgatatcctcagtgaacttcgggaaggcgagagtgcggcggttgtaactcatgcggcggcgatatgcgcgtatctcatctcaatcggagcggatattgctgttaccgacgcggaggagaagaagagaaggatatctttcggcggtgagtgcgtgcatgagggcggtatcaaaactccgtccgcgtttatcgtatcatttgacgacggaaaagccgcaaaagtcacatatatcgaataaatattaattttttttgaggtttgagtttgtacttgatttagtcacggttatattttataatattataggaaaactatagctaaggatactctgaataaccaccttaaatcagaggcttcctaatcaaggaggagaacgaattgaacggaaacgataacggaaagtctcccgaaagattcaccgcaaaccgaaacagaacggataatcagaataccgcggcgcagaaccaaaacgcaaaaccgcgattcaagataaaagacggaaatataataaggataaatcccgacggaacaacgacatcaagaccgctgaccgacgacgagcgacgcagacttgaagaagcccgaatgaacgccgccagacagagacagtcatcaagcaccgacgaagccgcaagacgcagagccgaccagaaatacctcgccagaagtcagacggacgccgcggaacagctcggagttacaggaccgagtcccgcagaacgccgccgcagaaacgacaacatccgccgtgaaaatcaggaaagaagacagagaagccgcaaggtcaaggtaaacccgggcgcggttgttttcgttttgctcatggctcttgtagtcggcgcgtcggcaagacagattaaggtaaacgagacgaacaaggcaaactccgagagaaccaaccttgtatatagcgaaaccgaatacgaaacaaaatccggcacaaccgagagcgaaatcgtagaagaaaacattcccgcagacaagaatctcacgattttcgacacaaagcaggtcgcaaattccgagatacataacggaaatctcattctcgtaaactatgagcatgagtacgtcgcgccggacagcattgacctcacaaacgcatacgaacagcgcaccggaacgactgaaaccggcagaattaaggtatcgcagacgacgacaagcatggaatccgaagcgttcgcggcacttgagaggcttgttgtgggtatgaagactgctacaggcacatcggatctcatgatagtcagcggctacagaacgtatcaggatcaggttgacatttacgatggatatgtcaagtcaaacggcgaggattacgcaaaggcatacgtcgcgaaccccggctacagcgaacaccagacgggacttgcttgtgacctcacgttctatacctccgagggatattccgtgccgatacccgattatgaatacggctcatgggttcccgaaaactgtatgtacgaaggctttgtcagacgctatcccgaggacaaggtcgacatcacaaagataaactacgaagcatggcatttcagatatgtcggaataccgcacgcttatgccatgaccacgctcggctattgccttgaagaatatgtggattaccttaaaaactacacgagcgacacaaagctgctccacataaaagaggacatgacgctcgaggatattgattcttcatctgtagcggagagcggagtgcagggtggatggctcgcgtactatgttcccatgtccgagggagagagcaccgatattcctctgctgcgcggcgacgcatattccgattacactctgtcgggcaacaacgtcgacggatttgtagtcacggtaaagctcggctgagacgtttcatttttccgtgatagtttgttcgccgaagttactttcataattcaaccaacatttcatgcgttatcaaattcccgtcacattggcggaatataatatagccagaacaagagagaagcttgttggataaataatttgataaaaatttcagataaatatagaaaggtgaatgttatgaaagaatttgatatgaacaacaacgaaatgaacgagcagaacaacaataccgaaaacacaaacgtaaacgcagattctcagaacacgaatcctcagactgtaaacacacagaacaccgagaatcagactcacgatgcaaacgagaacgtcaacacgtccggagtaaacaacagcacaacatctgttcccgaaaaccaccgcacagagtccccgtattcgagaaacccgtattttgaaggattctcacagaacaaccagtccgcgcagaacggacagcagaacccctacaataatccgaacggacagtacagccggtacacacagaactcacagtacggctacaatcctcagcagaacccgcagaatcagcaaaatgcgtacaactacagccacacatacaacgcaccttaccagggtcagggacagatttcttacacaccgaacgctcccaaggctaagaaggaaaagaagtcaaagccggtaacccgcggtgctcttgcggcagtggttgcgctttcggttctcctctccggcggtataggatacggcagtgcaatgctcgcgtcgagaaatgtatcagagcctacagtaactactgacggcagtacatccactcccgcttccactgctaactcaaacggcggcaacgttgtgatttacagaagcgtcgacgaagtaaagacttcgacaggcgacgacagcacatacacaacggctcaggtcgcggctatggttaaggattccgtagttgagattaacaccgaatactcctccacctcccgcggctggtacaactacgttcagcagggcgcaggttcgggcgttatcatctccaccgacggctacatcatcacaaactgccatgttatcaccgatgaagacactggcgcggtagcagacagcatcaccgttagacttacaagcggcgacgaatacgatgcgtccgttgtaggttacgactccgaagccgatatcgctataatcaagattgaagctacgggtcttacagcggctcagtgcggcaacagtgacgaccttgctgtcggcgaagatgttatggttgtaggcaatcctctcggcgagcttggcggcactgtaacaaacggtatcgtcagcgcaacacagcgtgaaatcgaagtaaacggcgttaagatgaacctcatccagacaaacgctgccgtaaaccccggtaactctggcggcggtatgttcaacatgaagggtcagcttatcggcatagtcaacgcaaagtcaagcggtaccggcattgaaggactcggattcgctatcccggtaaacgaagcgctcaatgtctccgaacagctccttgaatacggctatgttcgcggcaagactatgataggcgtatcgttctccgaggtaagctccaacagcttctacttctattataacatcaaagccggagtttatgtcgacagtcttacaaagggttacaatgacgatgttttaaagcccggcgacagagttgtagctgtaaacggcaatacggtatctacagtatccgagataaagtcgtacgtgacaagcgcatccgtaggcgacaagctgacattccagattgaacgtgacggcaagctcatggaagttgaagtaaagtgcttcgagaaggttccggatgcaggcaataacattgagttcagcgaaaacaaccagtccgaaaccaccggaacaagcgcaaataagtataacggcagctatttcggaaactgataaataaaaattaacattacattgggaagggatgctgaataagtaccccttctcatgcgtattataagacggaaaaaggagcagcaatatgtataagattcttgtagtcgacgacgaggaaatgataagacggcttatagcgaaatatgccgtgtttgaaggacataccgttaccgaagcgaaggacggaatggaggcggtcaagctgtgccgtgaagaaaagtttgacattatgataatcgatattatgatgccggagcttgacgattctcagcctgccgcgaaatcagaaagttttcaaacattccgataatcatgctctcggcgcgcggagaagaatacgataaaataaacggattcgagcttggtatagacgactatgttgtaaagccgttctccccgaaggagcttatgctcagagttgacgccgtgatgaagcgcacatcgggaagaatggacaacaaagcccccgaagcgccgaagaacgagattgtgtcattcgcggacggcggactcaaggctgacctcaccgcgcgtatcgtttacgttgacggagagagagttgagatgacgcctaaggaatacgacctgttcttctacatgattaaaaacaagaatatcgcgctcactagggacaagctgataagcgaggtttggggatacgattatttcggcgacgacagaactcttgatactcacataaagctgctcagaaagagtctcggaaagtacgccgactatatcgtgaccttgaggggagttggatatcgttttgacccggacagaaaataagcataaaagtgcgccgtctgaacatatgtcgagcatgaaaggaaagctgcttctcgcgtttcttttcttcggcgcgatagttatagcggtgctgtggttctttcagacggtgcttctcggagatgtttaccgttctctaaagctgcgcgacctgaaaaaatgcgcctccgaagtgactgaagctgccatgagcgacacgacggaggactacgctgtccttgacgacgctgccggtcttgcttcatcaaaaagcggtatctgcatatccgtctatgagatatcgtcaaacggacaggagaaaaccggaacgcgcgtcgtggagcagcacctgaactccttctgcttcatccacaatatcggcagcccgcatctgttaaattccctctaccagaaagcgttaagcgacggcggggagacaatggatgaggtttctctcgggcagatgttctcacgcgacgccgatgaagtcagtgaaaacgtgattttcgcgaaggttatagacaaaaacgacggcagagagctgctcatgctgttcaacacggagcttattccgcttgactcaacggttactacaatccgtatcgagcttatctatatcagtatcgtgcttgtcgtgcttgccgttgtgctgtctcttatcctttcaaatcatatgtccaagccgatacgcgagatgagcggagaagcggcaaagctggcactcggcgactataacgtaaacttcgacggcggaaactgcacggaaaccgtaaatctttcggcggcgctgaacaaagctgcgtatgagctgtcgagacttgacaaaatgcagaaggatctcatcgccaacgtctcgcacgacctcagaactccgcttaccatgattgcgggatataccgaggcaatgcgcgacctccccggagaagctacgccggagaatatgcagatagtcattgatgaaacgaaccgtctaactacacttgtaaacgatatgctcgaggtcagccgatatcaaaacggtatgcagaagctgaacataacgcacttcaacctcacaaacgttatcagaacgacgattgaaagatacgcaaagctgcgggagaaggacggatacacgataaagttcgagagcgacagggacgtattcgtgaacgcggacgagcagaggatattgcaggtcgtctacaacctaatcggaaacgccgttaactatgccggagacgacaaaaccgtaataatcaggcagacggtagagaacggagaggtgcttcttgaagtcatagaccacggaataggcatacccgaggatcagctcccgatggtgtgggagagatactacaaggtgaacgacttccacaagcgcgcaaatatcggaacgggactcggactttcgatagtcaagaacattctcctgctgcacggagcgcagttcggcgtgaagagcaaggtgggagagggcagcaacttctggttcaagctcaagactgccgatgaagctcccgacaacaaataaacaaaaaacaggacttgtgatttcagaaatcattaagtcctgttttattattctgtttaaaagatttagtcctcagcgtcaacctttgcgtcagcgattatcttctgagcaacggatgcgggaacttcttcgtaacggtcgattgtgaagtcgaatgagccgcgtccctgagacatagcgcggagagcaatagtgtagtcggtcatttcgcccttcggtacatcagcttcgagaactgtgtagccggcttttctttcgtgaggattcataccgagcacacgaccgcgtctcttgttgaggtcgccgataacgtcgccaacgagagaatcgggaactgtaaccttgagtgatccgataggctcaagaagaataggcttagccttcgggagaccttccttataagcaagacgggctgcaagcttgaaagagatttcgttggagtcaaccgggtggtaagaaccgtcgtaaaggtctgccgcgaggttaactacgggatatcctgcaagaacaccctttgtcatagcttcgagaagtcccttttcaactgcgggatagaagttcttcggaacggtaccaccgacaacagactgtgtgaatgtaagtccttcagcgtcgccatgtgagaatctcatcttaacatgaccgtactgaccggaaccgccggactgcttcttgtgctttccttcaacgtcggacgtacccttgatggtttcgcggtaagctattttcggagtttcgagaagaacggtagtgccgtagcgtgacttcattcttgcaacgagaacgtcaagctgcatatctccgagaccggaaattgtcatctgctttgtttcggcgttgttttcgtatgcgagagtcttatcttcttcaagaagacgagcgataccggtggaaatcttgtcttcgtcgccctttgcagcgggagtgattgccattgtgtagtaaggatgcgggaaagcgatctttctgtattcaaagtcggaggaaacggtgagtgtatcgtttgtgtttgttcctgcgagctttgctatcatgccgatgtcgccgcagcagagagatgtaacttcggtctgcttcttgccgcgcatggtgtaaatgtgagccatcttttccgtcgtgccggatgtaacgttcttcattgtgaggtcgtttgtgagtgtgccgctcattaccttgaagaatgtcatcttaccaacgaacgggtcggcgatggtcttgaatacgaacagtgagcattcgccgtctgtttcgatgggcttgtccttgaaggagtcgccgtcgatgatctgctcaaccttcttagcggtcgggcgcgggaatgaatcgtgaatggtgtcaagaaggaatgtgatgccccagaggtttgtagcgcagcctgagaatacgggaacgatgctgccgtcgatgatgccctggtggagagcttcaaccgcttcttcctgtgtgatttcggctgtttcaaagaatttgtcaaggagttcttcgcttgtctgcgcaagagcttcgttgagcgtgtctgtgtatccggcagctatgtcttcgtcgtcggagttgaaaggagcgttagttctcttgccgcttgcgtcgaatgtgtatgcttcgcgggagataaggttgaggaacttaacgtccttgccgttctttacgggaacgagaagagggcagacagccgcgccgaacttttcgtggagctcgttaaatactttttcaaagtccgcgtcagggtcgtcgcacttgtttacgaagaaagcgcagggaatcttagcttcctgagccttatcccatgcgatttcagcgcctacttcaacgcctgcttttccgtcgagggcgataacagccgcgtcagccacacgtacagccgcgtcaacttcgcccgaaaaatcaaaaaagccgggggtgtcgataaagtttatcttagaggtttcccacataacgggagcgagtgaaagcgtaagagaaaatccgcgcttgatttcttcggggtcgtagtcgcagactgtgtttcccgccgtggtcttgccgagtctgtcggttccttttgtaagatacaatgccgcttctgctatggaagtcttgccggatccgccgtgaccgagcagaacgacgttgcgaatgtttttggttgtgatctctgccatttttgtctccttatatgtaaagtgaaaattaaatacaacatgattttgttcaaaagttgaacgggtgagatgaaatatactgtgtgatttaacaaaactcacctctcccattatacaacaaaaaaaaacggattgcaatagacttgagacaacaaaacggtgttcggagtgtaagttatttaaggtcaaatttgtgcgaaatgacgaaaaaatctccgacgcacccaaaatattgcgatatttgcagtatcatgggtttgccggagaatcgttttaggttgttttgcgggttgtgccgaggtgttactttgagagcgcttcctctatctcacatatgtacattttgtgaaaatcgagctcagcgtaggtgtacatcggataaaggtcagtcattttctcgggcgagatgaagtcggcgtagagctttctcgttttcagcacgagctttgcttcactaaaccacaccgcgcgtccgtgttcggtcatgtcaaaagccggagtgagagcgcattccttagccttgtcgtagtcgcgtccgctgtattttccgcagaacgacagcgcctttcgatagctttcgtcaaagaatgagagcgttatgcggtcgtttctttcggtaaactcgaatgtgtgtctctgcggacgtacgaacacgaatgcaaccggcttgttccagaggaaacctgttccgccccagcttgcggtcatcgtgttgtagtccttgccgcattcgaaagaaccatcgcggtcggctgatgtcacgagcatccagtctttgcctatgagctttatgttgttctcggcgatttcggtcggttcgatatgcttcagttcgttcatacagtctccttagttaaaaattcgacaattgaaaattactgcaattagacattcaacaatcagaaattgtgcaattagaaattgctgccgttccagccccattt

SEQ ID NO: 3961 - DNA, 5364 bp, Unknown
  16S sequences of unknown bacteria
gcatctggacaccgtgttttcgctggaggaaccgctggaaatcaaagaagacggaatgatctggcgttgtcccggtatcacagacgataccgtgaatgtcgtgatgcttctcatggcggcaaaatacgttcatgagacagagccggaacttccctgtggtctgatttttgcagcggatctgggagaagaagggcttggcaatctctgcggcgtccgcgcacttgtcgaccattatgaagaaaatctgtgcggaatggcagcctttgatctgtatcgggataaaatgtatcccatctgcatcggatctgtccgatatcggatttcggcaaaaacaaagggcggtcattcctttctgaatttcggaagaaaaaatgccattgcagagcttgcgggcctgatcggagagctttaccgttttcagacggatgcagcatctcatacgacatacaatgtgggaaaaatagagggaggaacctccgtcaatacgattgcgcaggatgcctccatgctgtttgaattccgttcggaagattaccggagtctggaagcctgcgaaacatatctggaggagaccatagcagcacgccagagtgaggaggtacagtattcctgtgagctcgtcggaaagcggccgtgcgcaagagaaaccgatcctgtccagatggcgcgtatgacgcggtgtgcacagaaaacgctgaaggcagccgatggggaagagccggtatgctccgaagcatccacagactgtaatatcccattgtcgcggcatattcctgccatctgcgttggtttctgccggggcgggggagcacataccagagaagaatggctcgatgccgccagcgtagaagatggcatgtgtgcagcagcagcactcgtatgccggcttccctggatgtgctgtgagagcagaatcgttgtaagggacgggatagaggatcaaaaagagagagaagaaatccggcagctgctggagctgtgcgatcaggattttgttccgccgctttcccaccgcaacagtacatcccagacgaactgggccgagactgaagaaaagacggatggaattgcagaatatctggagaatatctgcagtcagcatgtggtgctgtggaaggaagagggagttgtgcgggcctttatgacctggaaggatcattttaactgtgagaatctggaagcatatccggattcctgctatctgaccaccctctgcgtctggccggattaccggggacagggaatttcggaggaaatgtatgcagaagcagaaaaggacatcgcggcaaaatttccgggaagccggattactctccgtacctggtctacaaacggggcacaggagcatattttggacaaactgggatatggtcttgtcaggcggctgaaggatgaccggggagaaggaattgatacggtttattttgtaaaaaaggaagaaaacgacagataacatggtgcttgcaaatcgcagcttatgttgttacctgggtttttggcttcttgcgtggaacggcagtatggggacctgtaccggtttgtcctgcataccgggatgacttttacagagacggtgaaactttgctgggaggaggtagacttggataggggctcaattgctgtggttggaagaacacgtatacaaagacggattccgctggatgaggaagcaaaacagatcctgatggaacggaaaaaatccgctgcatgggacaatgattttgtttttaccagccggtccggtagcccgattacgcagcagtatgtggcaaaggaattacagaaactctccgaaaaactgattccaccggagaacccgcataagatcaccggcggcgttttacggaatacattcctgtaccggaaatgtgagctggaaggcgtcagtctgtcagtggttgcgaatgctatgggaaccaatgctgagacttgtctggaaaacatagaagagttggtagaattgagaaaacagtacatcaactagcaaaagaataaaggcaaagaggcggaactgtacctggccaggaaaggcagtgcagctccgcctttttatgtccttctattccctttgttccatacaaagaggggaactacgactgtgtcactataacagatataattgcgtcttttccctgagacaatcctttaagttttcgtgcaaaaaagcataatttaatgaataaatagaaaagagctcctgagtattcgtgaatgatctggagtgatctggagtgctataaaaagacgctgttcaggaaattgtcagaatctttctggcataaacatgcaaaaaatgtataagcaaaaaaacctgaaatccgtacacctgcaagccgcgggtggatcagcggcgatatgccgtataaaagtagggggaagacgtgagatgataataatgatactatgcgacttttttcaaggactaagtccatgaatcaccattcagccttgaaaatccgggctttttttgctacaatgaagttcgttttgaagtgctaatatgaaaaactgtcgtattgcgtatagtagtacataagataaatggacgaaaaagcctgtaaatacaaggagatttatgaatactggaactatgacaccgatgatgaaggtttactgtgagaccaaggaaaaatataaggactgcatccttttttaccgccttggtgatttttatgaaatgttttttgaggacgcattgattgcgtcaaaagaattggaaatcaccctgactgggaaggattgcggactcgaggagcgggctccgatgtgtggggtgccgttccatgcggtggatggatacctgaataagcttgtctcaaagggctataaggtggcgatctgtgagcagctggaggatccgaagcaggcgaaggggctggtgaagcgggatgtcatccgagtcgtgacaccgggaacgaatctggatgcgcaggcacttgatgagagccggaacaattatctgatgtgtatcatctgcatggaggatcgttatggtctgtctgttgcagacatttctacgggcgaatatctcgtgacggagctggatggcgaaaaaaagctgcttgacgagatcaataagttttcgccgtctgagatcatctgtaatcattccttctatgtcagtggtgtggatatcgaggatatgaaggaacgattacatatctcggtattttctctggattcgtggtattttgatgacgctttatgcgcacggaatctgatggagcattttcatgtctcctcgctgagcgggcttgggttggatgcgtacagctgtgggatcatcgcagcgggagcacttttgcagtatctgatcgagacacagaagacttcgattgcgaacctgacggcgctgactccgtattcgatttccaaatatatggtgctggacagttcgacgcgccggaacctggagctctgtgagaccttacgtgaaaaaaataagcgaggctctctgctttgggtgctggataaaacgaagacagcgatgggtgcgcggatgcttcgccggtatctggaacagccattgattgaaaaagaagaaattatgcagcggttggatgcagtagaggaactgaaggataatgcgatcacgcgggaagaactgcgggaatatctgaatccggtctacgatctggagcgtctcatcagccggattagttatcagaccgccaatccgcgtgaccttgttgcatttaagacgtcactgtccatgctgccgcatatcaaatatattatgaagagcctgcagtcgcctttgcttgtgcagctgcaggaggaaatggacgagctggaagacctgtttgcacttgtggatacagcgattgtggacgaaccgccgattagcatccgtgatggtggctttatcaaagaaggataccatgaggaggtcgaccggctccgacatgcgaagaccgagggcaagtcctggctggcaaagctggaggccgaggaacgggaaaagaccggcatcaaaacgatgaaggtcaagtataataaagtgttcggatattatctggaagtgacaaattcctataaggatatggtaccggattactatacacgcaaacagacgctgacaaatgcggagcgttatattacaccggagctgaaggagctggaggagacgatccttggatctgaggataagctgactgcgctggaatatgacctttacgtcgaggtgcgtgggaaaattgcggatgagattttgcgaattcagaagacagcacacgcgatcgcaggtgtggatgtctttgcatcgctggcacttgtcgcggaacggggcaattatgtgaagccatcgatcaatgaaaaaggtgttctggatattaaaaatggccgccatccagttgtggaaaaaatgattccgaacgatatgtttatcgcgaatgatacttatctggataatggcaagaaccggatttcgattatcacaggcccgaacatggcaggaaaatcgacctatatgcgccagacggcgctgatcgtgctcatggcacagattggcagctttgttcccgcggatgcagcaaagatcggactggtcgaccggatctttacgagagtcggagcttcggatgacctcgcgagcgggcagagtacgttcatggtggaaatgacagaggtggcgaatatcctgcgcaatgcgacgcgcaacagcctgctcatcctcgatgagatcggacgcggcacgagcacctttgacggtctgagcattgcatgggcagtcgtggagtatatcagcaatccgaagctgctcggagcaaaaacgctctttgcgacacattaccatgagctgacggagctggagggcaagttgccgggagtgaataattattgtattgcggtaaaagaaaacggcgacgatatcgtattcctgcgcaagatcattcagggcggtgcagacaagagctacggaatccaggtggcgaagcttgccggtgttccggatatggtgatcgagcgggcgaaggagctcgcggaggagctgacgaatgcagatatcacggtacatgtgcagggtggcgatgctgagggacaaaaagcaaggaaggcaaagacacagaaatacgatcaggtggatatggatcagatgtcgctgtttgatacggtgagtgattccgatgtgctcaaggagctgcaggagctggaagtgtccacgatgactccgcttgatgcactcaacactctgtatcggttacaaaataagctgaagaaccgctggtaggaggtagtactttgaacgagatcgttttgttgagtcaggatacgatcgataaaatcgcagccggcgaggtcgtggagcgtccggcctctgtcgtgaaggagcttgtggaaaatgcagtggatgcaggggcaaat

SEQ ID NO: 3962 - DNA, 32759 bp, Unknown
  16S sequences of unknown bacteria
tcgacataagtctttttttgaaccactcgcctagcgagtggttttcggagcacaaaaaagcccggggatacggccaagaccttccccgggcttttgcaatgtaagcagtctgattagcctttgtgaacgatctggccgtcgatgatggtataagcgacggtatactgcagatcggtgatgggattgccccggaaaatggccacatccgcatccttgcccacttccaaagagccgacccggtccgaaataccggtgatgacggcgggattgatggtaatggccttccaggcctcctcctccggcagtccggcgttgacggccaggccggcgcacagggacagatactccagaggaatcaccggagcatcggtgatgatgcagatattcagcccggcctcgttgagcacccggggtgtatcaaagctcttgttcttcagctcgaacttgctcttgtcgcccagagtgggtccaaccaggcagcccttgccctctttcaccagctcgtcggcgatgagatggccttcggtgcagtgatccagtgtgatatccacatcgaattccttggcaatgcgcagagcggtgaagatatcgtccgcccgatgagcatgagccttcagaggaatctccttgtgaatgaccggcagcatggcctccagcttcacatcgatggcaggcttcttgttgtttttgggatcggccttgtaatccttccaggcctgatcgtattccacggtgcgggccagcagatcccgcagcaaggcggaagtgcccatccgggtcataggcatcttcttctgggtgccgtaaacccgcttgggattttcgccgaaggcgcacttcatggccaccgggtatttgaggatcatatcgtccacccgcttgccgtgcatcttgacggccgcaaaggtgccgcccaccacattgccgctgcccgggccggtaacagcagtggtcacaccggccgccgctgcctgggcgatggtctcgtccatgggctggatggcgtcgatggcccgtacctggggagtcaccggatcggtgcactcgttgccgtcggtgccttcaaactgaatggcggcctcttccaggccgatgtggcaatggccgtctaccaggccaggggccacaatgcagccggcggcgtcgatgacctgcgcatcggccggagcgttaacttctttgcccacagccacgatcttgccgccatccagcagcacctggccgttttcgatatcttccccagccatggtctttaccaagccgtttttgatcaggatcatgggaaacatcctcctttttctaaaaaccgggccggagagccttgtgaccctccggccctatggaatgatttcttattctgcctgataaacgatctggccgttgatcagggtgtactttgtggtgtactggaggtcggtgagaggattgcccttgtagatgaccacatcggcgtccttgcccacttccagagagcccacccggtcagcaataccggtgatgacggcggggttgatggtgaccgccttccaggcttcctgctcgtccaggccggcgttgatagccaggccagcgcacagaggcagatacttcagaggaatgaccggagcatcggtgatgatggcggtcttcaggccatgctctaccatggtcttgggagtatcccagcacttgttcttcagctcgaacttgctcttggcgccaaaggtggggccaaccaggcagcccttgccctctttttccagctcatcggcgatgaggtggccttcggtgcagtggtccagagtgatatccagatcaaactccttggcgatgcgcagggaggtgaagatatcatcggcccggtgggcatgggacttcagaggaatctccttgcgcatgacaggcagcatggcatggagcttgcagtcatatgtaggcttcttgttgttcttgggatcggcctcataggcgtccatctcttcccggtagttctgggccttgaccagcagttcccgcagcagagcggcggtacccatacgggtcatgggcatcttcttctgggaagcgccatagcagcgcttggggttctcgccgaaggcgatcttcatggcaacagggtttttcaccaccatgttgtccacccgcttgccgcacagcttgacggccaggaaagtgccgcccaccacattggcgctgcccgggccggtgacggcggtggtcacgccatggctgtatgcatcaaagaatgcctcgtccatgggattgagaccgtcgatgccccgcatctggggagtgacgggatcggtcatttcgttgtagtcatcgccttcaaagccgatggcctcttcatccaggccgatgtggcagtggccttccacaaagccaggggccacaatgcaaccggcggcgtcgatgacctgtgcatcggcgggagcattcacttccttgcccacagcggcgatcttgtcgccatccagcagaacctggccgttttcgatatcctcgccggccattgttttaaccaaaccatttttaataagaatcatgggaaacatcctccttttcaatcttactactttatagcttacctttttcccgggaaattgtcaaagaaaagccccttgtttgggtcaaattccccgccttctttttatgcaatttgcaaaaaagccaatttatctttattccttgcccttgcggtaatattcctccatcacctccggagggaccatgctgccgccggtgccccagggcatgaagtgggcctgttccatcttgtctgcaagaccctctttttccagataggcctgtccgtccttgctttccagcagccaccggaccccttccattccggccagggccgaaggctccagagccaggttttcggtgtcccgcagaagagccaggcgtcggtacaatgtgccatcgtccaccgtatagctgccgctgaggaagggctcgatggtcttgcccacaaagctggaggggcggcccacggccaggccatcggcggcggtgagattgtcgatgccaaagtcctggacgcacaccttgtcctgcagcccggtcaccaatcccagcatcatgcagggagcatgggtgggttcggcaaagaagcagtggactgcgtctccataaaccagcttgagaccaaaggccacgccgccagggccgccgcccacgccgcagggcaggaaggcaaagaggggatgctcttgatccacctggacgcccatctgttccagctgccctttcagccgctgggccgccacagcgtagcccataaacagattcaccgagttctcatcgtctacgaaatagcacatgggatcgctttccgcctgacgccggccttcggccaccgccttgctgtaatcctccggatattccaccacggtgactcccttttcccgcagcagatcctttttccactggcgggcatcggcagacatatgcacactgaccttaaatcccagccgggcgctcataatgccgatggacagccccagattgccggtggaacccacagcaatcgaatacttagagtagaaatctctgaatttatcactatccagctgggaatagtcatcctccagggtgagcatcccttcctggagagccaggtcttcggcgtgcttgagcacctcatagatgccccctctggccttgatggagccggagatgggcagatggctgtcgcacttgagcagcatcccgccggggatatgaataccccattccttttccagagccttttgcatctggggaatggcctgcaccggggattcgatgatcccttccatttttgccgtctccggaaaggctttggcgataaagggggcaaaccgctggagccgggcttcggcctccttcacatcagccagagacaggctgcattgtctcagggcctcctccgttcccaccttcctgggattgacccagaaggtctccttgagtttcaccagatcccccaccaccgggaattcctcttcccactgccgggggcttttgccgcaaatcaactgttccatggtttcctccttctccagggcgcaccctggggatattgtaattttcatctttaattagactttttgtataatttttcttttttcttttctcccctatcactataccaagtttcccgggaaaatgcacgaagaatcttttctgtaaattccagaggaaattatgaaaattgaaagattttcgcaaggaaatcatcgaaagggctgtgctatactgtgccggtagtaaaccccgccccttccggccgggtgaaaggaggtcctttgatggatctgttccgcattttatcccagcacgcccagcagcgtggagaccaaattgcggtgtccacaggggaagaaagcatcacctaccggcagctggaggaatattccgaccggctggccgcctgtcttctctcccgcttcggcccgggaaaagagccctttgtggtgtatgggcacaaaagcccctggatgctggtgtgctttctggcctgtgccaaagccggacgggcctattgtcccatagacatctctctgcccgcccagcgcctgacggaaattctggaagagacccaaacgccggtgcttctgtgcacccagtatcttcccgttccccacccccgggccttttctcctgatctgatccaatccctggctcaaagccccggccccaagcctcctcaggaggcccgggtgcagccagaggacattttctatatcatctttacctcgggcagcaccggacgccccaaaggggtgcagatcccccgccggtgtctggaaaatttcctggactggtccagtgagctggcaggctcccgggaagaaaaagccggcgccgtctttttgaatcaggctcctttttcctttgacctttcggtgctggacacctacacctgccttttctgcggcggcacgctgcgccccatgacccgcagtgtgcaggaggactatggcgctctaatggatttcttccgggcgtctcagggggcttatttcgtctccactccctcttttgccgctctgtgcctggccgatccccgcttttgtcaggagcttctgccccagctgcgggccttcctcttctgcggtgagacgctgcctcccggcacggcccgggcgctgcttcagcgattcccccgctgccaggtgatcaacacctatggccccaccgaaaccaccgtctgcgttacccagacccccatcaccctttccatgacagaggaacaggccctcccggtgggccgtcccaaagaagggatcaccctggagatctggtccccggatggcgagccccttccgctgggagtgcagggcgaaatcgtcattttaggcgacacggtgggggcaggatatttccgccgccccgatatgacagagaaggtcttttccgctccggtgcggcaagggaaggccattcccgcctaccgcaccggagatctgggatttctgtctcccgatgggatgctccatttcatcggccggggcgatcaccagatcaagctccacggctaccggatcgagctgggagatgtggaagaaaacctgttgaaactgcctggggtgcgccgggcggtggtgctgccccaaatgcgggaaggcgccgtccacgctctggtgggttttgtggagcgggagggaatcgaagactccctggccgcttccctccaaatgaaaaagcagctgcgaaccttccttcccggctatatggtgccgaaaaagctggtttttctccccaagattccggtgacgcccaacggcaaaaccgatcgtaaggccttggagggaatgctgccatgagttttttctccggtgttccctttttcactctgatgaccctgctgctcctgccggccctgtttctggggctgcggggcaaggccatcggcccgtatggtctgtttgcctccctggtgatgattctggcggtgctggccgggacgcctctgcagcttgcgtggctgggggcatatctcctgtgggaaagcctgctggtgttcctctatatccctttgcggcaaaaaaagggtcccgtgccctggcattacgccctggctcttttcctcagtctgatcccccttttgctgatgaaatggagcgaagtcaccactctttccctcttttctttcctgggactttcctatcttaccttccgggtggcccagatcatcatcgagacctatgacggggtgatctcttccctttcccttcccgccttttgggcctttcttctcttttttcccaccttcagcgccgggcctatcgaccgcagccgccgttttgaagaggacttccggcggcgctacacccgagaggaatatctgacccttctgggagatgggctggagcagcttctcatcggtctggtctataagttcgtgctttcggccctggcctttcgcctgctcagcctgtgccagcccaaaggtggccttcttttagccctggcctatggctggtgctacggcatctatatgtttttcgattttgccggttacagccgcatggcagtgggttgtgcctatatcctgggggtacgcaccccgggaaacttccaccttcccttcctcagccgggacatgaaggatttctggaaccggtggcacatcactttgtcccattggttccgggattacctcttttcccgctttctcatgcgaggcatcaaggggaaatggttcaaaagccgcctgtccggggcctgctgggccttcctgctcaacatgctggtgatgggcgcctggcatgggctgaccctttattacctgctttatggcctttaccatggcgtgctgctggccgccactgaagtttatcagaagaagtgtcccttttataaaaaataccggaactgcacctggtatgggctgctgtcctggtttgtcacccttaacctggtgatggtgggctttttgatcttttccggggccctgttcacctgattcattccaaaggaggaaccatccatgaacaacacacaagaaaaaatcctttccattctctccggtgtctgcggtgaaacattgggggaagatgagctggatctggacctgtttgaaaacgacctgctggattctctgggactggtggaactgctggtggaactggaaagccagtttgatgtgaaactctctccctctgaggtgagccgcagccagatcgctacgcctcggctcatcgccgatctggtggaaagccggatggcccaatgaaaaagtgcaaggccctgggactggcctttctcctcttttcttttaccgtccttgtgatccatctgggaatcaaacggctggattttaccggcccttcctttgacgcctgggtcaacgacgacaagctgctgtacagccgggccatcactgaaaacctgacctccacttccattccggttttcggctcttcggaattccgccatggccgctctactccctaccatccggccaaagtcctgtcgggccagcccttccggctgatgctcatcggtgcgggatactatcaatccctttaccacgccaccgctttggcggcgatgggggacgaactgccccagaaacaggcggtattcattctctcgcctcagtggttccggggcaagggtgtatccagccaggtgtatacctcccgcttctcagaatacaactacattcagatgctgcaaaatccccatctgtcggatgagaccaaaaactacatcctggaacgcaccgacaaactgctcaaggccgatccggccatggccaaacgggtgaaaagctatcagcgggtctatctcacaaaagacgccaccttcctggagaagctgtcctgcaagatctatctgagctttttggaggataagctcatggtctccctctctctcaaggccctggccgggggtgtttcctcccaggaatatccccagggcgcccctgaacccaattggaaggccctcagcgaaaaggccgcggtggacggtgccaaagccaacaccaccaacccctttggcatggacaacggcttttataacctgtataaaaacaactacatcaaaagcaagaaagactctgcaacaaaagccgattatttaagctcccaggaatatggggatatgatctgctttttgaaggtgtgccaggatcttcagattcagcctttgctggtcagtctgccgttcaacggcccctggtatgattatatgggattgtccgccgaaaagcgccaggagtactatgaaaagatccaggccattgcccaggactatggagcggaacttctggacctttcctcctatgaatacactccctatttctttgaggacaacacacacatcgccagagaagggtgggtgaaactgaatgaagggctttatcaattcgcttcacagggtctgtcagaatgagcgcttccgcttttttgctcaggtggcttttttctaccttctgctcctggttttttacggttatctcatgctggccaacctgtccagcgctcctcaatttgtctatgcccagttttgaaaacagcaaaaagaccctcgctttttgaaaaagcgagggtctttttgcttggcggagagaaagggattcgaacccttggtcccttgcgggatcactggttttcaagaccagctccttaaaccactcggacatctctccattttgggatacataaacgatattttatctcttttctgcatccctgtcaagattatctcccaaagagcccaatctatccgatgcggaaaagcatgaatcccacggtgttgatggcgaaattggcaaacatatgggtgatccaggaagtatagatgctttcgcttttttcattgaggtaattaaagatgcatcctcccacaaaaagccccgcaagcagcaccaggtacacccaccaggaaaacatcccggccagcatccccccatggtaaaaggcaaacagcgccggactgaatacataggccagtttccggccgatatagggttttagcgaaaggaaagcaaagccccgaaagaaaaattcctccagaaaggaattggtcagggagatatacagggacacaaagataaaattctcgccggtgatgccgtgtttttcctgtaaggtgcccgtcacctgagaaaaatccacaaagctctttgtacagaaatagcctcccgcgatcaccccgtaaaccagaagccccaacagcacggcctgtaccatggttttcccattcaggcggaataattttctcaaaaggggccgttcctctttgttccacccaaaataaaaaaggggcagcagcaggaaaaacaaaattttcaccagcacctttggcacatagtccggctggagaaaagcatccaccagggtcacggccagggaaagaaataccgccgacaaaataatataaagcccttgctgccgctttccagtcatcctcttctttcccctttcacaaaataacgcttcctatttcagcagatagaacacaaaatccaccgccatcaccagcgccagtatgcctgtcagccatgccaaaagcctgtccggtatgcgccgggccagcttgtaaaacagcggctggatcacatagagaaacaacagtccgcccaaaccaaaacgaatagagggagacagagcgatccgcccctgaaaattgatcttgtaatccacataggtctgccaaggccagctgcccacggtgtactccatccaataggtagcggccagctcaatggctgtggctaccgtcatacaacccaaaaaaaccaagcccacttgcagccatcgccgggctcctttggccggcttttgcgcataccggccaaaacacaaaagaaagaccaaagccccaataccataaatgggcaaataaggcccaaaaaggacaccccgattggaaaatccccaccggtaaaccaccacttccagaaaaacttcatagagccagccaatgacgcaatacaggaaaaaatacaagtagatctcctggaaacggcggaccatggtcttgctaccgtaaaatcgggggcgttgcttcatcctcctcataaaatccctccttcgcttttctctgtctcacttcctttttgttggcctctattatactatgcccctgcccccctgtccataaaaactcctccgctcccttgtcaaaatgggaacatggattttactctccccagtctatcgctatcagatcttccgtttgcagagattccctgacaatccccttgagcgattgctttgatggaccctttatagaaaaaaccaggcggaaaatccgcctggtttcacgcatcaatcaataatcccttttttctcaattcttccctttgccattgcataatggctcacccctgttcggagacaggaaagatcatgggtgctgatcaaaatcaccttttccttctgtctcataaaataatccaggataatgcctgtgttttcctcatccagatcactggtgggctcatcggccaccaccagctgggggccatggacaaaagcccggataatagcagctctccgccgctcgccgccggaaagctccgcaggataattcccagccaagtctgccattctaaattcttccagcaggctcatcccccttgtttccaactcctttttatctttccagccggaaagaaggtgaggcagacagatattttccagcaccgtaaaattataaagcagactgtccccctgaagaatataactgatatgctggcggcgcagcgctgtacgctttgctgcaggaagggaactgatcttctgcccgtcaaagtagacctggccctcatccggctggataattccagaaatcagatgaaacagcgtgcttttgccgcagccagaaggtccggtgagcaccagcacctctcctttttccacttgcagatccacatgatctaccgcttggaaggtctttccctgacgagtatagtttttggtcaatccttctgtttttaccatcacagttcctctcccttcagcaatccgtccagccgggaacggcccaccttccaagcggaatacagagaggacaacagggaaaccgcaacagacaatcctatgcaagtgcctgccaagggcaaaagatattgccagctggtatccaggcgcggaatggagagcatcaccttaatcggcgtggaaaaaagctctagtccggcaaatgctcccaccgctcccagaaagccgcccacaaggccgatcaccagcccttctgctaaaacaatacctgacaacctgcctgctcccactcccagagaggacaaaataccgaactccgccgtacgctcattgatggtgatggtaaataccgaagccagcgccaccaccaccagcaccaacagcacccccataagcactctggtgtagccgtccatgctctccaccgaacggagcacgccgctgaaaataccgtttgtggtataggcctttaccggcgctccttcaatggaatagttgatcgctcgggcgattgctttggcatcactgccttcctccacccgaatcatcagcgaagaaaccaaatcatgagccgattgttccggctctccaaaggcatccgcccagccctggctgctgcggatctgctctgctgtatcggctgtcataaagacacaggtatcataactggtgttggttcgctccagccggccaatgacagaatagttctccccgaaaaatttaatgctgtcaggctcgggagggttaatcagtgcgccgatatacatttccccttccccaggcaatggcagcccttcctcttccagccagggagttacgataaaatcagtctgtggatcaaagacaatcatctgggtggcagccgaacagcaatcggcggcaagagaggccatatagagctggggagtacactgatccactccctccagctggctgatggtatcagcccatttcttgtcaaaatcaaagctgcacagctctcccataaaaagagaatctgccatttccccctcatattcttccggcaccacgataatatctgcccccagccggtcggtggtgttttgcagactgctttccatgctgtctgtcaacaccgaacagcaaaacaggcaggcggaaagcataaaagcaaaaaacaccatgcacaatgtacgcaccgaacggcgtttgagatttttcagtgctgttttaccaataatccccacggaactcatccttttacttgtttcctttccgtacaatgccccccagctggagcaggattcccactgcagacaaaccattgacaatggggaaggttttcatattacaggccatttctgcattggcgcagccaccgatcagcagattgaccaaaagcaggccggaggcaaaaaccacaatccccacaaaacacagtactttcaggcaagaatcgtttttcaccagaagctgagccagccccaatgccaccaggatcactcccacagcaataagagactgggcactccaatggcacttcatcactttttcggcaaccggacagggctgaaacaatgtctgcggcccaatagccaacagcgctcccagcaagatggtccctaccgatactattttctgcttcatttttctcttcctttctgttttggcgaaaaaaaacaaacaatgttttttgtctgcctcactatataaccatatttccgttcaaatgtccaagtgatattttcaatagattcctttctattcatcgacttttactatccggcaaaagaaaacaggcggccaaaggccgcctgtttggtctgttctttttcaggatgcagggttccgggtcacatccaatgccttggccaccccgtccaccgcctggctgtcataggtgatggtgacgctgtcgccggtgttgagcaccgggagcgaagtgttttgttccacagacatggcaaaatactggggataaccgataatcttgaaataataccaggtgtatccgcccaccacagcggaacgaatttcctcaatagagccgctggcctgctgagtttcctggggcacataactgctgtcggcctgcatggtctgggtgtatttcttctcacattccgccacggtgtcccccaccgctacccgctggtagtttgccacattgaccatggcgtacatcttcaccaaaccggagctgtccttaaaggacatgaaataagtaggctggttgttgatgttgagcaaaatggggaaggttgccgtataccccagatcctccaccgctccctgggccgaggactgggccgactgttcggtggcgccggagacgggatagaacttggcttccttggtccgctggttgcacagcaaaaagccgatgttggactgatcgctgctcaccgaagtaacgccggtatagacgaacacatcgtcattcatggcgatgtagttgtaatcctcggtggtgcgggtgacgcctctctggccgatataggcattgaagaaaccgtcattgaaagcgccgtaataatcgtactgctccaccagcagatcggcggggcaaatgtgatcggcccaggagggcacatcggccagatcataataggtatggccgccggtgacggcattgacaaacacagcccccaccacatcggtgccgcccagcataccgatcttgttcttcaatcggggcgccacaaagtagggtgtgccgtcgtcgtccacttccaggctgggctcgcccagcagcatggtaggataacggaagcgcatataccgctcaatgttccggccaaaatattccgagggagaatacttcatcccctgctccaaccggaccagctgggtctcctgggtcaccatgtcgatcatgatatagccgggcagaccctctttccgattggtcagccatttgaagaagctggcgtattccagctgggttacccgcatgggccggttctggtaattgatctggatatagtcgtcggatacttcaaactgagaaaccagggacttttgctcttcgttgttggtggcggccagctcacccattttccggtctcccagccgctgggcgctttcggtgtccagcatggggatctggtcataggtgatctggggaatgtcctgggtaaagttcccctcctccacccggagcaaactgctgtaccgggatgcgttgaagagcttcagagagagcacgctgaacagcaccagcagcacggccagcaatgcggcgatgaacaacgggaaaaaggaatagagtttcttctttcgcccctgcatccccttttcctccacataggaggagacgatggggatacgggccagaaaccacacacccatcagtaggatggcaaagaaataaaattccctggattgcagggaaattgggggtaaaaagacataaaagaccacaaatcccaccaccagagcgatgagcaaggccaagccttctccccgaaggtacttgctttttttcatgaatgaaaaccctcccggcccacgggcctactgctttttcatggaatagatcacctgggtcaggctttccagatcttcattgccgtagtattcgatggtgatccggcctttgccttttccctgactgatgctgatcttacggccagtgacctgggccagccggtgttccagctcatcaatatagatctgtccttcatccaggatgggttcctcttcttccccctgatccagctgctccagccgcttcaccagcttttcggtctggcgcaccgaaaggccataggtgagcactgtttccgctgccttgatcagggtctcttctttggaaaggcccagaagcgtacgggcatggccctgagaaagctccccggtgcgcaccagctcccgtaccggctccggcaatcccagaaggcgcagcgcattggccaccgccggacggctctttcccaccttccgggctacttcttcctgtgtcatgtggaaccggtccatcagttcccggtatccttccgcttcttccaggggattcagatcctcccgctgaagattttcgatcatggccatttcaaaggccagcttgtcgtcggcctccaccaccatcaccggcactttatccaagccggccaggcggcaagcccgccagcgccgctccccggccacaatctgatagccggtatcggttttgcgcacagtaatgggactgatcagcccgttttcccggatgctttcggccaactgtgccaatgcttcctcgccaaaatcccgccggggctgggcggggttgggttcgatctgccgcaattccacctgggagaccgttccctgtgtttcggtgagctcttctccaaaaagcgagcccaggccctttcccaagcctttgtgtcctgctgccatagggtgttcctcctctccccttctgcgactactgattccggcggaggaattcctccgcgatggcctgataggcctcggccccccgagaggtgcgctcataggccagaataggcatcccgtggctgggtgcttccgacagccgcacattccggggcaccacggtgcgatacactttctccccaaagaaatgtttgatctcctcggccacctgaatggtcagattggtgcggccatcgtacatggtgagcacgatcccttcgatatcgatctggggattgagggatctcttgacggtacggatggaattgaccagctgactcagcccttccaaggcatagtactcacactgcatgggcaccagcacttgctggcaggccaccagggaattgacggtgagcacccccaaagaaggagggcaatcgataaagatgaaatcatattgaggcgccagttcatccagcgcctctttcagccggtgttcccgtccttccaccgaggccagctccacctcagccgccgccagattgatgtgggccggcagcacatcacaccatttggtgtgtaaaatggcatctttcgcctgtagttccccggtgatcacatcgtaaacactccggcgcacccgttcggtgagcccaaaacccgaagtggcattggcttgtgggtcaaaatcacacagcaggacttttttccccaggctgcccacgcaggccgccagattcactgcggtggtggtctttcccacaccgcctttttgatttgctactgccagtattttgcccattttctcctccgccgctctgtttttcttctttttcccccagaaaggggcattttcaaaattttttcgtctttttctattataatgcctaaacccaaaagccgcaagagcgcaaaggcccacagaacgatttttctcccttttcttctgccgttccctgctgtttcatgtgaaacataaaaaaatgttccatgtgaaaatgtttcacatggaacaaaaacagagaggatcaaaaggttatggagaaacgctgcccgtcccggtgggggcggcagcggggatacggatggtaaccaccatttcctccccttcataccggcgctgcatggcggcccctacaccggcctgacccagggtctccactgcccggctcagggtgttgatgaagaggcgcacatcgcccagcattttggggcgggaacgaaggcctttctgccccgtttggcgcaaggattccacataccgctccagctgtgccaccgtccattcatggcggacggcggcccgggccgcctgcagctgctgctccccattttccagccggagaagagcccgggcatgacgctcgctgaaccggtattgccggagaagagcgatgacctccggcggcaggcggagcagacgcagcttgttggcaatggccgactgggttttccccagcttgtccgccgcctgctgctgtgtcagcccatggacatggatcagccgggcgatgccctgggcttcttcgtaaaaatccaagtcctgtcgctgaaggttttccgccaaagccaacaccgaggaatcctgatcgctggagggtaacacatagcagggcacggtatgtagtccggccccccggctggcccgcagccgccgctccccggcaatgagttcatagccctctcctgtctcccgcacggtaagagggttgataagcccatattgccggatgctggccgtcagctcttccaaagccttctcatcaaaaaacttccggggctggttgggattgatgtggatatcctccacctgcaaaaaccgcaggggttgattttcccggcttgtccgccgaagagagaaccgttccagcatgtccatcacctccatggtgacattttatcagcatctctttgcaaaaagtgtcacatgaagagagaaaaaaacaggatcttttgtcgacacctcccccctcccccagcggcgaaccgccgcacaaagaaaagcaccccttacaaaggggcgctttcgatcttggcatagcgccggggataggccggcggggtgtttttcactttttcgattaccactacctgatgatgcacatcggtgccgggcagctggtaactacgctgctccttcagccgtcctcccagagtacagatggctttttgtgccccctggatctcctgttcggccccttcgttctggctcttcatggccaggaacaatccgccgggccggacaaaaggcaggcacagctcacaaaggatattcatgggcgccacggcccgggagacagcaatgtcgaatttctcccgcagctgcttctgccgggccgcttcttccgcccgcccggccatggtctcagccagaagccccatggcatcgcacacttcctgcaaaaaatccacccgctttttccggctgtccagcagcaggaaccgggcgctgggccgggcgatctgcaagggaatgccggggaaccctcccccgcttccgatatcaatgacccgcttgccttcaaaatccccacaggaaagctgaaacaggcagtccagcatatgacgcacggccacctgatccggctcggtaatagccgtcaggttcatcacctggtttttctccagcagcagccgggtgtattcctccagcccttccaaagccccttcgggcaagggaatgttccatgtgaaacatccctgggcgatcacatcggtaaagctcatctcatttccccctttgccccagcaaaatcatcagcgctgcgatgtccgaaggactgactcccgagatccgggaggcctggcccaggctccggggccggagagcgtccagcttctgccgggcctccagccgcaaagtggacatggacagataatccagatcctccggcaagcgcttttcctccagctttttgtgttcttccacctggcgcagttctctttggatatacccctgatacttggtctggatctccacctgctcccgcactttttccgaaagaggcggacggcccgggtccaaaggagccagacagtcataactgatctcgggacgccgcagcagatcgctgagcagaatcccctgccccactggcgcactgccccgctcttccagcacccgggccagggccgggccggaaaccgcggtcttttgaagccggcggatttcttctgccgcctggtcatagtcccgctgcatcttgtccagccgctcctgagaaaccaggccgatggcatggcccaggggcatcaggcgggcatctgcgttgtcctgacgcagcagcaaccggtattccgaacgggaagtcatcatgcgatagggctcgttggtgcccttggtgacgatatcatcaatcagagtgccgatatagccgtcggaccgggccagcaccacctcttcccttccctccaggaaccgggcggcattgacaccggcaatcaacccctggcccgccgcttcctcataaccggaagtgccgcagatctgtccggcggcatacagtccgggcacacctcgcactcccagaccggaggtgagctgtgtggggtccaggcagtcgtattcgatggcatagcccggccgcatgatctccactttctccagtccgggcacggtacgcaggaaggccagctgcacatcctccggaagagaggtggaaagcccctgcaaatacatctcaccagaatttttgccacaaggctcaataaagacctggtgtctttcttttgtggaaaatcggacaattttgtcctcaatagacggacagtatcgaggtcctactccctggatctctccctcatacaaaggagaccgatccaacgattttcggatgatctcatgggtatggctgttggtgtaagtcagatagcacaggctgtcgttatacagctgtccctgaaagtcaaaggagaagggacggggcggctcatctccccgctgcacctccaaggcggaaaagtcgatggagcgggcatccacccgggccggggtaccggttttgaaccggcgggtgcgcaagccaagtttttccagcgactcggtgaggtgggtcgcagcggccagaccgtccgggccggagaggatattctgctctccgatgaaaatacggctgttgaggaaagtaccggtacacaccaccagcgcccgtgtctcataaagggccccgcccacacacagcacgccggagacctttccttcctgggtgagaatctccgccgcctctccctggcgaatggacaggttctcacagtgctccaacacttccttcatatactgcttgtaagcggcccgatcggcctgggcccggggagaatggacagccggacctttcccccggttgagcatacggaattgaatgccgcaggcatcggccgcacggcccatttctccgcccagggcgtcgatctcccgcaccagctggcccttggcggtgccgccgatggaagggttgcagggcatattgcccacactgtccagattggtggtgatcatcagggtacgatggcccagccgggccgcggccagcgccgcctcgatgccggcatggcctcctccgataaccaccacttcatatgttcctgccagataagacatgactgttctcctattttcctacgcaaaaccgggagaaaataccgtggacgatatcctcgctcaccgcatctcccagcacttcatccaaaagccgcacggcctcttccccatcggccagaaaggcatcggcggtaaagcccatggcggcactttgcgcagccatgcggcagctttccgccgccttgcccagcaaggccgcctgccgggcgctggtcaccagggtctctccttctccctgggtcagccccgccagccactggcaaagatctgatatgccttccccagttttggccgacaggcggaataccttggggaaagcctgttccacttccgggaaatccaaggcccccttatcccatttgttcaagatagcggcccgctccaatccctgggcggtttccatcacctgacggtcctcctccgtcaagggagaagaaccgtcaaagacacagagcaccagccggctttcccgggcactctcccgggccttgtcgatgcccatcttttccgcctgactggaggtctcccgcaatccggccgtatcggacagccgcagcacggtgtctccgcagcgcaccgattcggtgaccacatcccgtgtggtgcctgcctcgtcggtgacaatggcccgctcatatccagccaggctgttgagcaaagaggattttcccacattgggccggcccaggatggtcaccggcagcccttccttcagcactcttccccgctggaagccctggtagagcttgtccagctctgcggtgcactcctccagcaccttccgggcctcttcgttgacaaaggggtccagatcctcatcgggataatcgcacacggcataaaaatgggtcagctgctgaaagatcttttcccgcatctgacggatgggccgggagatccccccttgcaacaaagaagctgcattcttggcagcggcggccgactgggactcgatgagatcggccacggcctccacgccggtgagatccagctttccggccaaaaaggcccgcttggtgaattcccctgcctgggccggacgggcgcccagttccatggcccgctccagaatgcaggccactaccgcctgggagccatggcagaaaatctccagcagatcctcaccggtatagctggacggcccgggatagcagcaagccagacacagatccagggcccggccgtccccggcccgcacctgtccatagcgcatggtgtaaaaaggcccctggctcatcttcccccctttggtggggaaaaacaggtcatcggccaaagcaaaggcctggggaccgctgatgcggcagataccgatggcccctggcaatgtaccgccggaataggcggcgatggtatcttccatcatggtgctttctcctttccgatgcagaaaaagggggcgggggcgttaaagccccgcgcccctctgggtcacttggttattggtcctgacggccccgtccgcctttattgggacggccgccgccccggttttcccgggcgccttccggcaccacgatcacctttcgattgggctccacgcccaccgaatgggtgctcactccttcataatcctgaagggccgaatggatgatccgccgctcctggggattcatcggctccagagccatgctgcgcttataacgcagggctttctgggcagtgttcactgcaagccgctccagggtagcctgccgcttggcccgatagttttcggtatccagcaccaggtgccaccgcttttcctcgtttttattggcaacgatgttggtgagatactggatggcatccagggtatctcctctccggccaatgacagagcccatgttctgtcccaccaggttgaggcggatggtctcttcctcggggcacaccgagcattctacctgggcttccacgccaaagcgggtgagaagcccttccaaaaagtcgatggcggtatcggcgggagaagtctcatagctcacccgcaccacagcaggctgggcgccgatgccgaaaaagccgtttttgcccttttccagcacttccaccgtcacatcgtcccgttctttccccagctgcgcaagggcattggccaccgccgcttcgatggattcgccctttgcttctacactttttaccatttcaaacaccctccgtgcactttaaacttgctcgtcgtcctgggaggagtcctttgtttccttggtctttccggactgcttgcccttttccttgcccgatttggcctgctggctctgttccagccgccgctgggccatttgttcctgtcggagcttctttttctcttcctgctcggcgatcatctgagcttccttctcccggcccttcttgataaagtacggggtgaggatcagctcctggatcacggaaaagatattgcgggagatccagtagacccccagaccggcgggaaggataaagccgaaatagatggacatagccggcatcatcacattcatcatggcggcggaggcattggccgaagcatcctgcaccaccccctgacgcttctgcatcaggcgcatgacatagctttgcaaaaaggcggtagcgcccgacaaaatgggcacaacccacaaaatgttgaattccttgaaagacggggtcaacgccagattgatgcccaggaaattgaaatccaccttcatcagcccatcaaaatgctggctgagcaggtcaaaattgtcgaaatactgggccaccacctgggcctgcatctgaatggtgctctgaccttcgatgttcagaagctcggccatcttggcgatttcttcggtgctcaggcccatgaagtaccgcagaggctgggccaccacataataaagacccatcatgatgggcagcgtcagcagcatgggcagacagccggacagggggctgaccccttcctcatcataaagcttctgcacttcctgagcgtatttttcccggttgttggcgtactttttttgcagttccagcatcttgggctggatgcgctgcacatccatcatgccctttttctgtttccagttaaaggggagcaggatgatctgggtcaaaagagtgaagaggataatggaaaggccatagctgcccaccccttcatagataaagcgcataacgtatccgaaagggaccgctataaaatcaagcatagatcttctccttctgccaaattgcagaatcctgtcaaaggcccatccccggcagagggacggacactcttttgttacggcaccggatcatatccgcccctgcaaaacgggttgcagcgcaatatacgccacagagccagggcgccgcccttcaaaaggccgtatttctcaatcgcctccaaggcgtattgagagcaggtgggaacaaagcggcaggtaggggcccgtttcagcccggacagccgccttctgtaaaaccgtatgagcgcaagtaccagatttttcatttcactttttcaaaaggcccagtttggaaaacagctccatcatatcccgctgcaaagcatcaaaagaacatttcatgcaccgggacctggccacgatgacaatatcatagcccggggcgaactggccctcctgaaggcgataggcctcccgtaagcggcggcgcatccgattgcgctgcaccgcaccccccagcttgacgctgcaggtgatccccatgcggctgatggttttgagacgattctttctggcatagaccaccagactgggggccgccgccgatttccccctggcatagagggcacggaatcggttattttcacagagggactgggtatgctgcataatgaaaagcctcggtattaaaatttaagaccgcatggcgcggtcttagtttttagtgagaaagccgtactctgcccttggcccgtcttctggccagaacctttctgccgtttctggtcttcattctcttcataaagccatgttccttgctgcgctggcgcttcttcggctggtatgttctcagcatttggctcacctccccaatgattttaggtaagacaccggcataagcctgatgttctcagacgcatgccgctgcctacgacaactgcgcactttgtattataatgtgctgggagcctttctgtcaacctcaaaaagccatcctttgcctaatattctggctttttggaaagaaattatccccttgttttgtattttttgttatatttgcatttgatataactttttgtatttttccaccggtttccccaacaggttgtggataaacctgtggaatctgtgcataacttggggacaacctgtgactatcttgtggaaaggtctgtttcccatcagggaaacagccaatggaccacccggggagacagctccagtcccagtcgattctgcaaagaaagggaggctttgttgtccggccggatctggcagtaagggattcttcccctctccagcagccagccaatcacatggcgctccaaggcatagccaatgccctgccgacggaaatcgggcatcacttccagaatgccataagtgccttcttcgtggcagccgatgaacccggccagcttttcttctttgaaggcaccgaagatctccccccgagccagggtgcgggccagcatggcccgttcgctgtcggcgtagtaatgaggggacacctgatccagccaggaagggtctaaagtgcggatcacaggctcctctcccctttgaggcggcggggccgaatgggaatagacaccgtggtaaaaatccatccggttcagacccaggcggctcaccgcctggggaacatattcctcctgatggcataccagcgtccggccgggacggcacagcgccaccgcttcctccaaaaaggaggggtcctttgccgtgagatggtattgattgcagccggtgttatacagcagcacaccccgctcatcccacttttccacctgggcaaacccccggcgaatgcagtcgatcatgtcgatatggcacagccggtcctgttccagtgcttcttccagcttgttcagatccatattatccccacttcctctggaaagggcggcctgagccgcccttttgccatgattttaccgtttgctgcccatcttgccgcctttggaaccgctcagggcgttattggacaggatattggtgtcaaaagtcaccgtcagcgcatccttttcccgcttccgcttgatggccagccagatcattttgtccagcagctcatcaaaagcaataccgctctcctgccacaggtagaaggccagggagccgggaatggtgttgatctcattgataaagacctcaccggtctcgttattcatcataaagtcgatgcgggccacgccgttgccgttgatagcccggaaggcctcggcggccagatgctggatcttctcggtcacatcctccggcagatcggcgggaattttccggctcagactttccattcccttggaagaccccttggagccgctttcgtatttatctccaaaggtgaggatgtctgtggcgttgagaggctcttcgcacaccgagctctggcactcgtccagatcgcccagcaccgagcagttgatctctcgcagattggcaacgcaggtctccacgatcacccggtcggcatattccatggcggtctccaccgcctcctccagctgctgccggtctctggccttgctgatgccgatgctgctgcccaggttcaccggcttgaccaccaccgggtagccgccgcagacggcctccacccgctggatctccgcctcggtgtcgtggaaccatttctttttgtgggtcagaatcccctccaccaccggcagaccggcgcttttgaacagggatttcatggcccatttgtccatgcccactgccgaagcacacacatcgcacccggcatagggaatgttcagatattcaaagaagccctgcaaggcgccgtcttccacattggtgccgtgagtcacgggcaggatcacatcaatctctcccacggtgctgtttcccagcttcttggggggatagcactgaagggtggcggtgttttctccgcccaccagcaccacccgagtggcctgcttcaaagccgccgggatatccttataggtgtcgatctggcccatatgaggaccggtatagaatttgttgtcctttgtgatataaatgggcaccgcttcgtatttctcctgatccaaagcggcaatggcctgcatggccgagatcaccgagacctcgtgctccacgcttttaccgccaaaaaagacgcccacgcgaatcttcatacccaatcctctccgtttccattgcagacaaatagttcacaatttgttttaaaaataattattattgcaaacagttttcactttttcctgattgctgccctagagatgataccacaaatctctccggaaaaaaagagcatggcttaatagttgtccggcaggtcgttttccaacagcacaaaccggggctcaccgggctggccgcagctttgggcaaaggccagagcctgctgcaaagtatcggccaccagtattttttcctcggggaactcggctgccgacaggccctgacggataggctcggcctgacggggattgaccagggccacataatcacagcaagccgccgcctgtttgccaaactggaagttgagatcaaactcccgctctcccagctccaccatgccaggggtcaccagaatccgcagtccctggcacatggacagagtgcgcagcgcagcctgggctcccttggggttggagttataggcatcgtcgatgacggtatagttgctcccgccccggatcagctgcatccgatggggcaccggttccagacggcgcacggccggctggagttcctccagggaaatgcccagcttatgacatacggcgatggcggcggtgatattctgcacattgtgctcacccagcagccgggtcttatagcggaaactctctccgccgggagcggagacggtaaactcggtaccactctgggtgacggtgatatcgctggctttgtagtccctttccccttccaggccatagcggaccacattgcttcccactttccgggtggcaatatattcgttgtcctcattcaaaaagcacagtccatcggctggaatggcatcatacagctcaaacttggtgtcgatgatggtgtccaccgtgccaaagctttccagatgctgctccccgatggcggtgatgatgccatagcggggatgaaccagatcgcagatctccttgatatcccccttgtgccgggcgcccatctcacagagaaagatctgatgggtgggggaaagcatctcccgcacggtgcgcaccacgcccagggtggtgttatagttgcccggggtcatgagcacatggtacttggtggaaagaagggtgttgagaaaatacttggtgctggttttgccaaagcttccggtgacgcctatcacggtgagatcgggcatgctctgaagctttttccgggcatcctccacataatagcgggccaccattttttccacaggggtgttgatgaagttggccagcagcaccaccaaaggtgtgcacagcagcaccactccgaaaatggccatgccatagggcaggagcaggccggggatcagggccagcacatagagcaccgccgaagttcccagcagccgcttgacccgggcggtatacaccagcggctttttggccttctttggccggttgagcacgcagtaacccaggagcatcaccccataataagcgccccgatcggctctcccctggttcagaatccagggcagcagcaaaagcaggctttccagccggcgcaggctgaaaatgcttttggtatttttctgcagataatgccggtactggccgaactgataggaacacagctggagcatatggacgaaatacaccgcccccactccggctgcggccaaggccaacaccgccatgaaaatggtttccaaaatagtcatacactctctccgaatcttatgctgaaatcatggtatttatcttagatatcgatccccaggaactttttcaccacaaggccgatgacaaagctgatggctgccaccgacaggctgatggccgccatctccccgaaccggcgcaggaacggcagggatttggccaccgaaatgtagtaattaaaggccagaatgatcaaaatgacgctgcagagcatggtcaaaagggccggaagatacattcccgtggggaaaagcaggaaaggcagcaccagaatggccaccgtcaccagataggccacgccggtatacagactggagcggaaagcgtcgtcgctgccctcggcccgctgggccagatagttgctggccgccatggacaatgtggccgacaccccggtgatgatcccggaaagggccaccagacgggtgttcatcaaagcaaaggtcataccggcaatggtgccggtgagttccaccagagcgtcgttaagccccagcaccatgctgcccacatactggagccgctcttcgtccagcatttccagaagctcctgctcgtgcttttcctcctcctgggagatggtctcggcctgggggatctgttccatcacctgggcatatttccgggtggcggcattctcccccttctccatctttttcagtacaaaggtaaagcccagaatacggctgagcagcaaatagaaaaaggcctttttccggtcgggcgccacttccttgccgctgtaagaccgccagatcttctcgtgctcccgctcctgatgagcgatgttgcgaaggatttcctggttccggggatttttctcccgggcggcaataccctcatagatcagactttcggtgagctcattgcgctggctctcccacaaaaatttctccgcttccggagaaagagccgtcttttccatcttccattctctccttttcttcccctacaaaaaagcgtccagcacagcagaaaactggggccagttgtccaggaacggaaaatgccccgcgtttttgatgacggccagaccgctctccggcagtttttcctccatgatctttccatcccgcaagggggtggctgtgtcgttttccccccagatgagcagggtgttctgccgtaccttgggcatcagaggcgtcagatccagattgaccaggttgaccagggtctttttcatcaccggggaggcgttgcggtagtcctcactgccccggttgcggctcatgttctgatacaacgggccaaagatcaatttgagcaccggcatatttgccagcttccgggccagcttataggaatagaccttcacataatagctggccgggcggacaggcggtacccctgcggcgtccatcagcaccacctttttgcagcgaagggggcaattctcctggctgagcaggtgaagaatgatccggccgccgttgctatggcccatcagaatacactcttctacttttgcggcctggcagaaatccagcacaaaagccccgtaatcctccagcgtcatggcctgggacggctccggggtcttgccgctgcccggcatctggggaaccagcacccggtagcgcgccgaaagtttatccacaatccgccgataggcttcgatgggggcggcccagccgtgaagcagcagcaccaccggcccttccccctggtcgatataatccaccggcagaccttttacatcaatggtcaccttgtcacctcatttgcaggcgggcacgatctcgatccagtaaccgtccgggtcctggataaagtagatgcccatctggggattttcaaaacagatgcagcccatttgcgcatgcttgtcatgggccttctggtagtcgctgacggtgagggccaggtggaactcctcatcccccaggtcatagggctcggtccggtcccgcagggcggtgagctccagcaggaaaccgcttttttccgggtctcccagatagacgatgcggaaggcgccgtcgggagcgtttttctcctccaccggctccagttccaacgcttctttataaaaagccagggatttttccatatccagtacattgaaattgaaatgggcaaaccgataatccatgctttttctcctctcatggcatttggtgcttttatcataccatttttgcccccctggttcaatgtgatatttgtctttgcccccttttctccggcgtcaaaatatgataggatagaagaaattccgggcatttgcccaaaaaggagtcgtgtcatgccatttgatctcactttcgacagcggcctgatcatcctcatcgccgccttcgacctgtttttgctcatccgcttcttccagttccgccggcagatcaaagtgcggggcatggtgcccggccggctgatcatgctggggatcgtgtgcgccgtggtggtcatccaggcctgccggggcgctttcacccagtacaccctggcctttaatatctgcactgtgctggccgtgctgctggtggccatcaccccttccggcctttccaaagatgggatcttctgcaatgtgatgcccaccccctggagcaagattttctattatgacatcgaggaatattccgaaaagaaggtgcggctgcgtgcccatctggccgccagcgaacggaacctggtgttccccaaagagcagaaagagctggtgatcgcccatctgaaaagccagaaagtgctctcttttgaagagtataaggccctgcgcaattcccgcaagtcttaacccgtttttcttgacaatgccccgctgtgggtgtatgatagctgcaaattccatcgcagaaaccgaagagtaggaagagtacgcaagtctgaaagcccacagagagccgccggatggtgaaaaggcggagaccggatgcttgccgaatggacctatgagggcagaccgaaacgccttcgggcggagtagtggctgacggcggctcgagtcgttattcgcagagcacatatgtttgtatgtgaaaaaagtgggctctatgagccaatctgggtggcaccgcaggacattcgctcctgtccctgttttgatacagggacaggagcttttttgttgctctccccatctcggcgcgatgaaaaaaatgaaaggagcatcatgatgaacaccattccatcccgtattctgctttctctttcggagatgcccgattactggtataaccttcgcgccgacctgcctccccatgcgcctctgctttccccggacacccgtgagccggtaggccagaaccagctggaagagctgttctcccaacaggccgccgcccaggagctggatttcaagacccccgtcttttccattcccggcccggtgatggactattaccgcaccttccgtccctcccctctcatccgggcctacgaactggaaaaggccctggacacccccgcccacatctattgcaagtttgaaggaaacaatctaagcggcagccataaactcaactccgccgcagcccaggcctattatgccaaggctcaggggctccacagtctcaccaccgaaaccggcgccggtcaatggggcactgccctggccatggcctgcgcccatttcggcctttccctcaccgtctttatggtgggctccagcgcccggcagaagccccagcgaaaaaccctgatggaagtgctgggagccagagtggtggaaagccccagcctggaaacccaggtgggccgacgcatccgggaggaatttcccggcaccggcggcagcctgggctgcgccatcagcgaagcggtggaaatgatccgtacttcttcccattgccgctatgccctgggcagtgttttggatcaggtgcttctccaccagtccattctggggctggaatgccgcacggccatggagcagatcggagaaactcccgatctggtggtgggctgtgccggcggcggctccagtctgggcggcatcatggcgggttttctcccccaacgcatccagggacgatcctctgtccgctttctggccgccgaaccgaccgcctgtcccagcctgacccggggccgctacgactacgattactgcgatgcgggcaaacagacccccctggccaaaatgtacaccctgggctgtgacttcatgccctctcctattcatgcaggcggcctgcgttaccacggcatgagccctctcatcagccagctgtaccacctaggatacatcgacgaggcccgggcctttacccaaaaagagatcttccaggccgccgtgacctttgcccgctgccagggcatcctgccggcccccgaatcggcccacgccctgtgcgccgtcatacaagaggcggaaaaatgccgggaagaaggaaaaggccaggtcatcctatgccatctcaccggcaccggctatttcgatctcaatgcctatcaccgttttctccaaggagatatggaggaatagacttcccagcaaacacatttccaaaaataagctatcatccttttctatcaatgtctttgatattatcaatagaaacgattggaattctccctctatttgctctaaaattgttttgattgaggaattttaccccttttcaagtgatttgatgaaagatgggagatacaagaatgaaccgcgaactcattaaagacctgcccgctgtgtttgaggaattcaacgaacagcggaaaaaatcctttgtcaccgccatggagatgaagcagaagggcgtcccctttgtgggcgttttctgcacctacctgccccaggagctgcccatggccatgggcgccgctgtggtgggcctgtgctccatgtccggcgaaaccatccccgaagccgaaaaggacctgccccgcaacctgtgccccctggtcaagtccagctacggctttgccaaaaccgacaagtgccccttcttctatttttccgacctgatcgtgggcgaaaccacctgcgacggcaaaaagaagatgtatgaaatgctgggcgaat

SEQ ID NO: 3963 - DNA, 1822 bp, Unknown
  16S sequences of unknown bacteria
ccccttgtgagaaatcactaaatttttttgcaaacagcccgtaatcttgtggttttgacattgacaagaaagtgcaaaaaaattatagtggagaatacgaatatcctactttaggaagggtgaatccaactatgaaaatgaaagctgcgcaggtcgtgtgtgaatgcctgcttgagcagggcgtcgacacggtgttcggctaccctggcggcacgatcctcaacatctacgacgcgctttatggatatgaaggcaaaatccgccatatcctgaccgcccatgagcagggcgcttcccacgcagccgacggttatgcccgctccaccggcaaggtgggcgtatgcttcgccacctccggccccggcgccaccaacctgaccaccggtattgccaccgcttattacgattcctctcccgtcgtcttcctcaccgtcaacgtgcctgagccgctgattggaaaagatacgttccaggaagtagacatcaccggcatcaccatgcccatcaccaaggccaattttctggtgcgcgacgccgcttccctggccgatacgctgcgcacagccttcgccattgcccgcagcggccgtcccggccctgtgctgattgatattctcaaaaatgtaaccgctgaagaggtggattacaaattccttccgctgagcgaacatgtgaaccacggccgtctgaaagaaatgatggacatcgcttcccacgatctcaccagccgcgagcgcgaaccggatcaggaggatgtggacaagctgctggaaatgattgagcacgcacaaaagcccgtggtactctgcggcggcggtgtgatccgctctgagggcgccgtgccggaattccgcaaatttttccaaacgctgaataccccggtgatctccaccatgatgggcggcggcgcgtgccccggcaaccatcccctgtttgccggcatggtgggcatgcacggcacccatgcggccaacatcgccgtatcccgctgcgacctgctgatcgccgtgggctgccgcttctccgaccgcgtggccttgtcacctcgtcattttgctcccaacgccaaaatcgtacatattgatattgatcgcgctgagattgataaaaatgtcctcaccgaccaccacatcatcggcgacgcccgccgcgtactggaaatgctgaatgaaaagctgaccgcccacgactatcccaaatggaaagaatatgtcttctccaacaaagaagtggaactgcagccgatcccaggtaaactcctgcccaaggaagtgctcgacagcatcacccgcctgaccgatggggacgccattatggccaccgacgtgggccagcatcagatgtgggtagcgcagtattttcatttcaaccgtcccggccagctcatcacttccggcggatttggcactatgggcttcggcctgggtgccgctatgggcgctaaaatcggcaaccccggcaaagtggttgtccatgccaccggcgacggctcattccgtatgaactgcaatgaactggctactgtgcagcactacggcctgcccattatcacagtactgttcaacaaccagaccctcggcatggtccgccagtggcagacgctgatgtacgacaaacactattcccaaaccacgctggatcgcggccctgactttgtcaagctggccgaggcctatgatattgacggctaccgcgtcagcaacatcggagactttgaggccgctttccaaaaggccctctcctccggcaaagccagcctgatcgaatgcgccatcgatatcgacgaaatggtgcatcccatggtgcccggcggaaagcccaa

SEQ ID NO: 3964 - DNA, 7545 bp, Unknown
  16S sequences of unknown bacteria
agaggagatgattgcattggttaaggtgggaaaatggattgcaaaataccgggtattgattttattgctcggtgcattgctgctcattccttctttttatggaatgatcaagacaagaacaaactatgacatactaagctatttgccggacacacttgagaccatagaaggccaggacatcatggtggacgagtttggtatgggtgctttctcgatggtggtcgtggaaggcatggatatgaaggatgtacagaagctggaggataagctcagcgaggtcgatcatgtaaaggatatcctctggtatgacgacgttgcggatatcagtcttccggttgacatgcttccttctaaaataaaagatgcatttttcaaaggtgatgctacgatgatgctcgtactgtttgataatacgacatcctcggacgaagcaatgggcgctgtcgagcagatgcgtaccatggtaaataatcaggtgtttatcagtggtatgaccggtattgtcacagatatcaaaaatattgcgctgcaggaacttccggcctacgttgtgatcgcggctgcactgtgcttccttattttattgctgacgacagagtccttcctcgtgccggtattcttccttatgagtatcgggcttgcaattgtatacaaccttggaagtaatattttcctcggagagatttcctatattacaaaggcactgaccgcagtccttcagttaggtgtcacgatggattattctattttccttctggacagctttgaggagaacaaaaagcattacccggatgaccggaaccttgcgatgggtcatgcgattgcggcgacttttaaatctatcatcggaagttctatcacaacggtggcaggctttctggcactgtgcagtatgacctttgcgctgggccgcgacatcggtattgtcatgtcaaagggtgttattatgggtgtggtgtgttgcgttacttttcttccgtccattatccttgtatttgataaggcgatcgagaaaacaaagcaccgtccgctgatcaagaatacgaatcgggcatcgacgtttctggtaaagcatcacaagctctggatggtcattttcctgattctgatttacccggctttttatggaaataatcataccggaatttactacaatattgcaagatcacttccatccacgcttggatctaatgtagcaaatgacaagctgaaggaagattttgatatgagcacaatccacatgattatgatggataaaaacatggatgcgaaagacaagcgcaacatggtatctgaaatcgatgatgtggacggcgtaaagtggacaatcagcatgagctctctgctcggtccgacgattccggattcgatgatcccggacgacatcaagggcatgctgcagggcggcgattacgagctggcgtttgtatgctcccagtatgaatctgcgacagaagaggtcaatgcgcagatcgcggcgattgacaagatcgtcaagtcttatgatgataaagcaatggtcatcggtgaagcaccgatgatgaaggacctggaagatgtcacgaatgtggaccttgtaaatgtaaatactctttcaattgcagcaattttcgtgattatcatgcttacgtttaaatcgatttccctaccgatcatcctagtggcagtcatcgagtttgcgatcatggtcaatatggcagttccgtactatcagggcgtcagccttccgttcgtagccagcatcgtcgtcggtacgattcagctcggtgcgacggttgactatgcaattctgatgacgagccgttaccagaaagagcgtcggagcggcaaggataaaaaggaagccgtgcttgcaacacacaaagcctgcatgctttcgattattacaagcggtatcagctttttcgccgcgaccttcggcgtagcagcttactcaaaggtagatatgatcggtgcgatctgcacgctgctttccagaggtgcgctgatcagtatggtagttgtacttagcatccttccggccatgttcctgattttcgaccgggtgatctgtgcgacgacgatagatttccttggcaagaaacagaaaaaagtgaagaaaacagcacaaaacgaagcgtaaaacgcagaagtggaggatttgtcatgaacagaaatagaaaatgcagcaataagctggcagcaggactggcagtcggcatggcagcagtaatgacagcagtaccagtctatgcggcagaggagaccgggtcagtatccaaagaagaaacggtctatgtaaatgcagatgcttccggcaatcaggagagcgtcaccgtatcaagctggctgaaaaatgccggatcagaaaaagaactgaaggatcagagtgatctgcagaatatcacaaatgtaaaaggcgacgagacattcacacaggatggagagaatctgacctggaatacggacggcgcagacatttattatcaggggacgactgacaaggagcttccggttggcgtacagctcacctactatctggacggccaggagattgctccggaagatctgaagggcaagagcggacacctggagatccatgtcaagtatacaaataagacacagacaaccgcgaagatcaatggaaaggatgaagagatctccaatccgttcgtactcgtgaccggtatgatccttccgggagagcatttctcaaatgtaacgatcgacaatggtaaagtcgtttccgacggcaaccgcgagatcgtagtcggctttggcgtaccgggtctgcaggacagcctgaagcttgatgatctggatctgagttctctggacgatgatgaagatgagacggaggacagcacagaggatgcaaccgaagcagcggcagagactgagaacagcaccgaagaggtaaccgaagcggcgacggagaaagcttcggattccgatgatgagacgaaaattgacctgccggagagctttgttgtcagcgcagatgtgactgatttcagcatgagttctacatttaccgtagctctgacggatatcctctccgagctggatctggatgaaaccgatgattttgacaagatcaaagataagctgaacgaccttgaggatgcggcactgaagctcgtcgatggtacggaggatctctctgatggtgtagatacactggatgagaagtacgctgagttcgacgacggagtaaaagaactgaagaatggtgcttccaagctgctggatggcagcaaggatctgaaagatggtgtcactaccttgaaggacggtacctccagcctgaagacaggtgcagataagctggattccggcgcaggcactctgaagaccggcatcgatacatacacaaagggtaccgatcagctgaacagcggtattcagacctacctgagcaagaagggtgtcctctccggcaagaccggtgagttcaagaagggtgtggatacgctggcacagggtattgagcagtatacggatggagcatcgaccttaaatgatggtgtgagcgcgtacgtagatggcgtcaacaagctctcagcgggcgcgtcccagctgcagccgctggtagagggtctgacgactgtgaagggcgcaattcagcagatgaatgcggcgttggatggaaaaggcgatgtgacggaggatatcaatgcggcggcacaggcactggcagcagggacacagcagctgcaggattcggtggatgcgattgacatggaagcaatccagaagcagatcaaagagctgacagatacagggaaaaatctgattaccgaagcaggtcagatgtctgaggtattacagaagcagatcagcgcgccgatgcaggaacttctggcagagggtcaggcacttcagaccacacttggaagtctgccgacacagattcaggagctggcaacggcggccagttcattgcaggaagtaagaaaacagatcgtagcgagtgcagattcggttaacagccagatcgatacggcacagggaaagctgaatgagacgaaaaatgcagttgacacagcaaacggaaaaataagcgatgcaaaggcgcagttagagagtgcagcatctcaggttggtagtgcgcaaaaccagatcaatgcggcgaacaatcagcttggagctgcaagatctacgattgacagtgcagtgggcactatgagaagtgcagcgaatacagcgagaaatgcaggtgatactgcgactgctgatgcgctggaaaatgcagcgaatacactggcgtctcagaaaccgtcggatgcatccgccatcagtgcatcgatttcagcagaggggctgtcaactattgattatacagcgccggatctgtcaggagcgaagattgacacaagtaagattccttctgcagatgtaaagattgatgtgccggatataaatgcactgagtacatcgcttaaagcaatacagaataagtatgaatcaattgtagaaacggtaaataagctggatcttaaaggtatgcaaaaacagctggatgaattatctgatccggacaaccttccgaatatagatgtgtccgaattaaagccgagtgttacaaagctgaatgcgggcatgaaagcactttccgccgccatcggtactctgtccacaaacgtagcaaccctcgacagcaagaccgacggttttgcagctgcatccgctggcatccagcagatcatctccggctttgcggaacttacaaagaacaacgaagcgctgactaccggcgcagcgacccttgcaaagaacggtccggtgctgaataatggaatcaagacgctccagagcggtacgacacagctgctttccggccttggtacgctgagcacacagctgacaaacggtgcaggacagctggcagcgaacagcggtacgcttcgcgatggcgcaaaaacgctgaagtccggtacaagcgagctggcaagcggcgcgaagaagctcgattccggagcaggcgagctgcttgacggtacaaacacactggaatccggcgtgagtgagctttacgatggcgcagagacactggaatccggcagcacggaagtcaaagatggcgtatctgagctgaaggatggcgcgaccgagctgaaggatggtatgaaagaatttgacgagaagggcaccagcaagctgaaagagcttacagatggtgatctgagcgatctgttcgagcgtatcaaggcactgagttctgacgattacacttacgagacctacagcggaagagccgccggcatggatggccgcgtgaagttcattatcgagactgctccgatcgagacagaggacgaatgatgtagcgaagctaggtcctgtcagcagagctgcagggatggattgcgaatgtccgctttaatgacaatacgcaaaaataaaaagaatgaaataaaataaaatgaatatccctttatcagattctgtatgaaaacggattatttgatagagggatatttttatatattttaactgaatcggaaaacaatttttgtgtaatctgccagacgcggcgggcaggatttacttgcgccacctcagtatctatgttactattaaggtattgccagtaaaaaacagaggctgtgcaaaaataatcggatgaataccggggtaaagttatgagcagtagcatgcaggcactattttttgacatcgacgataccttatacaatcagctagagccatatgagcaggcttttgaagctgtatttggagggaagatcagactggatatttccgatctgtttcgcagaagccgcaaacacagtgatatttcttatcagctgctgctggaggggaaaatcagctccgagaggatgttcatttaccgcattcaaaaggcgctggaagagcttggaattcatgctgacgatgcgtcctgcctggagtttcagcgcaggtatgaggaatatcagtggcagattcatgtaccggaagcgacgaagcggctgctggatcgctgcctgcagacggggatttaccttggggtgattacgaacggcgcacatgaccatcagatggacaaggtgcggacgatgcagcttgcacgatggattccagagacacacattctcatctcggaggattgtgaggctgcgaagccggatgcacggatctttcgacaggcagaggagatcgcagaagctccggccaaggcgtgctgctatgtgggggactcctggaaaaatgatatcgttggagcaaagcaggcaggatggagcgccatctggctgaaccggcacgcacttccattgccgctggatgtcacagcagacgcggtggtttctgacgacgggcagttgtatgactacattagtcgtaagctttgaatgttgaacggctttttgaccttttgaccctggcatcatcattatattaaggttttattaaagaactgttcataaaaataagttatccttataaataaaaacgaaaaggaagatttatagtttgacaaagaataaacttcagagccttcggatccggattggtaaaatcgtaccggagtatgcatggcttccattgatttttgagctgaccttaaatatgcttgtctattccggaagcaggatttttacagcacattggcggcattacaatatcgagtcggcactggatcggagcattccgctcgtgccatggacgattatcatttattttggatgctatcttttttgggcggtcaattatgtgctctgcgttcgcctggatcggagaagtgcatggcagtttttgagcgcagactttctggcgaagctggtttgtctggcctgctttttaatactgcctacgacaaatacgagaccggaaatcaccggaagctctatatgggatgttgtaatgcgctttttatatcaggttgatgctgcggacaatctttttccgtcgattcattgtctgacgagctggttttgttacattggaattcgtggacgccgtgaggtgccgaaatggtatcgcgtattttcctgcctgtttgcactggctgtgttcatatcgacactgacgacgaagcagcatgtgatcattgatgtgatcgcaggcgcggcacttgcggaggtggcataccgggtagccgggtgcactggatttgattcgtattatggaagaatagcggggaaagtgaatcgcagaatatttaaaggacaactgttataggtatgaacgcttttatgatgacacagcaggttggctgtcctgccgcccgcgggagtgggaggttcctgctgacagtcacgaggcgattgcgttcatgagcaagcagcgaaaggagaggaagtagtgcaggagggaaaagagaaccggaaaagccgaaaaaaaatcattctgaatacactgcttttctttgtagtctttggtctgaccctgtatggcgttttttatggagaagatatcggagatataaatgaagcaatccatcaatcaaggattcagtggctgttcccggcgattatctgtgtgcttgtctttatctggggcgagtcgatcatcatatggtatatgatgcgttcctgcggaattcacttaaaggagcgtctc

SEQ ID NO: 3965 - DNA, 6817 bp, Unknown
  16S sequences of unknown bacteria
cgctctaccgtttctacggcgacaccgaaatactccgagcgagatacccgaagatgctcgagcttgtgaaaaagcgtcaggaatttccgggaatgatacttcccgtgaaagggataagtcatcaatacaacgattggctctcgccgggcggcgttacgccggacacggagtttttcggtggatgctggtacatacatatgctcgaccgcgtcagtgagattgcgtcgatactcggggacagcgaaaattcggagaggctgcgtgaaatggctgatatttcaagagcggctttcaacgagaagcacctgacgcctgacaaaaacgactacgacgccgggaatcagtgcggaattgtactgcccctcgcgttcggcatcgcgccggaagacaggcggcagtcgctcgcggacacgctgtccgagtacgtgagaaaagcagggtatcacacgacgaccggcttcatcggcgtcaggtacctgccggaggttctgtgcgactacggtcacgcggacgacgctatgaggatagtgaagaatccgaccgctccttcgtggctcgcgatgctctcgaccggcgcgacggctatgaccgagagctggtacggcgaggacgaccccgacaagtcgctcagtatgtcgcacttttcgctcggttctgtcggcggctggttcttcgagtacctcggaggaataagggtgaacgactgcgcgcccggatttgaggaggtcgttctcgagccgtttatgttctcggagatcgggagattttcggcaaggtatgacaccgggagaggggtcatcaggaccgagtggaaatacgcggacgggaaagcggagttttcttattccgtgccggaatgggttaagagtgtcagagttgtcacgcatgatgaatcctgccgctgtcattgattgtgaaaaaaagtctgccgcttttgcgagcggcaggctttttaattataattcaacgtatacgtttcccgtcagattttcacgatattcggacggaaatattcagttccccgtcgacgtccgcttcgagcgggatgtattcgaagcctccgacctgattgaacacgcgctttgcgacatccgcgcggagcggcttatccgattcgaccgtaaggcttccgacagtgagccgttcgccgaacgccgcaagcgccgcgggtgtctttttgtcgcagattatcggcaggacgaatttcgctttttttgcttttacggtgattccgagcgagtcgggagtgaagtcgtacacgactgaccagtcatccctagatgaccagtcatccctggatgaccagtcgtccctagacgacccgtcgtccccggacgaccagccgtccccggaagcggttattctgcgcccgtcctggctcagcttcgcggttttgtcggtgacagtccgtctgccgtttatcacaaggtgcggcgtcatgcagggagacgattcggcgcggcgcagatactgcatattgagcggctcggacggaatatagctgtccatcgtcgacgcgcagacaggtccggtcctttcgttccacagcagcgtcatcgagccgcccgagttgtccgaaccgcggtagcacgcgatgtcaatcgaagaaaaggtcgcccgccatccgccgaccgagacggtcagcaagttcccgttctggaaggcttttatgccttttgccgattcgagcggcagaagagcctcgctcccgtcggcaatcatagtttccgaattcacgagcgcggcgagcgccttcgcgtggcagaaggagtggtgcagacaggtcggctcgccggcgtcctccgacatcggcattgacagaagatcatcggatgtgcatttctcccagagggaaagcacacgctccgcggcgcgcgcgaacacaggctcgtcgagcaccaacgctagcccctcgaggagtccgtccgacgtccggctgccccagtaggtccacttgttctgacgcgtgccgaagctgttgtcgatcgcgccgtccgggagaaggaactcaaagtgatcgagcagccgcgccttatagaaagcgagctttccgccgtcttctgtgagaaccgcgtggcgcagcagcagcgggagcgattcctcgaggtcatagcccatgtcgatgccgcggcagccgcgctctgatacgaagtctatgccatgtatctcaccgtagaagagaccgttctcgtcaaagcgcccgcggcagaatttctcccagtgattcgccttgtcaagatactcgggcttgccgaggagcttatacgcgagcgcgagctccgcggacgcgccggcatagtagttgatgttgggcgtgaacgtgtcgaaatagcggagagtgaaatccgagagacgctcaaaaattcccgtccacttttcgcgcagagcctccgggagcctgccgccgaactcaagcaatgtgtcgcctatcgccatcgcggaaaacgcggtgatgcctctccagtcattgccgaggtcgttgcggtagctgccgtctgagcggcgcaggttgcgctcggtgaagtctatgtaccgctccgcggcggaaatatacctgtcgtctccggtcttcgcccagagcgtcgcgagcgggtagacaagatccgcgaagcgcccgtgaatgacgtggcaggcagggcagatcagcccgctgtcgacgttcgggtcggggagacgtatctcgtaggtgagaagcttgtcgcaccagcgcttcattaagttataggcacgctgtttcataactattacctcctgtcgggtataattttaaaatcaggttatctctgtcgggtcgttgtcacgcggaccattgtaacatggcgactcgaagaatggtcgaacaccgtcttgtatcccgcgcgggagaccttcgccataagcgctgtcagtacaagttcggtggatatgctgcgttttgctttcatactgggctcatccgaaaaaaatgtatttgaaactgtcactattatactatactatttgaattttgtcaatgccgatccgaaaatatgcaaataaaataacataagcgacaatatctcactgtatattccgcgccgtcaacactccgcgcgaaaatttaccgcctgtcaacaattaaatatggataaactccccacgatgtggtaaaataaaagaaaaacaacctggaggcatcattatgtgcacggcggcgacctacaaaacgaccgatttctatttcggaagaaacctcgatttcgagcgctcatggggcgagagcgtcacaatcaccccgagaaaatatcagatagccctgcgctccggcgaggtgatacgcgaccacttcgccatgatcggcatggcgcacgtcagaaacggctatccgctctactatgacgccgtgaacgagaaggggctctgtatcgccgggctgaatttcgtgtcgagcaccgtttacggcgagcgtacagacggcaaagagtgcgtggctcagttcgagttcataccttggctgctctcgaaatgcgctgacgtcggcgaggcgagggcgctcatatcgcgcgtcgtcctgaccggcgagcgcttcgagcccgagcttccgtcggcaaagcttcactggctcatcgcggacaggaacgactgcatcgttgtcgagtcgacgaaagacgggctccacatttatgacaatcagttcggcgtgctgacgaacgagccggaatttccggtgcaggcggcaatgatgaacagttacgcgaatctgacgccgaagcccgccgtgaaccgctccggtatgccgctgacgcttaacagccgcggaatgggcggaatcggtcttccgggcgacctcacgtcgatgtcgaggttcgcgcgcgccgccttcgtccgggcaaactcgaagagcgcgtacaccgaggaggcgggcgtcagccagttcttccacatcctcggcgcggtcgaacagcagaaaggtctctgtgagctcgacggcggcgagtgcgaatacacgatctacacgagctgcgtcaacgcggacaaggggatttactattaccgcacatacgacgggctctgcacctacgccgtggatatgcgccgcgagaagctcgacggcaccggtcttgtcacttttccgattgagagcggctcgagagtcgagagactgaattgaatatcaatcaatacaagggtacggatggttccgtgcccttttttctgcaatgtcattctgatatgggcgggatataaaataaggattttacatatggcggctgatgtgttataatattaacgcagtcaggaaacaatacttaatgaccatacgattggagtagatattatgaaaagcacacttgaaatacttatgacgataatgttcgacgccggggtttttgcccttctgctcgggtttgtcagcggaaagcttaccgacaggaaaactctccgggtcatttccgccgctatgggcgtcgggttcgtcttcgccgaggcggggaagatagcagccgggggaaataccgcggtattcatcctctgcgcgctcgggttcatgctgtcctacgctctcttcgtgttcagcattccgtccggtaaaaagaaagacaaccagctgaggtgagctcggatggacaagcctctcagcgttttcccgaaaggagccggcagcatgacggcagaaaaaaactccggacggcagatgtccgacaccttccgcgccgcggcgttcgtaatactctccggcggattccaggacgcatacacatacttctgccgcggagaggtcttcgcgaacgcccagaccggtaacatcgtcctgatgagtaccgcgttcttcagaagcgaatggggaaccgtcctgaaatatctcatcccgatctgctcgttcctcatcggaacggcggtcgcggagcttatacacgtgagactcagaaaatgcgagaagatacactggagacagattattctcgccgtagagatcgtgatactcttcgcggtcgggttccttccgcacagcgtcgacccgctggccaacgcgctcgtctcgttcgtctgcgcgatgcaggtgcagaccttccacaaggtccgcgggcacgcctacgccagcacgatgtgcataggcaatatgcgctccggaaccgagtccttctgtgagttcgtccggaccggaaacaaggcggcgctccacaaggcggctacctatttctcggtgatacttgtcttcgcggtcggcgcggggataggcagcgcggctgtcgcgacgctcggggacagatcgattctcatctgctgcgcgtcgctcgcggtcagcttctttatgatgttccgtgagaaggtataaaataacgttccgtcgtcggattatctccggcggcgggtttttttgtgattttcggtggaaaatgagaatttacattatgaacatataaaaattcatgttttcacttgaaaaaattccggatatgtgctattattggacataagggacgcggtactatctccggcgtccggtcgatatcatttattatattgtgatttatattgtgatttctgaaaggagtcagaaaaaatgggacttatcagggcaggactcggcgccgtcggcggaacgctcgccgatcagtggaaggaatttttctactgcgacgctatggacaaggaggtccttgtcgtcaagggacagaagaggacgggcggacgctcatccaacacgcgcggtgaggacaacataatatcgaacggttccggcatcgccgtcgccgacggtcagtgcatgatcatcgtcgagcagggaaaggtcgtcgaggcgtgctccgagccgggcgagttcacgtgggacagctcgaccgagccgtcgattttcgccggaaacctcggggagtcgataatcaataccttcaagacgatcggcaagcgctttacttacggcggcgatacggggaaggatcagaggatctattatttcaacactaaggagctgctcgacaataagttcggcacgccgaatccggtgccgttcagggtcgttgactcgagaatcgggatggatatcgacgtttcgatacgctgctcgggcgtttattcgtataagattgtggacccgatactgttctatacgaacgtgtgcgggaacgtgaagagtgagtatgacagatcggagcttgactcgactcttaagagcgagttcatttcggcgcttcagccggcgctcgggaagctttccgcgatggagatgaggccgaatcagatcgttatgcatacgactgagcttgagagcgctatgaatgagacgttgtccgagaagtgggggaagctccgcggacttcgtgttgtcagtatcgcgctcgggtcggttactcttccggaggaggatcaggagctgatcaagacggcgcagaagaacgctatgttccgcgatcctactatggcggcggcgactctggtcggcagtcaggcggacgctatgaaggcggcggcttctaacagcgcgggggctatgaccgggttcatgggcatgggtatggctcagggcgcgggcggagtgaatgcgcaggatctgttcgctatggggcagaagcagcaggctcagcagaatacgcagcaggcacaagccgcgaaagctccggctggctcttggaagtgttcgtgcggcacggtggctaccgggaagttctgccctgagtgtggggcgccgagaccggttgatgatacgtggacttgttcgtgcggcgcggtgaataagggtaagttctgttctgagtgcggagcgaagcgtccggaggcgaagagggtttataagtgcgataagtgcggctggacgccggaggacccgacgaacccgccgaagttctgccctgagtgc

SEQ ID NO: 3966 - DNA, 3858 bp, Unknown
  16S sequences of unknown bacteria
gtctcgtgggctcggagatgtgtataagagacaggataaacagggcgctaccgggcaaaagatgcgggtagattccattaatttgaacagcattgttcatgtttccgccgaaacttccggatttggtttggatgacagtgaaatcaatatctcttatatcgcatctccatattacaaagctacgaatggtgtatccatgggagagaaaacatttgagttccctaaaaaatacaacattcagcctctgtacaaaaaacttcaagaaatcgcatacgagaaccacgaaaatctgaataaataaaaaatcccgccggtgccgaaacaccgaacgggagaaggggcagtaagttttgaccggctcactgcccctttgtctcaccaacgataggaaaatcaacggaaaactctattcgaaaacagcccgatacaacggcaagaagtatgaggtcaccggaggctatgaccaagccggctgagaaacgctccgcagcaaaacgcagcgaagaaaccgtcggcggaagcatgcgcgtttctgcctggtataaagagggaaaagccacctacacaggccccaaaggactgacggacaaatcactgaaaatgtacgatgaacagttcaatggttgcatcaattcctgtatcggcaccatgaagcccaaggatgtaaaagacatacacccccagcgcattttgaatggacaagcaggctgctcgtcctctcatataacaaaagcggatggtgatgcaggagatgttcaaacggacgcgtcagtcccgcttgatcccccatatgacccagcggaacttgaagaatgcactgccatccttgacgtcgccaaataccgtccaatcggacgttaggtgctcacccatcttcataccgaaatacgtcccaataaaacagctgcccacacatggaacgataataagttcaaacagaataaggccacgtccatcatacgtggaagaacggaccagcggtcattaagggatcccaaacagatgcaggggggcgtgatatttcaatttattccgatcttctgccgcttcttcaggccgcaaaaagaagccctttcgctctcgccggcaaatacatggacgaagctattctgcaccgccgctggaagtcatttttacatgaatgaatccggaagaaacagcgattgaactgcaaaacgccttgattttcaaggtttttgcagtctttttccctttcaagccagcataccggtcaacggctggcatgtcctctgaggcactactccctccgattcaccataaactgacatgggaccccaacaggggttccactgtaggaggtatcttttttatgaacacaaccacaaccatgtctgccaccatgcaagcaaccgtatgcaacgtcgaacgcaaccagctcctggtctgcgaccatgcgacacagcaggaagtcgtggtccatacggaccaggcctgctgcttccatgtgggcgactgcatctgtatccactacaacggcattatgacggcgagcattcccccacagatcagcgccgactgtatccatgtccttcgccggcgcggctgctgaacaaacgggctgaaccagccctgatctgtttgcagcatcccattctccccatagcgcagcaaaaaccgccatcccccgcaatgcgggggatggcggcaaccgtatccgcccctgcttttccggcacagcgcactaccagtctccacgttcctctgcagcgccccgccgcaggcggcgcagcaccacatggaaccgggtcaggcccacactgaaggccagggccagcagcgtcagcagcaccagcgccactccgtgcagtacagtcatacgcatggataaaaacgcagacatatccatggccagcgcaatgtaaaccgctgcaccaaatatgagatagcggcggtaaatcccgcgcagatacgccagcttggaatcacagcaggcatactgggcaaatgtgctgccggctggaaggcggtagtagccccattccccgtttcggcagacctcctgtgcatgaacggcctgaagataccgtttttccgccgcatcacacgccgtgcggcgcagcagctccaaccggtaggtatacgcgcccttttccctttctgcaaacacatagtggcagcaccccacacgctcaagctgcagccctttgtcccgggacaggcggttgatccaatcctcctcccgctgaaaatcccatgcaaaaaagagacgaaaccgatggtgttccttcataactcctccccagtattaaaccaactgtgccaaacagactgacagaagcatgcagccgatgccgcccaggcgcagcaacgctgcctgtgcaccaggtaggaccgcttttttgtccttatgccacaagcgccacaaaagctccggccgaagcagaagcacaaagccgatgattaccaccacaaatgccaggaccaggaatggactcatttctttttctcctctccccgcagcgcaataatgcggtcgcgcagcacggcggcgtattcgaattccagcattttggacgcctcacgcatttgtttttccagcttcgcgatttcctcgcgccgctcccgatcggacagttttttctggcgcttcctgccgttgctcgcttcgctttcgctgatctccagaatgtcgtgcaccggcttgacaatcgttttgggtacaataccgtgggctttgttaaacgcatcctgcttgcggcggcggcgctccgtttcgtccatggccgcgcgcatggagggtgtcacggcgtcggcatacaaaatcacttttccctccgcatttcgggcagcacggccaatggtttgaatgagagatgtttcgctgcgcaaaaagccttctttatccgcatccaaaatggctaccaggctcacttccggcatatccagtccttcgcgcagcagattgatgcccaccaaaacatcaaactcacccttgcgcagatcccgcacaatctccatgcgttcgatggcgccgatatcggagtgcatataacgaacacggatgccagctccggcaagataatccgtcaggtcttctgccattttcttggtcagggtcgttaccagcacccgttcgtttttcgcagcgcgcagttccacctcgtggatcagatcatcgatctggcccagtaccggacgcacttcgatctccggatccaaaagccccgtgggccggatgacctgttcaacgatctgccccgcacgctcccgctcatagggtccgggagtagcggaaacataaatcgcctgatggacacgccgctcaaactcatcaaacttcagcgggcggttatcgtaggcgcagggcaggcggaacccatactgcaccagactgtccttgcgtgcgcggtcaccgttgtacatagcccgaacctgaggcagtgtcacatggctttcatccacaaacaggaggaaatcctccggaaaataatccaacagtgtgtgaggcggcgagccaacagggcggccctcgatcacccgggagtagttttcaatgccagagcagtatcccagctcctgcatcatctcaatatcgtacagcacgcgctgccgcaggcgctgctcttccaccagctgattatgctctttgaagtaggcgcagcgctcgtccaattccttgtaaatatgttcaatggcagcgtccattttctctttaggcgtcacatagtgggtcgccggccaaataggcacatgggtcagattgcgcactaccgctccggtaaccgtgttgatctcgctgatacgatccacttcatctccaaaaaactccacccggatcgcagtatctttccaataagcgggccaaacctccaccgtatcgccccgcacacgaaacat

SEQ ID NO: 3967 - DNA, 3550 bp, Unknown
  16S sequences of unknown bacteria
aggaggttgcctctgcagcctcataggacagatccgtggttgcaaccaccgggaacattcccttgaacagattaccgccaaccagtccgatggttacggcaaatgcagtagtgcacagataaaagacaacggttttcagtccgatagatccgactttcttgatatcactcatggaaatgataccacacatgatggagaacagaacgatcgggcacacaataaatttgatcaggttcaggaagatcgttccgaacggtttaatatagttggttgcaaaatctgcataattctgcatcagcagacctgcaataatggccagtaccagtgcaataaagatctgcatggccagcgacattttcttcttttctttcatgagtatttcctcgcttccctcttgtagtttacataatgaaaaaaagatgacattgcaaaattatttgaaatgtcatcttcgtcatcaccaatataggattatatcatgttgatcctatggttgcaagatggaattccatcccattttatttggttttcagctctgctgtcaggatctcttcttttctatccagaatctcatcagagagaagctgcttttccacattttcaaagccaagccgctcgatggtattggcaaaacgctcacccacatagccctggtcacgatacagaaggattgctttctcgatcacgttcagtgcctcatccttgctggtaaagatcttgccaagtgcacgtccctgggacacctgttttccccaacgtccgccgatatagatcttaaatccatactgaccatccacgatagaatcaaaacggcaatgcccgatacagcggccgcaatggttacatttctcctcatctcttaccagaacaccatcgatcacctttgacgcaccaatcggacaggctgcctcaatagcgcattttttacagcccttgcaaagctctttatgaaattccgggattctctgaccgatgattcccagatcattcaggttcggttttacacagttattcgggcatccgcctactgcaatcttgaatttatgcggcaatttgatgtcatgataagccacgtaaaaacgatgatggatctcctcagagattccaaaggaatccagcagaccatactgacaggtggttcccttacaggacacgatcggtcttaccttcggaccggttcctccggtggtcagtccctcttttgcgataaactcacggaatgcttcgatattttcataaggaatgccctgcacctccacagtcagtctggtggtaaatgtcagattaccgtttccaaatttttctgcggcgtctgccaagcatctgtgctgtgccacagtcacctttccgttcacagtaatcacacgggcggaaaagttatccgttcccttgttattcagaaatcccagacccttcaggcgctgctcttcctctttgctgatggttaatgctgccatgcttgtcctcctttatctgctttgtatattcatttcgccgcatcttatgattccggctcacatattgtctctatcatatcacttgcctatctatttgaaaaatgataatattttataaaaacaataggttttacctatatattgaggaggttttccatgacgatccgttatcttacgatttttcttgcagttgccgaatatggcaccatgagtgctgctgcggaacacttatatctttctcagccaacgatcagtcaggcgatccgggagttagaaaagcattacaatggattactgtttgaacggttagggaagaaactatacctgactgaccgtggaacgcttctgctccctcaggccagggaacttgtgaaccgattcacagaagtggaagaactgatgttgaaccaggggcagacttccattctgaagcttggaagcacactgaccgtcggaacctgtctgactcccaccgttatgctgaaactggaagaatccacccccggtctggaagtccattcctatgtaagcaataccttagagattgaacagaaactattaaaatctgagctggatgctgcggtagtagaaggcgaaatccaatctccggatctggtagtgatccccattattgatgattgtctggttcttgccgccggaaaacaccacccattttatgaacgcagcctgatcttttccgatgaactgaacggtcagccctttgctatgcgcgaaaaaggcagcggcacccggcagctttttgagaattatgctgataagcataagcttcttcttaaagtcacctgggaagccaactgcccccgtaccattttaaatgcggttctctataataaagtgctgtccgtcatgtctctgcgactcatgcctcatgagatccgacaccaacgacttcgaatcttccacaacgaagatctggaatggaaccgcacctttaagctggtctaccataaaaacaaatttctcacaccggccatctacgagctggagaaaattctgtggcaatatcagtcgatcaaacttccgccagaatgcgggattctgcgaaatcggatcactgatccctctcccgcagccgtttaagccgatcaccgatcaccttctcataaccaatgtccgtgggatggtagaatgtctgtcccaccagttcatctggcagatactgctgcttcacataatgctctggataatcatgagcatacttatagccgatgccatgtcccagcttttctgcaccaccataatgcttatcctgcagatgaaccggaacggtggtcgtagtagacttcaccgctgccatggcatcaaagattgcattgcaggctgcattgctcttaggcgcacctgccacataagaagcggcctgggacaagatgatctgtgcttccggcataccgatccgctccactgcctgagctgctgccaccgccacctgaatggcctgtggatctgcatttcccacatcctccgatgcgcagatcatgatcctgcgggcaataaatttaatatcttccccggcatacagcattttcgccagataaaagaccgccgcatccggatccgatcccctcatactcttgataaatgccgagatcgtatcataatgattatctccgcctttgtcatagcggaccacttttttctgaatacactgagatgccacctccagcgtaatgtggatctttccatcctcacttttctctgtagtcagaattccaagctccagcgcatttaacgcatttcttgcatctcctccggcaatatctgccagaaaatccagcgcatcctcatctgccaccgcctggtaggcacccatgcccttttccatgtcagtaagtgcacgcttcagaagctgcttgatatccgcaggttccagtgctttcagttcaaagacaatcgaccgggacagtaatgcgccatttacttcaaaatacggattttcggtggtggcaccaatcaggatcaatgtaccgtcctccacaaaaggaagcagataatcctgctgactcttattaaaccggtggatctcatctacaaacaggatcgtgtgtttgccgtacatgcccagattgtcc

SEQ ID NO: 3968 - DNA, 13829 bp, Unknown
  16S sequences of unknown bacteria
aaaaccattgatattactgtgttttttgaaaaatgctgtatcaccactcgcaccaacataaaggacgtgcgtcccgtcagggatgtgcgtcctttatgttcgctggagccgccgagagttgaacccgcccgggttacaagtcccgcctgcggcaccacgttaaaagccccgagaagtagcctatagagccatttctcggggctttgctctgtcttgtaaggggaatatgcgcttggtgtttttccttagaaattacgctgctgtgagttgagtgtgagttgggacttttctcaaacactttttaatatggcggatttttgcaatatgccatgccctcctattctatatgttcatattccggaaaacaatctaaatagtagtcacactcatcacaacagcattcgatcaattctccattttcgtctatatgttccccgttgccgaaacagtcttttcctccgttgccaggtgtgagaatcgtccctgtaacatctataatcacattatttcctcctctttctctccggtttgagtatttgaattactcaattataccagaagcaaaccgtataatcaatatgagtaatacaaatactcacattgatgatacggaggacaaaatgtttaagcataaagcaagtgacggtactcgaaatctgtgcggtaaaaaaattgccgtattgagaaagaacttgcctgagaaaacatcacaaagattacttgccgagaaaatgcagataaaaggcattgacatggataaaactgcaatcaagaggattgaaaatggcgagagatacgtaacagatatagaattaaaagcattctctgagattttttccgtcagtacagaatttttattagagcagcctgtggattcggtgtaagggacgttttcgcaaaccaatccgcccccttgacttttcccgcttcctcggatataatacggtcacagaactcttatataggaactgccaccgggtagtgtatgctgttaagcattcgtcgcacatcgttaggtctttgaagatgtgcgccacgggtgcttattttttatggaggtttctcgtatgcaagcatggaatcctttccgcaaattgaccggcttcgaatggggcctgtggctgttctctctggcggtggtgacgctgtccttcctcttcggcggcggccatcccctgactctggccgcctccctcatcggcgtgaccgccctcatcttcgtcgccaagggcgaggtccttggccaaatcctcaccgtggtgttcagcctggcctacgccgccgtctccctgcggttccgctactacggcgaaatgatcacctacctcggcatgaccgcgcccatcgccgtcatgtcggtggtgtcctggctcaagcacccgtatcaggccggtaaaagcgaggtggccgtcgcccgcctgaccgccggacaaatcgcctggatgagcggcctcggccttatcgtcaccgtcctgttctacttcatcctcgcctatttcgaaaccgctaaccttctcgtcagcacggtgtccatcctgaccagctttctcgcatcctacctgatgttctgccgcagcccggcctacgcgctggcatacgcggccaacgatctggttctgatcgtcctctgggtgctggccgctatggacagcctgtcgtatctgcccatggtggtctgcttcgccatgtttttctgcaacgatctctacggcttctataactggcgccgcatgcgcagccggcagcagcgctgtgaaggcgcgtaaatacaaacagaaccgccggcgggccacattccatgacccgccggcggttctgtctgttttattccgccgccttctccttgtccgggttgagagacaaaagcaaatccgcgtccccgccgtaataggtgggcatcttcccgtcccatttttccaggaactccagctcaatgatgctttcggtcagcgccttgttcttgatttccatggcctccgcctcgcccttggccttgatgaccgcctgctcggcctcggtcttgatcctctccagatcgtacttcgccttgagggcgttctgctccgccacctgtttttcctcgatggccttatcaaacgccgcgctgaaggtcaggtcggtgatgttgaggctgtccacgaatatgtacttgtcctccagccgctccttgagcatatccttgatctgcgaggaaatctcgctgcggcgggtgatggtctcctcggccgtgtactgggacgtgaccgacttgatgcattcggacacggccggcgcgataatggtgtcctcatagttgaggctcagatttttatacagctcgtccacgttggccccgtccacccggtagttcacggccacgttggtggtgatggactgcatgtctttgctcgcggaggtctcgccctccaccgtgtattttttgacccgggcgtccacatgcacgatccgctgcgcaaagggcagtttgaacgccagcccctcattcagcacggtgtcgcccaccgcccccatggtcagcttgacgcccttgtacccggccggcacaatgtcgaaacagccggcgacaacaatcagcgccgcgatggcgcaggggacgataaccagcagtcttttggcaaacttcggcattttcttatccatattcttcattctccccgttgcttttttaggtcttggcagtaagtattataccggagtggttcccataagtcaaaaacaaaaacgaataaagcgtcatacaaaaagctaaaatccctcacgttttcgtaatatatattccattcagttagcgctcttttgtttttataatgaagataactgtatacgaaacaaaagcactccaaactagccgtggacaaaacaaaaaataggaaaggacttgtcaagcatgtaccagcgcgccaaatttgccgtgcgaatcctctgcatcgtcttgagcggtgccctctgttttctgtccaccgcctgcggaaaaacgccttccttctctccggaaagcagctgggatacaggaacggcatcctcctccgaccaaagtgaaaacccaagccaatccgtagccgtgccggagaaccaaacctcttccgatggttccacgacggggaatcggccgtccccgtcgtccaaaaacgccgcgccaacgcgcgggaacacccccaccagccggataaccactgcctcgaccgaagcccccacctcctcgcctaccgtcaccacgccaaaagagcccgccatgtccgttctctccctgaccgataaagctgtgctggccaagatgaaaattcaaggccgcagcggccccgtttcgtccggcatcagcttcgactggtcggccaacaccctggaatttcaggccgtctgcgagggcagcgtgagcctgaacttaaaggaaaaggcctcggataccatgtattataccgtcctagtggacggaaaagagcaggcgcgggcgcgcagctccggttcccggctgcttctcgcggagaatctgcccaaaggcgaccatacctttcaggttgtccgccaaacggagagctttttcggccaggtaaccctctgctccattgaattgaaagggcagctgaaaagccgccccgccgatcggcccctctacatggaattcctgggcgattccattacagtgggaatgggtaacctctgcctgggccttcccgcgccggccagcttctactcggtgaaccaggacggcaccaaaagctatgcctattacgccgcacaggccttgggcgcggatatcagtgtcctggcccgcagcggcatcggcgcgtatcagggctgggattccggcaatcccgctctgccccccatgtatgactatatcagctattaccgggacaaaaccgcccgctgggatttttcccgtcaggcggacatcgtggtcatcaacctgggcaccaacgatctgtggaccggcggctcctcccgggcgctgacccaggccatgcaggattttatgcggcaggtgcggcagaagaatccgcaggccaagattgtctgggcagcgggcggcatcatggccgattacctggacgaggctgacgacgcggtggacagcctgggcggcccgcagaagggctattacgtctgtcccctgccctgcggccccaacaagggcggcaacggtcaccccaccgccgaacagcaccaatccatggccgacagcctggtcgccttcctgcggcggaaccacctggttcccgccgcctaaactcatgcgtccctgccccctttttcggaaaacgatccatcagtaaaaaatgaaggattgcagccagccttttcttgcggtactatgcaggtggccacccgatgacaaaccatgcgaaccggcttgggcttttaaacgaggccccgccggttttttgcttcgtccaatacgccgcgtccggcggatcgggtcgtgcgaatatcaaatcggaaaggacttggccactatgtgcccgtgtgacaaatcggctgtacggatcctcggcatcgtcctgagcggcgtcctctgttttctttccgccgcctgcagaaattcgcctcccgccccctctgaaagcctgagctggaatgtaacccccggggccgcggaatcaacctccgccgcggaagtgaccgctgcttccacctcctccggtcaaagcgaagacgcggaccggatcgaaaccacgacgggaaaccgggcgcccgctccctccggcggctccacatcggctggtggaaacgcctccgtcgatcggacgaccgcttcttccgggtccgtctcctcggcccccacctcgaataacgcctccgtctccgttttctccctggccgatgcagccgtgttgtccaaggtgaaaattcagggccgcagcggccccgtctcctccggcgtcagcttcgactggtcagccaacaccctggaatttcaggccgcctgcgcgggcagcgtgagcctgaccttgaaggaaaatgcctcgcagaccttgtattataccgtcctcgtggacggaaaagagcaaaagcgcgcgcatagaaccggctcccgcctgttccttgcggaaaatcttccccaaggcgaccacaccttccaggtcgtccgccagacggagagcttttatggccaagcgactctctgcgccattgaactgataggacaattgaaaagccgccccgccgaccggcccctctacatggaattcctgggcgattccatcaccgtgggcctcgggaatctctgcctgggcctcccccagccggccagcgactattcagagaaccaggacggcacgcaaagctacgcctatttgaccgcgcaggccctaggcgcggacatcagcgtcctggcccgcagcggcatcggcgcgtatcacggctgggacggcggcaaccccgccctgcctcccatgtacgagtctatcagttattaccgggacaaaaccgccccctgggctttctcccgccaggcggacatcgtggtcattaacctgggcaccaacgacctgtggaccggcggctcctcctcggcgctgacccaggcgatgcaggacttcatgcggcaggtgcggcggaagaatccgcgggccgccatcgtctgggcagcgggcggcatcatggccgattatctggacgaggccgccgacgcggtgaaccgcctgggcggggccgcgaagaactattacgtctgtcccctgccctgcggccccaacaagggcggcaacggccatcccaccgtcgaacagcatcgctccatggccgacagcctggtcgcctttctgcggcagaaccgcctggtttccgcctcttaaccctctgccggttgcctctttgtctgcagcctttgcccctgccgctcgcggcgggggctttttttcgtttttctccatcggataggttgacactccccgcttttcgtgctataacgtgtacgtacacggaaagcccctggacacccgctgatggaaaggacgcgtgatacgcatgaccacggacaacgtcaacccgcgctgcgtgtataccggcgccagcacccgggaaatcgtgtttcctctgggcggcatcggcaccggcagcatcggcctgggcggcaacggccgcctcacggactgggaaatcgacggccgcccccataagggggccataaacgactacagccatctggccgtcaaggcggcggccggcggccgtctgctgtgcgccaaggttctggccggcgatctgtacaaggatctggccggcgcctatggcaagggaaacttcgccgggtacggctacggcccccagcgggagagcctggccggcttcccccatttccgggagcatacctttatcggggagtttcccatcgcccggctggaattcgcggatcccgcctttccgggccgggtgtccctgacggccttcaaccccttcattcccctggacgataagaattccagcctgccggcggccttctttgaggtggcgatggaaaacaccgccgccttccccatcgattataccgccgccttctcagtgcgcaaccccttctcccggcaaacgcgcaaccgcttcgtccgccgggacggctggtcgggcctggccttctggcaggaagcctgcggagaggacgcgccggaatacggcgagctgaccctggccaccgacgcccgggacgtccaggcccaggaggcctggtatcggggcgagtggttcgacggcccgacggtgtactggcgcgacttcgcccagggtggccccctccccccgcggcgctatgacgagcccggctgcggcgacgtggccaccctggccgttcccttctccctcgagccgggagaaacgcggacagtgcgcttcctgctcgcctggcggtatcccaaccgcttcaattactggaacccctgccgggagcagacgccccagggggagcgggacgtggtatggaaaacctacgacagcaccctcttccccacgtcgcaggataccgccgcctacgccctggcaaactggacgtctctgtacgagcggacacgccgctttcaaagggccctgttcgcctccaccctccccccggaggtgagcgaggcggtgtcggccaacctggctgtgctcaaaacccccaccgtcatgcggctggaggacggctccttctacggctgggagggcctgcacgaaaccgccggcagctgcgagggcagctgcacccacgtctggaactacgcctacgccctccccttcctgttccccaagctggagcgatccatgcgcgaactggatgtccgctataacctgtgggaggacgggcggatgtcctttcgcctccagcttcccctgggccgcggccgggacggcttccacccctgcgtggacggccagatgggcggcgttatcaagacctaccgcgaatggaagctgtgcggggacgacgattggctccgctccctgtggccgcaggtcaagctggccctcgaatacgcctggagccccgccaacccctaccgctgggacgggaacaaggacggcgtgctggaggggcggcagcaccacaccctggatatggagctgtacggccccaatgcctggctccagggcttttatctcgccgccctgcgggccggcgaggaaatggccgcctacctgggcgaggcggaaacagcggccgcgtaccgcgccctgtttgaaaagggaaaggcctggacaaaagagcacctgttcaacggcgcctacttcgaccagcccatcggcctgaccgatcggcagctgctcgacccctacgacgaggagacccgctcccggtactggaacgaggaggccggggagctgaaataccagataggccatggctgcgaaatcgaccagctctgcggccagtggcacgccgatctctgcggcctgggcgatctgttcgaccgggaacagacccgcaccgccctgcaaagcctgttccggaacaatttcaagcccgacatgcgcgcctactgcaatccctgccgcgtttactgcctcaacggggagagcggcatggtcatctgcgaatatccggacggcgcgcaccggccggcggtgcctgtgccctactgtcaggaatgcatgaccggcatggaataccaggcggccgccctgctgatccgggaagggctgcgggaagaaggcctcgccgtcgtccgggccgtccgggatcggtacgacggggataagcgcaatccgttcaacgagatggagtgcggcagcaactacgcccgctccatggccagcttttccctgcttctcgtatacagcggctttctcttcgacctgcctcggggccgcctcggcttcgacccgctgcgcgcgccgggcgagcgctttcgctgcctgtggagcgtggacgccgcctggggcaccgtggacatcacggacaaccggctggagctaaacgtcgaggagggcgcgctgtcccttctccgcctggcgctgccctggctgcccgccggtcgccccgccgcgtcagtggacggacggccccttccctgccgccgcgacggggacgacgtcgtcttggagggctgccgcctgtcggcgggggcccgcctgatcctcacggtggaaccatccgccgaaacgaaaggatgaacctccctcatgccggataaaatcaccagcacccgcctcgccgcgatctgcggcgtgtcccagggcacggtggatcgcgccctgaacggccgtcctggaatcaaggaagaaacccgccgccgcatcctgcaaaaggccgaggagctgggctatgtcaaggatatgcgggccagcggcctggtgcggggcgcttcctggcttatcggcctggttctcttcgatttgcgcaacgagtatttcgcccagctggccagcgcggtggaggcccgcgcccgcgcgctcggctacaccgtcgtcctcctgctcaccgaccgggatcctgcgcgggaacgggacagcgtccgccggctgtgcggcctgggggccgacggcatcctgctctgcccctccggccgaggagaggcgtatgagcagtggctgcgggggctgcgcgtccccctggtcacggtgggcaaccgcctgtccggcttcccccacgccggggtgtgggaggaggccgccatgggcgacgctgtccgctacgccgccggccgggattaccgccgcctcgtctacgtctataccgccaaggagcaggagtcccgcgtcaatatcgacgcccagcggcggcggtatgagggcttccgggccgcggccgccgcccttccccgcctcgaaacccatgtggtggcccagccggactatattcccgccgtccgcgccctgatcggggcctcgacggcccgcaccgccctgctgtttcccagcgactaccaggccctgcacatgctgctcgccctgcgggaggagggcgtccccgtccccgcccgggtcggggtcatggggttcgacgacatcgatatgctccgctacctgtccgagcggctgaccactgtgggctgctccatcgaccggatcggcgccgccgccgtggacgccgtcgtccacggcacccctccccccgtcctcccccataaaatcataccgggtgccaccctgtaacctcctccccctcattttgcatatggataaaagggcggtcgctccgggctgaaaagccgcgagcaaccgcccctttttgcttcctccgtcagccggaagtcaccgtccggccgaggaagctgttcaccttgtcatacagcggcgcgtttttataggcgtcgccgatggcgtacagccacgcctcctccagggcctgtatgccctcccggcggatgccggcggcctcccaggccgagaccggcctttcaaaaaaccatttcatcggataaatcgtcagcccgtcgtccgacacatacgccgtggaaaaggcgaattcccggttgatgcgcgcctggtcaaaggaatacagaacgtcgatttgctcgtccgtatagaaccggaaatcctcgaccgccgtattcatcgcctcaaattccgctctgggaatatgaaaatcccggatatagtccacaacagtcacctcggtgaccgccgtcagcggatcggctgcggtcgccgccgccgtcgccttttccgctttctttccatccctccattccacatagctgtcgtcgttcaaatacttgccataaaacaaatccatcacttctgtaatttccatcgcatacatgctttccgtctgaatcagaaaatccaccccgccgatgccctcgctgacagcggggtcgctggagcccccggcggctccgctgccagtgccgccttcggtcttgcaggccgcgaacgttagcagcaggcagccggaaaccacccatacccaagcttttttcataaggtctcattcctttccgcgttgataaatggcgaagtttatttgagcctacgcggtcattgcggccaaacgttacaaagcggtggaggtttggcccgtgaaggggatatatcggtagaaccgctgcggattaatggctccgttaaccgtcacacctgtagaaccgtccttcgtcatggccagatcgaggtgcggccccgatgaattgccggtggaacccacccggcccaataccgtattgaccgtgaccgtttctcctacgctcacgggaggggcctccatcatatggataaagcgaacgcgtattttcttgcctgtgcccggatcgacgttgttggtttccagaagcaccccgttgccgatggaggcgttattctgccagcgatacacgacctttccgctggtggggctgtagatggacgttccgttgatggcatatcccgcgtttcccgacaaatcgatggcgtaatgatccggccgggacgccagcttgtagcccgctgaaatatttttggttttccggacattgtcaaatacccaataccaccccaaatcgtatgggtcgcttcccggcgcttttaccagctccaaataccacctctggcagttgtgcccgctccagcgatacgtctgcacgttcgccgtggaatccagtgaggcgttcgccacatccaaggtttggttatcgttttccccccagcggttgatcaaccgtaccgaaccgtccccgttcgatacgattttccattgctgcgtattcagcccgctggtttgataatacaaatcgacattgtgggaatactgattgacactcagcatttttcgtccgctgccttgataatacggctccagcacttccagggtataatatccgccgccgacagacgtgattttccatacctgattcggattgccgtgatgttcgtattgaatcacgttattattataggccatctccgcatccaaataatgaccgctgtgcttgctccgcagataatacagcccgccgctcgatacggtggtggttgtccccaggcccgaagtaagcgctgtgcaataaaaagataacgaacttgtcacggtgagtaaaatggccgtcatcagagaaatcatcagccgtgcacctttgccaaatcgaagacatttactcatagttacgtccattcctttcttgtattccgtcagctattagacgtgtacgcttcacgtatggcggacaggagtgtgtatgccgactgtctcccgcatatcacctctttccaaaacgagtatcggaaacctcttcactaactataacccaaacaagagagtatttatgacaacttattttgaggtttcgtgaataatttttatatacttttatgtataagcgatttactccatctggtcgtctgccgtctccaaacgcgccgccaatctcttgcgtgcccgctccagccgctttcgcacagcggcttcctttactttcagcagccgcgcgatctcttggttcgtgaacccatggatatagcgtagcaaaaggatttccttgtccagcaccggcaacttatccatttccagcgctatttctttcatcgtcgcctccgatagggctgtccgttccacatccgcttcgtccggccaatcgtgctgtaagccctcaaaggaaagcgactcccgcctttttctttctacgtataagcgtttcgccacattctccacgaccatcatcacataggcctttgtcctcgggtgtggaatctcctcgatattatccatatgcgccaggatttttaaaaaggccatttggacggcgtcttccgctagaaactcatcctgcaaaatgctgtttgcggcgtattgcatcaagcggctgtattggcgatacagtctgtcgaatcgctctttatcttcgtccgtatctagcagagacaaaccgatcggcagcatggcggcaccttcttccctgtagtatctccgccttaattttaccatattttccctaatatcacaacaacatgcacacttttatttctacacgcgccgttttcgatccttttttcgtcacctaataggctaaaagtggatgaatgcgagcaattgctgagccgtcaaaggcatagaaaatgcataggcagtgcgccgccagccaacccaccccgctgtatcacagcgctcccccgtaaccacgagccacttgaatgttaacatgcgttgcttgcggcaacagacaataccccatatactattcaatagaaaatcaaaaggaggacatgtataatgttaaacgaaaatattcaatcaatcagaaaatccaaagggctttcacaacaagaacttgctattcaattgaatgttgtgcgacaaaccatctcgaaatgggagcaaggattgtcggttcctgattcagatatgttaatttctatatctgaggtgttggaagtcccggtgagcactttgcttggggaaacggttgttgaaacgaaggtcgatgatttaaaagtactttcggaaaaactagagattataaatttacagctcgcacaaaaaaagattgccagacgaaaaatcatgcaaggattgcttattgcactgtgttctattatagtaatcatttcggcggccttaattgctttaaatagtccctatttaagtttgaactataacgaccctgaaacggctgtttttggagcaggttttcatatatttgaatggctatttgtgcggttagcacctattgttcttattggagcaatcgctggaattttcttaacacgaaaaaaagaataaaatcgctctacttttccataaaaaaggccggccgcccgtctctgttcaacgcaggacgggcggccagcttccggtttcgatttcgtatcgttcctcttcgagcgtcctgccgtccggcgtacgcaccagacggaacacgtctgtccgcctcccgccgtaatacagcgggatttttcgactcggcacattccgccggtcgacaggataacacagccggcctatccccatggaagcggccagccgaagcatcgccccaatggcttcccttccataatgatgcccgtgcgcctccatctttgtccaaatgccaagctccggcactggagccggcacatggtgcaggctggcaacgccgataaattcgctgctccccttcagcgtgatggcatatacaaaatccgtgccggcccaccgctgctccataaaccggcggacgaccgcctccatgtcgccccgctccttcgccggcctggaaccatataggtgacgacctctttggtgaaatgagcgcagataggatcgatgtgttcctctgtcacaggcgtcagcaccagtcttgccgtctccagatccacgaggctgtttccctccgcttccgttctctctttttccacaggcctccgccccctgctcccggagggccgcctatcaattgccccctgtcgcggcgcctggacagaaccagaaaaactggacaatagacaaaatcccccctgatgtaggataa

SEQ ID NO: 3969 - DNA, 32759 bp, Unknown
  16S sequences of unknown bacteria
caaaccccggcagggggatgatccccctgcaccccgcactttgtcagcaacctgaggcgcgctgcccggttttggacagcgcgctttcctgtttcagcttttatgcctcggtatgcacaaactgcatatcgctgaggaactgaaccgccacatccagctcctcctgggatacctgcacatcgcctgcgggctccagcagcaggccgatgaaatagccctgatagaccgtaaagatctcggcatactcgtcattctccgagttctcgtctacgatgatcagcttggtgccctcggcggtttccgaaagggtgtaggtgggattggcaaagtccgatacggagacggcgatcagcgaatcaagctcctcatccgacaggtcgttgatggaccggtccgcatattcttcggaatagcccagggacaacaccatcagcagtttgccctcttcttcgggtttcatctgcgcgtagagcacatcgccataccacgtctgatcaaacgcatagccgtccggcacatttaccgtaatgctcagcgtgtcgtcaacctttaccgtaacggactgcgcttcttccgccaacgcgaataccggcaacatcagcacggccagcaataccgcaaaaaactttttcatctttcttgcacctcttttcatggttctgccacagcggctcagttattgaggacggcgcccacgctggtcccgtcgcccaccgtcgtaatgaagctgcggttgatgaagcccacgtagccggtctggggatcgctcacctgcgcccagttcttatcctgcgcgatgacggttagcgcgtatcccgcatagcagcgcataatcacacgacagtcataggagggggcccaacggaagttgacaaagccattgggcttggaggggcgcacaatcacctcgtagggatcaacgagctgaaagttcttgaaatcgggcatctgcggggcatcggacgtgtcgtcactggtattgtttttgctttcaggcttctgcaccaccaggtaacgggtcatcatatagccttcccatgtgcggcccccgctggtataggccacatgtgcccagttgcggtcggaaagatagcccagcacatccaccacggcgccatagggcacgtcggtcagcacattattcgccggagcgatgggatccttgcgcagatgcacgcttccaccattgctggtctgcacatacatgctgcccgtgttggccagggccattgccggcagcatcgtgcacagcaatgcgacggccatgagcgctgtgagaactcgtttggtcatgagaaatcgcaacctccttgacaaaaatgatgatccatattatagcataccgccaattggatgaaaagcggtctccctctgccggcaaaaccgttttagaaattgcagcatccatttctttcaagcaagacaagcgattcagaggggttgacagacagctttgcgtgcagtataatgattgtaaattcatacactccaaaccgttgaagcggagataaaggcggccacgcccttccagagagcccgcggcgctgaaaagcgggcaggaaacgaaccgtcaaatggaccgcggagggcgcagtcaaatgtggaaatccacagagtattctgcgacgcgcaggcatgcgtcatttgccggagatatgatcgtatctcgtcaagcgcacggggcttttcccgtgaatcagggtggcaccgcggacaattgagttcgtccctggcagaaacagatttctgccaggggctttttcatttccccgcagaaatcggaaatccttttgatttcaggagggaaacaatgcggttgagcaaacgatggcgtcccggcggggacgatgaatgatttttcttcaaacggcgcattttccgatccaataaacaggaggttcgtagcatgaaatatcatgacgtggattttgatacctatttccgcaactatcccgacgcaaacggctatttcggcaaatatggcggctcctacattccgccgcagctgcaggcggctatggacgaaatcaccgacgcctacatgaccatctgcaaatccagcaagttcgtaaacgagctgcgccgcattcgccgggagtttcaggggcgtcccacaccggtttcgcacctggagcgcctgtcatcctcgctgggcaacgtgcagctgtatgccaagcgggaggatctcaaccacaccggtgcgcacaagctgaatcactgcatgggcgaagcgctcctggccaagtacatgggcaagaaaaaggttatcgccgaaaccggcgcgggacaacacggcgtggcgctggcaacggcagcggcatacttcggactggaatgcgacatctacatgggcgccgtggatgtaaaaaaacaggctcccaacgtggcccgcatgaagattctgggtgcgcgtgtagtcgaggtgaccgacgggcttcaaaccctcaaggaggcggttgacgcggcctttgcagcctacagccaggaatatcaggatgccatttactgcatcggttcggtggtgggcccgcatcccttccccatgatggtacgtgactttcagagcgtggtaggtatcgaggcccgctcgcagtttctagagatgaccggcgagctgcccgacgctgtggttgcctgcgtgggcggcgggtccaatgccatgggcatgtttgccgggtttctgaacgatccggtggatatctacggcgtggagcctctggggcgcggtccggcactgggcgatcatgccgccagcctgagctatggcagcgagggtgtcatgcacggcttcaacagcatcatgctcaaggatgaaaacggcggccctgcgccggtctattccgtagccagtgggctggattatccctcctccggaccggagcacgcattccttcgcgatctgggccgcgtgacctacgacgtgatcggcgacaaggacaccatcgatgctttcttcaccctgtcccgtctggagggcatcatccccgccatcgagagcgcccacgccgtggcctacgccatgcagctggccaagcggatgaagcgcggctccatccttatcaacctgtccggacgtggggacaaggatatggactacgtcattgaaaaatacggcatccgctgaaatgcggcgcgccgcccggccctcaaggggaggccgggcggcgcaatgctttatggcggcttgcatggaaactggcactgtttacgggtgtggtctgcctctatctttcaaaggccggttttctctgaaaacgtcgggtccctcccccgctttcccaacccgctccgccccgatctgtgctataatagcaccggatccgaatcgaaaggagctgtgcgccatgctcgcctatacctacgtcagcccggggcgtttcgaactgatggagaagccccgccccacccttcaggacagccgggatgccatcgtgcgcgtcacgctggccagtatctgctccagcgacctccacatccggcgtggaagcgtgccgagggctgtgcccggcatcaccgtcggacacgaaatggtgggtgtggtggaggaaaccggctcccgcgttacccgcgtaaagccgggcgaccgcgtgaccgtcaacgtggaaaccttttgcggcacgtgctatttctgccgccacggctgggtgaacaactgcaccgatcccaacggtggatggtcgctgggctgccgcattgacggcggacaggccgagtatgtgcgcgtgccctacgccgaccaggggctggaccgcatcccctcctctgtgaccgacgagcaggccctgctggtgggcgacgtgctggcgaccgggtattgggccgcacagatcgggaatatcggaccggaggataccgtgctgattatcggtgcgggaccgacgggactatgtacgctgcaatgcgtactgctcaagcatccgcgccgtgtgatcgtatgcgacgcggacccattgcgcctggtcttcgtgcgcagccaccacccggaggtgctcaccacgccgcctgaatcgctggaagtctttgtgcgtcagcattccgaccatggcggggcggacgcggtgctggaggtggccggcacgccggataccttccgcatggcatggacctgtgccaggcccaacgccaccgtgaccgtcgtagccctctacgacggcccgcaaacgctgccgctgcccgatatgtacggcaaaaacctgattttcaaaaccggtggggtggatggctgccactgcgccgaaaccctgcgtctgatcgaacagggcaagatcgataccacgccgctcattactcaccgctgcacgcttgccgacattgaagaaggctaccgcatctttgaaaaccgcctggacggggtgctcaaggtggcggtcgcgccctgaggcgcccaacgacggctcaagcctccagcttcgccttgctgatgctgcgcttgagccatccgcccttgagatagtaaatcacaaacagcaccgaggtgatcgtccacgtgatggggtagctgagcagcaccaccgtcaggctgtgataggcgggggccacccccatcacccacgccacgcgcagaaggcaaacgcccgtgagtgtaaagagcgtgggaatgagcgaatcgcctgttccgcgcaccgcgccggccagtacctcaatgcagatgtaggtcacatacgtgggaaccagcagccgcaaaatctgcatgcccagcgctatcacctgcgcatcatcggtgaacaggcggtagagcggctcgcccagcagcaggaaaaatccgctcatcagcaccgtggcgccgaaggtcatcagcagacacacgcgcacgcttcggcgcatgcggtcgtacttgcccgcgccgaagttctgtcccacaaaagtggtgatggatacaccaaaggcgttgatcatcatccagtacagtccgtcaagcttgccgtaggccgtataggcggccacgatatcggtgccgaaggcgttgatgctggcctggatgatgatgttggagagggaatacatgaccgattgcaaccctgccggaaagccgatgcgcacaatgcgatccagcagattgccatagaagcggatttttctgggttccaggcgataggcctgacgggagcgcagcaaggtgagcaccaccagcacggcgctgaccgcctgagaaaagatggtggcaatcgcggcgccggccacgcccatctccaggcccaccaccagcagcacgtccaacacgatgttaaccatgcaggcgctgatgaggaaatacagcggccgccgggaatcgcccacggcacgaagcaggcccgcacccacgttatagatgagcgaaggaatcatgccggcaaagtagatgcgcacatacacctcggcatggaccagcacatcctccggggtacccatccagcgcagaatcacaggggaaaacacgatgcccagcaccgtgaacagcgcgccccccgccagcgacatcgcagcggcggtatgtaccgcctggctgacctcgcggtcgcgccgcccgccgtagaactgagagaggatgaccgtcgccccggaggaaaggccgacaaagaagcccaccaccaggttgaccagcgtgcctgtggcgcctcccacggcggccagcgcttccttgcctacgaatttgcccacaatcacggcatcggcagtgttatacagctgctggaagaaggttccgagcaggatgggaaagaagaatgccagcaggtttttccagattacgccctcggtgatgctgttttggctgaactcatgccgcttgaaaagcgccataggaatcctcctcaataagcgatgcgtcgtcaggggttattgggcttttcaggcgggaaaagcccttccccgtctttttgtgtatggggagagcggtatagctcccatgcgtcatagggtccggcagggcggtagcccagccgccgggccagtgcaaccgattccagattggccgcgtcccagctgggatagaggccacggtccaggcaggtcaggatcagcctggcgcagcaggccagcgccacgccgcgcctgcgcatgtccttgcgggtttccacctgcatctcgatgccgccgctgaagcacacgtaggacgacgccccgcctaccagctcgccatcccgcaatgcggccacccccagtccgcgggccaaaaagtcgtcctcgtcacggaactgttcgcagaaggacctcgaccagggcgcctgcatggccaggcggcaggcctcccggtcaaacggccgcagttccacgtccgcaggcgcacaggcggcaaagcgcgccaggcgctcccggtcgaaggcctcgccgcccttgtgaaaggcatagcgcctcgtaagcgccgcatcgcccgcgaacacctcaggcaccagcgctgacaatgcggagtcgcgcgccacaagaatggcgtagcgccccgcgtgctctcgcttccacgccatcagcaggtttcgcgcagtctggctgtcccgcgcttcaaggaacagaaaatccccgcattcagccagcgcgccgccgggcgtgtcctccagcatccacacgccgcccatcgcaccttccagcgcggaagcaatcagcttttcctgccagcctgcaaaaagggacgcggcagctgcctgctgcgccccctccgccctgctcagagcctgtcccatgcagcgagcgcctgttgaatgtagtccagagccagaagcttttccttcacttcctccacgctcaaaagccgggtgttgctggagttgaattcggtcagcacattgcggtcctgctcaccggtcacaacgtatttatcgtagttcaagtcacgcgcgtcggagggcacgcggtaaaaatcgcccatatcctcagcgtgcgtgcactcttcgttggtcagcagcgtttcatacatcttttcgccatggcgaatgccaatgatgcgcacgggatggtccggcgcatgaaacagctctttcaccgcctgggccagcacaccgatggtacaggcgggggcctttttgaccagaatatcgccgctgtgcgcgtgctcgaaggcgaacagcaccagctctacggcctcctccaggctcatgatgaaacgggtcatgtccgggctcgtcacggtaaggggctgccccgaccggatctgatcgataaacagcgggatcaccgacccgcgcgagcacatgacatttccatagcgcgtgccgcagatgagtgtacgctcggggctgacggtacgcgccttggcaacaaacaccttctccatcatggccttggaggtgcccatggcgttaacgggataggccgccttgtcggtggagaggcaaatgaccttgcgcacaccttcctcaatgcaggcggtgagcacattatccgcgcccagtacattggttttaaccgcttcgatcgggaaaaactcacaggagggcacctgcttgagcgccgccgcatgaaagagataatccacgccatgaatggcgtttttcacgctggaaagctcgcgcacatcaccaatgtagtatttgattttatcattctggtagtgatggcgcatgtcatcctgctttttttcatcccggctgaaaatgcggatttcagcgatatcggtatccaaaaagcgtttgagcaccgcctcgccaaaggagccggtgccgccggtgatcatcagcgtcttgccgctgaagggggtcatagcgtcattcctcctcggtatttttgagcacattacccgtcaggcggtgcagcacctcgcggtaggcttcctccacgtcgcccaggtcatgacggaaacgatcgatatccagcggctcatgggtacgcgcatcccagaaacggcacgtatcgggcgatacctcgtccgccaggagaatttcaccgtgaaagcggccaaattccagcttgaaatcgatcagctcgatgttgatttcacgcatgcattcgctcagaatatcgttgacccgcaggctcatttcctccatgcggtgcatctcctccgccgtggcaatctccatggcggtgatatgggtcagattcaccagcggatcttccagctccgggtccttgaggcagtattccaccacggtatttttcaggcgtgtaccgtccgggtatccgatgcgtttggccaggctgccggccacgatgttgcgcaccttgatggttacggggatgatctccacccgtttgatcagcgagcaacggttatcgatgcgccggataaaatggttgggcacacctttttgggtcagcagggtaaacatgtattcgcaaatcaggttgttgatctcgcccttgccgatgatgcgcccgcgcttgagcccgtggaaggcaaaagtttcatcacggtagtagaccaccgcctcgtcagggttttcagtggcatagaggcgctttccctttccctcggcgatcatgttggtaatgctgttcatgcttcctcctcgccatgccgcatgatgtggtttcgccttattgtagcacgcttcgtcaccattcgcaagcacgcgcgcaaagcgtggattaaaacaaaacaggaatttccataagaagcaatttactgctatatgtatttttttgattgacagaaatttgtacaaatgttacaataaatacaatctgaaacaatccgttttgcaaggagagaagttttcgtgaagtacgaggacattttcgccgccatcagtcgccgttatgacacgttcacccgtatggaacagaacattgcggattatgtgcttgaacatggaaaagacgtgctggaaatgagcatcagcacccttgcccgggagtgcaaagtggtggagagcaccatattccgtttctgccgcacgctgggggtaagcgggtatcgcgattttcgcacagcactggcggtaagcctgtgtgccagggagcaggaaagcgatccgcccatagcggatgacgatcccgttgccattgaggtcaggcatatttacgacagctgtctcaacgcgctgcgcgaaacctatcagttgcttaagcccagcctgttggacgaggccgtgcggcggctgatgctggcagaccgcatccttgtgctgggcgcgggcaaatcgatggtatctacgtttggcgcctaccggcagctgatgctcgccatgccgaaggttcagtgcgcgttcaacgcgcatgagcagcgcaagctctgtgccatggttacagcccgggatgcggtgatcctgtttgtgcaaagcgacgcgcccgcctttctgacggatttggccaggctggtccacagcaggggatgctacctgattttgatttcgcccctggcaaaaatgtcgttgagcgttctggcggacatcacgctgctttgcggtggattcggcggggcgggtacagctgtaagtgcgcaggcctttttgattgagctgatctacaggctgtatctgcagcggctggaaaatgcgcggcgtgccctgatgtagcggaagcagccatatgcgtccgtctgccgcgttccgatagacaggcttgaaggaagagctgcgtttctgctccctttgggtgcttgctacacttacagaaaacgttgcggcataaggttttgggcagggccccaaactcttatgccgcagcattttccgcgagcgttgcgagcatccgaaggacgcaagaaaggcggctttctccaaaatcaggggtttttcaacggcctgacgacggccaggggctgtcgtatttttgatcccgcgtcaatgcgcaagaatcctgtaaacatcccatctgtttttgtgctatgctgagggagacagacggatgggggagggaaagcagcatggacgacatccggcttgcaatgatcggcacagcccttgatttcattgaaactcatctggaggacggcgttgctcttgcggatatggcacaggcggcgcactattccaaataccaccttcatcgggcattttcgggtattttgggcataaccccgcaccaatatgcccggaggcggcggctgaccgaggcggcgcgccgtcttgtccgtttccagacgcctttgcgggatctggcgctgatggcgggctatcaaagccagcaggcattcagcgatgccttttgcgccatgtacaagattccgccggcggaataccgtcgcctgcgcgttttctatccgctgcagcttcccatccgcctgaatcccgaagcccccttatccgccatccgtccggcggaggcagaggatatcccggcctggatggcgcttcttggtcaggtggtggatgggtatcccaggctggacgaggccgggcacctttcctggctcaaggctcgaatcgcgaggggagaggccctcctcctcagcagcggagaccgggcggcaggcgcggtcggtttttgccgcgctactggcatggtcgactatctggccgttcatccgcagtaccgcgcgctgggaatatccgtgcagttgctcaaggccgtgcgacgcaggctttcttcggagcgtgagctgagcctgaccacctttcgcgagcgcgacccggcggaccccggctaccggcgggaatggaagcgcctgaattttcgggaaggcgagctgctggtggagtttggttaccccacccagcgcatgatctggtccgttcgagaccggtagtcagatgaaaaagaactggaaatgcgacgcggccctgtttctcatcagtcagagcgtcacccttttcggctctacgctggtgcagatggccatcgtatggtatgccacggttgcgacgggctcgggggcatgggtggctgccttcagcgtctgctcctatctgccgcaatttgccgtttccttcatcggcggcgtgtgggcggaccggtttccccgcaagcggctcatagcgggagcggatctgggcattgccggtgtaacgctggtgatgatcctgctgatgcctttgcttgccgaaggcgtagcgcttctgtccgtgcttttggtactgtcgatgatccgctccgtgggcgccggcttgcagacgccggccgtcaatgccacggtcccgctcctggtgcccgaggacaagcgcatgcgctttaacggaatgaacgccgctgtgcagtctgcggtgcagttcgtcgctccggccgcagcgggcgcggtgctcatctctggcaccttgcgctccaccctctggattgacgtggccactgccgctgtgggtgtggcggtgcttctctgcgtgtcgcttcccgcccctgagaaaaagcaggacgccctgtggccagccctgcgggcgggagtaagctatgccgtacgcgacagaacggtaggccggctgctggccgtctatggcgcgtttgtgtttttctgcgtgcccggcggctttctggcaggcctgcatgtgagccgcgtctttggtgacagctatgaatatctgaccgcgaccgaactggccggctttgccggaatggcggccggcggccttttgatgggcctttggggcgggtttgccaggaaggaacacacgctgctcgccggactggctgcctttggaaccctgtctatcctcctgggatattccgcccgcttcgatatctatctgggggtcatggcgctttacggcgtggcgctgaccacggtgcagaccgcagtgtccactctgctgcagacgcgctcggcgcccgccatgcagggacgtgtattcgggctgatgggggccgcttattcgggctgcatgccgcttggtatggcggtctttggcccgttggcggaccggctcccgcttagatgcatgatggccgtctccggggcagcgctgttgctcatggcggggctgggcgcgatttttgagtcgcggcggcttcactgagagaggactgcggcatttcctgaccgtttttttcatgttcttccccacgcaaaaattcccatcagcagtttacagaggcacagtgactatgatataataataaaaacgcttcaagcccttgcccaaatggacccggcaagcgaaaaaaggaggatttccaaggatgaaaaaggctttttctgtcgttcttgcactgctgatggtgttgagcgtatgcacctttgccagcgctgaaggaaaggattacagcggctacaccatccgtatctattccaactccaactccaccgagcgcgccacctggctggagaacgcggccaaggctgcgggcttcaccatctctctggatgacaacagcgtcatctccggcgataccgccgccattcaggccgccaatgagaacaaggacggcgacatcatcttcggcctgaatgaaacccgctggtctcagctggtcaacggcacctacgagaacctcaaggtgatggactggacccccacctgggccgacgaagtgggcgaatacaaatacgacggcaaggcctatggcctggtcatccagaatgtgctgatgctctaccgcaccgacgagctgggcaccaacggcgaaaagctgagctttgagcactgggccgacatcgtggactgcgggtacacctggtaccgtcagggcaaggtgggcggcaccaccaactccaacatcaacagcgccatgctcttccccttcaccgatcccgaatcccccgcgggcggcatctccgtggaaggctggaagaccctgtggaactactgcgccaacggcatctacaccggcgacagctacggctttgatccgctcaaccgcggcgaggtgcaggtttctaccttctactccagctctctctacggcaacgtggacagcgcggccgacagctccgagcatccgctgctgggcaccctggaacccgaaaactgggcgctggtagatatcgctgacggcacctactacatcgccgagtacctgggcattctggaccgcgagggccgcacccccgaggagacggaggctgtggtggctttcgccgagtggttcggctccgccgatacgcaggctgaatgggctgacgagttcgactccttcccctgcaacaccgccgctgtggctgaaatctacgacgagacacccgcgatctacaccctgaagaatttcgcgctggagaccgtcgaaggcaccgacatgacctatgcggaatatgtgggtgcacattccagcgaatggaccaacatcatgaccaatctgggcttctactgggccgacaacagcgctgctcccaccgagcccgactgggataatctggactggtccgtgctgacgcaggctgccggcgaatgacgcttttggccggcgtgagccgaaaaaagcatttttctcaatgagcgatatggcgggcctgaagccatcgggctcgccatatccatattctcaaagaacataaagggggctgtcggccgcatgatcgaactgaaggacattgtggtcaagttcggtgattttgaggcgctgcacaacatcaacgtagaggtgcacgaaggcgagtttttcacctttctggggccgtccggctgcggtaagacgactacgctgcgcaccatcaccggctttattgagccggtttccggcacggtcagcgtcaagggcgtggatattacccatgtccccattgaaaagcgcaacatcggcatcgtgtttcagagctatgcacttttcccatccatgacggtgtataacaacatcgccttcggcctgaaggtgcaaaagctcaaaaagcaggaaatcgatgataaggtgcgcgctatcgcccgcaaggtggacctgtccgacgaacagctggaaaaggcggtcagccagctttccggcggccagcagcagcgcgtggccatcgcccgtgcgctggtcacagggcctgccatcatctgcatggacgaaccgctgagcaatctggacgccaagctgcgcgttcagctgcgcaatgagctgaaaaagatgcagcgcgactttggcatcaccaccatctatgtgacccatgaccaggaggaagcgctcaccctgtcggaccggatcgccgtgttcaacaagggttttatcgagcagatcggcacgcccaacgaggtatacaaccactccaggacggagtttgtctgcaacttcattggcgacatcaaccgcctggaaggggagctagccgatggcatgaagctggaccccgcgcagcaccacttcgtcaggctggagcgcatccgcgtcaaccgtcccgcggacgataacgagctgcggctggacggcgtgatcgaaagccgtgaatactatggcctgtacatcaagtattatattcatgtaggcagccagaccatcaaagccattgaaaagaacgacggcatcaacatctatgagccgggcgaaaaggtgactgtgggcattcatcccgtggacgtgatgagctacgacgccgcgcccgacgcgcgctaaagggggcagccgcatgaacgcaaaggcctcctcatggttcaaacccaacctgctggccaaaacatttggcatcgcattttttgtctatctgttttttggcttcatgcttctgccgtgtctcaacacgctgacgcagatctttaccgtgaaaaacgccgacggcgtgaccgatcccctggctgtcatccgctttttctttgcgggcaacatgcccaagtacgtctggaattctctcaagctggcgctgtgcctggtggtgacggtgaatatcgtgggcgtcagcatcgtgcttttgacggaatacttcgatatcaagggcgcgaagatcctgcggctgggctacatgaccacgctgatctattccggcgtcgcactggtgacgggttatctgttcctctacgacagcgacggcattctgaccacctggctgtatgaaatgtttcccaacatggaccgcaactggttttccggcttcaacgcggtcctgttcacgatgacgttcgcctgtacgtccaaccacgcgctgtttctgcgcaacgctatccgcggcattgactacaacaccgtggaggcggcgcgcaacatgggcgccaagcccttcaaggtgctcacgcgcgtggtgttccccacactgattcccacgatgttttccctcacggtcatgaccttcatcacgggtctgtgcgccatgagcgccccgacgctgctgggctatgactccatcaatccggaaatcgtgcgtctggcgggctcatccgtggcggacgaggcgtttccgcaggcgcgtgcggcgctgctttccattttgctggccatgttcaccatcgttctgctcacggtgctgtccaactacgagcgcaagggccattacctaagcgtgagcaagaccaaggccaagctggtcaagcagaagatcaccaaccccgtggccaatgtgtttgcacacatctacgcctatgtgctgttcatcatctacatgacgcccgtggtgatgatcatccttttcgctttccagaactatcccgccattcgttccaaaacgctcagcctgagcgatttcacgttgatcaacttcttcgggtcgcaggattacgagttcatgaccaaccgcggcaagctcaagactcgtcccgacgccatctccggtctgttcgccaattcggacacggtaggcggtatccggctgagcttcgtgctttcggccatcgcggcggcgctggcctgcgtgatcgtggtggtggcggtcaactacatcttcaaaaaccgcggcaaaaagcggtccaccgtgctggaatacagcctgctgttcccctggcttttgcccaccattctgatctgctattcctaccgcaccttcttcaactccgaggatgtgtggtatgtcttcaacaccaacctgtacatgcgcgagaacgtgcgtttcctcatcatcatggcctatacggtggtcaaattaccattcgccctgcgcatgattaaggcggcgttctatgctatcgacgaggagctggaggatgccgcgcgcaaccttggcgcgagcgggctgtttaccttcctcaaggtgaagctgcccattgtgcttccgagcgtactggccgtctttgccctgaacttcaacgccctctttaccgaatatgatatgtccgccacgttccactccagctatggcaagacctatgccatgattatccagaacatgtgcgctgaggagggccgcgacggatacaacgtcaatgcttcgggtcgcagatgcgcctccacggtgtttatcatgctggtgagcgggctgattctgtacctggtgtacggcgtgggcgcgagggatctggccgaccgtctggctctgaaggagaagcgccgaaaacggagagaaaagctcatggcccgcttccgcggcggcggagaaaaggccgcagcctgatatggggcggcatggcatttgccatgccgccttttttcatgcaggcagcgaaaagagccgacgcgtctttttcgacgcgacggcccttttggattgcgtatgaatcagtacttgcgcttgcgtgcagcctcagccttctttttacgtttcacgctgggcttttcataatgctcacgcttgcgagcctctgccaaaacacctgtgcgagcacattgacgtttgaaccgcttcagagcgctttccagggattcattctcgcggatgcgtacctcggacactgctatccctcccctcgctcataccgcctggccccttcactgtgtcaagggcatacggcgaccatacatttattatagcgcttatccgccaagccgtcaaccatgaattttgaacgaaacgtaaacttcatggacaggagccgtgaagccttatgccatgcgctccgacagcttttcaccgcccagcacatgatagtgcatgtgcttcacggtctggcaggcgttttctccgcagttgttgacgatgcggtagccgccctcctccaggcccagcgctttggctaccttggcgcaggtacgcaggcaggccgccagctcatggtcggtcaggtcggcattgtgcgccacgtcgggcgtgtgctttttgctcaccaccagcacatgcgtgggggcctgtgggttaatgtcgtgaaaagcgtaggtatcctcatcctcatagaccttcttggacgggatttcccccgcgatgatcttgcagaacagacagtccgtcatgtcaatcctctccttttgcgtgatgcttatggcagatattctacaaccgtacccgccattccttcttcggtaagcgcctcaagccgcaccagcgccaacgcgccgggccggccattctgtgcacgtacgtggatgtattcgggggtatatccctctgctccgccgttatccggcagcgcttcttccaggagcacctgtacctcccggccaaggaagccctcgcggtagcggcgggacagcttgtcgcccaacgcaatcagccggtggacgcgctgggccttcaccgcctcatccacctggccgtccatcgtggcggccggtgtaccctcgcgcgggctgtaggggaacacatgcaggcggctgaagcccacctgctcgcagaaatccagcgtttcctgaaattccgcttccgtctcaccgggaaagcccacgatcacatccgtagtaaaggcagcctggggccacattccccggatgcgcgccacggcctccagaaactgacgggtgttatatccgcgcttcatgcgggcgagcaccgcgtcgctgccgctttgcagcgccagatggaactggggacacagttgcggcagggctccaagcgcctccacaaaggcctttgtggccacgcgcggttccagcgaacccaggcgcacacggcgtacccccggcgcttcgcatgcggcctctaccgcctgcgccagcgagggacggcccggcaggtcgcggccatagctggtcaaatgaatgccggtcagcaccagctcctgaaagcccgcctgagaaagtgcctccgcttccctgcgaatctcttccagcggccgggaacgcactccgccgcgcacgctgggaatgatgcagtaggtgcagcggttgtcgcagccctcctgaatcttcatcacggcgcgggtatggccctcgtggctgtggatgctcagtggctcgtagggtgcgttgctcacgccctccaccgccaccatctgcataccctcgcgcacagcctgctccagcagctccaccacccgggcgcggtactgcgtgcccagaatgagcctggcacccgtttcgcggagagcttcgcccatgcgctgcgccaggcagccggtgactaccagctccgcgccgggattgcgccggcggcagcggcggatggcctgcaggctctttttgtcccccgtaccggtcacggtgcaggtattgaccacgtatacgtctgccggcgcgcccgcgggagccacagtatagccgtggcgctcaaactcctccagcatggcctggctgtcgtactgattgaccttacatcccagcgtggtaaagcatacggtcttttgcatgcgtctgctttcgctcctttatcacatctcgcccaaagcggcccacaatacactcagggcacacaggcccgccgtttccgtgcgcaggatgcgcggccccagcgttacgctgaccgcgccaagtgcacgcagggcctcccattcctctgcggctattccgccttccggcccgatgaccacgtccacccggccaggccggccatgatgcgccgtaaaatcggctattgcccggctcatggttagggcacgttcctcctcccaggcggtgagcagcaggtccggcgggtcctttttcagtgcctccagcgcctgacggaaggcctgcgcaggctcaatttgcggcacgtgcgcgcggccgctctgcttggctgcctccagcgcgatacgcgacagacgatcgcggcggctgtccttgccaccacgcgccacgcagcgcgtcatctccacgggccacagcgcccatacacccagctcggtggccttctgcacaatccattccagcttgtccgacttgggcaggccctgaatcagcgtgacctttgcacacggctccggcgaggggagggccgaaagcacgcgcgcctcgcaggcgcggtcgttcaccacttccagcttagcgctccacagcgtctggccgtccagcagcacaatctcctcgccggggcgcagacgcagcacgcgcgcggcatgcgcgctttcctccggggaaagcacggctgtctttcctgccgacgcggggtgttccacataaaaacgatgcatcatgccgcctcgtttctcagtgccagagcgacccactcgcccttctccaggcggtccgccaccacatagcccgccgccagcgcggcgtccagcacatcctgctcccgctcgcggatgatgccggagcagatcagcaggccgccctttgcaagatggcgggtgagcggcgcagccagcatgcggatggcgtcggccacaatgttggccacggccaggtcgcagggcatggcctcgcttttgcacagatcgccctccacggcgcgcacgcggtcctccacatggttcaggacgatattttcacgcgccaccttgaccgccgcagggtcgatgtcgatggccagcacctctctggcgcccaggcgcgccgccgcaatggccaggatgccgctgccggtgcctacatccatcacgcgcatatcgctcttgaggtgcttttccaacagctgcatgcacatgttggtcgtctcgtgcgtgccggtgccgaatgccatgccggggtccagttcaatgatcagatcctccgggctgggctggtacgcctcccaggtgggcttgaccaccagatgcgtgccgatacggaacggcttataatactttttccagttttcagaccagtcttcatccttgacgccgctcagctccaggcgcagggtgcccaggtcggcgcctccctgcgcgcgcagctgctccagatgagcgcgcacggcctcaatcgtttcccgttccttttcgccgcgttcaaaccacgccttcaccaaaacgtcatcgggcatggcgtcgatcatggcagggtcgtacagctcccagtatacgcccggctgacgggggtcgggcacatccgcgcggtccacgatttcagttcccgccgcgcccagtgccatcatttcatcgctgaccaggtcgctcccaaaggtggtggtatggaccaccgcttccagccattccaagataaggcacctccgcatcttcttgggtccaaaagcgcccagggcgcctggcgccttgggcttttggatcagttgttgaatatttccttgattttgtcggcgaaggtcttgcgtccttcgtattccttgccgcccaggctctgctccagttggcggagcaggtccttctgccgctcgttcagcttacggggcacctccacatgcacggtaaggatgagatcgcccttgagcccgtttttcagcgaaggaatgccctgtcccttgatgcggaactgcgtacccgtctgcgtaccttcgggaatgcgctgcttcacgggcttttccagcgtggggacgtcgatctccgcgcccagggccgcctgggtgatgctgatgggcatatccaggagaatgttattgccgtcgcgcttgaacagccggtgcggcttgaccgttacggtaatgtacaggtctcccgcagggccgccacgcatgccgggctcgccctcgccgcgcttgaccaggctcacgccgtcctgaatgccggcggggatacgcagcttcaggctgcgtttgcgccgcacacgaccggtgccgccacaggtctgacaacggtccttgatgatcttgccctcgccgtgacaggtgggacaggtacggaccgtgaccatgaagccgccgcccgtgcgcacctggcccgagcctttacaggtggggcaggtctggggctgggtaccgggcttggcgcccgtaccgccgcacgcatcgcagttttcgttgcggaagaaatcgaccgacttttcgcagccgaaagccgcctcctcgaaggtgatggtgatgcggtgctgcaggtcattgccctggacaggaccggcccgccgcgcactgccgcccatgccgccaaagaaggtatcaaagatgctttcaaagccgcccatgccgccaaagccgctgaaatcaaacccacctgcgccgccgctgccgccgcccatctgcgggccgtcaaaaccgaactggtcgtagcgtttgcgcttttcggggtcgctgaggacctcattggcctcgttgagctccttgaagcgctcttcggcgtttttgtcgttggggtgcaggtcgggatggcattccttggctttcttgcggtacgcgcttttgatttcggcctcggaggcatccttgcttacgcccaacacctcataataatcgcgctttgccaaaaagctcacctacttactttcaaaacatgctgtatatacagaccgaatgccccggcgcgcgtgagggaggggtttcctcccccgcgccggggctgaccggggccatgcggtcccgaattacttcacttccgcgtcggcgtcgatggtgccgtcctcgttgacctgcgggcccgcaccagcgccgggctggccaccctcctgctgatagatcttgccgaagatctggtaaaccttctgcgtcatgctctccatcgcattcttgatggcttcggtgtcgccgccctcgcgcaccttcttgaactcgtcgatctcgtgctggacggtctccttatcggcgctgtcgagcttgtcgccgttttcacgaagctgcttttccatctcgtagatgagggtgtcggcacggttctgcacctcgacctcttccttgcgcttcttatcctgctcggcgtactgctcggcttccttcacgcgctggttgatctcctcctcggtcatgttggtggaagcggtgatggtgatcttctgctcgttgccggtgcccttgtccttggcgctgacgtttacgataccgttgcggtcgatgttgaaggtcacctcaatctgcggcacaccacgaggcgcagcgggaatgccggtcagctggaagcggcccagggtcttgttgtcgtacgccatgggacgctcgccctgcagcacatggatttccacagccgtctggccgtcagccgcggtggagaacacctgcgacttgctggtggggatggtggtgttgcgctcgatgagcttggtgaagatgtggccctcggtttcaaggcccaggctcaacggcgtcacgtccaggagcagtacgtccttgacttcgccgcccagcacgccggcctgaatggcagcgcccacagccacgcactcatcggggttgatgcccttgaagggctccttgttggtaatcttcttcactgctgcctgcacagccgggatacgggtggagccgcccaccaaaatgaccttatcaatctggtccggggtaaggttggcatccttgagcgccttgttcacggggccgatggtcttttccaccagatccgcggtcagttcgtcaaacttggcgcgggtcagcgtcatatccaggtgcttgggaccggtggcgtcgctggtgatgaagggcaggttgatgttggtggacatcacgccggacaggtcgatcttggccttctcggcagcttccttcaggcgctgataggccatcttgtcctgacgcaggtcaatgccgttttccttcttgaaggtgtcggccacgtagttgatgatgcgctcgtcgaagtcgtcgccgcccaggcgggtatcgccgttggtggccagcacttcaaacacgccgtcgccgatctccagcaggcttacgtcgaacgtgccgccgcccaggtcgtacaccagaatcttctggccaccttccttatccaggccataggccagagacgcggcggtaggctcgttgatgatacgcagcacttccaggcccgcgatgcggccggcatccttggtagcctggcgctggctgtcgctgaagtaagccggcacggtgataacagcctgagtgaccgtttcgcccagatagctctcggcgtccgccttcagcttctgcagaatcatggcgctgatttcctgcggggtgtattccttgccgtcgatggttaccttgtgcgaggtacccatctcacgcttgatggaaattacggtgcgctcggggttggtgatggcctgacgcttggcgatctggccaacgagacgctcgccgtccttggtaaaagcgaccacggaaggcgtggtgcgcgcaccctcagcgttggggataacagtaggttcgccgccctccatgacggccacacagctattggtagtacccaggtcgataccgatgatcttagacatatgctttatcctcctcaaaatgcttgcgcgcttgcgcaaatttggtagttgtccgttttggaaatctatgtaatgcggcggtgccgcttaccggggaaagaggccgttattcaggaacgaccttcaccattgcgtggcggagcaccgtgccctccatctggtagcccttgagcaggacctcgcagacggtaccgggctcgccgtcctccggcgcaccctgcatcaccgcgttttccagattgggatcgaacttctcaccctgtcggctgatgggggtgatgccgcgcttttcgaatgcctcacacatttgccgaagcaccatttccacgccgcttttcagcgaatcgccctcgccggcatttttgcccgcagcggtgatggcgcgctccagattgtcaatgaccggcaaaagcgtggtggcaaacgcccgcgccccgtcgtcaaaggcctccttgcggacattctggttgcggcgccggaagttttcaaagtccgcctgcacgcgctgggccatggccaggtattcttcctgcttggcgatggcggcagcgagcgcctcggccgcttcggcggcggcggtgtcctgcgccatttcctccttggcctgctcgtgagcctcgtcggcgtccatggcggtttctacggctgcttccatggtctcaacagcctcttccgcttcgctggcctgcggcttttgcgtaacgtcctgcatggtgtcccctctttgctttcttttcttctttgccatattgttttactccttgtcctgcctgagcaggtcggtgagctgcttgcccatggcgctgagcacgctgagcacccggccatactgcatgcgcgtgggaccgatgacgccaatggtgccatgggtgttgtcactcaagcggtaggtggccgtgaccagtgaacagtcttccagttccggaatgccggtttcgggaccgatacgcacggtgaaggccatctcgccatggttttccatcagcttgagcagcttatccttggtttccagcacgctgaggaagcagcgggccttttccacatccgaatactcgggaaagttgaggatgttgctggcgccgcccaaggtgagcttagccttgccgccctcgctgtccaccgcgtccagaaattccgccacaccgttgagcacctggcgctctgcctgcatgtcgcgctctgtttccttaatcagggccagcgcctcgctcagcgtatgaccgctgagccgctcggtcagcgtgcggctgacggcgtaaagcgcatcggaatccatctcacttcccacgcggatcacggaatcccgcatgatgccgccatcggtaacgatcaccaacagcgcgctctggctgctcaccggtaccaactgcagcgtacggatgcgaagctccgcacccttggggctcatcaccagcgatgtgtaatgcgtcaaccccgacagcacttgcgccgcacggctgatcacatcctccatctgctgcgcacggttggtaaagtaggcgcgcacatccgcggcatcaccggtgcggatggacccgtttttaagcaactggtccacatacagccgatacgccttggcgctgggaatgcgccccgcgctcacatgcggctggtccagataacccagttcctccagatcgctcatctcgttgcggatggtagccgagctcagacccatctcatattttttggagatggtgcggctgcccaccggaatggcggtcaggatatagtcatcgatgatcgcctgcagaatgcgaaacttacgtgcgtccatcgtcatcctttccacctccctgacggtatgtttcacgcttccgggttgttagcactcgttaaggtcgagtgctaacacatgcatatcatatgccagtggtccctgtttgtcaagtgcttttgaaattttcttgctcgaattcaacatttgttcataatcggctcaaccatggtataatgcgaggatggagaggaggcgcagcaccttgaaatcgagccgcctgtttcaaattgtttatgagctgatgagcggggaacgcatgactgcgccggagctggcgcgccggttggaggtttcggtacgcaccatctaccgcgacgtggaggccctgtgtcaggcgggcctacccatcgcaaccgggcaggggcagggcgggggcatccgtctgatggacggctatgtgctggatcgcgccctgatgagcgcgtccgaacaggagcgtctgatgctggcggtcaaggcgctggccagcgccacaggcagcagcggcgagctgttgcaaaagctgggcgcgctgttccatgctcccgccacggactggctgtcggtcgatctggatcgctggggccaaagcggaaagcaggatatgcgctttgatgtaatccgcagagccattttggaaaagagggttctggcctttcactatgcggggacaaatggcctgcgaacccggaaagttcagccggggcggctgtgcttcaagtcctcggcctggtatctgcaggcaatatgcctggaacgccaggagtggcgcaccttcaagctcacccgcatgagcagcctgcacctgacgggggagtgcttcccggaaaccctcgtccctccaccgatcgaacccgcctccgacggacccaccgagtgcgaagtgacgctgcgctttccggcggatgcggcctttcgcgtatatgacgaattttccggcgaatcgatccgcatcgggcaggacggctccttcaccgtgaccgcgcgtatgccgctgggagacggctggctgtacggctatctgctgtctttcggcgggactgctgaggtgctatctccgctgcatgtgcgcagggggcttgcgcagtttgcccggatggcgtgccagcgctatgaaaaagatgtgccggaagtatcaaacctgacggaggatgtcaggtttgatgtgttaccctgttcctgtcccccggaggaacaacaggatggacaggaggcttgtattatattggaacagaaattttgtcaaagctgcggcatgcccctcaccggcgctccgcaggagctgggcaccgagaaggacggctcgcccaatcccgactactgcacctactgctatcaaaacggagcctttacccgagactgcaccatgcaggagatgatcgatttctgcacgcccatcatggcccaaaaccacccgggcatgacccagtcggacgcggctgcgcggatgcggagcttctttccccagctgaagcgttggaagagagaagtctgagcgaaacggaggctgcaaaaaaactttttgggaggttcggaggggcgcagccctctgatctgcattccgaacccagcgacatgtgcggtaggttcggaagccttgcgcagcaaggttcaggctgctgacaaagtgtggggtgcagggggatcatcggttgctcaatcattcgcgcttccctgacggttgcgttcatggtttgctgcctcgctacgggctgctttgcgcttcgcgcaacagcccgtagggctggcgcctgccttcacgtcctgtcgggagttgcggcaacgctccttatatcacaacacctttcgccagcgccatgagcgcccgaagggcgcaaaaaccatattcttcacaagagcggggattcccggccggacaagcgggcgtttctcatctgccgcaagccacaataataaagaaagaaacagtgccccttgtttgtcaatgttctgtccagaggaagttgcttcctctcgaaacgtcagatgattgcgccacacggcgtctcgcaagggcactccaccctattttcccacgcagaaacgcgaaaaaatatcgtccagcagcttttcgtccacgctgtcgccggtgatgcgtcccagcagatagagcgcttcgtgcagatccacggccgccaggtcgatcaacccgcccgaagccagacccgcccgcgcgtcgcgcagcttgtccagcacctgccgcgccacggccatgtggcgctcatgggtgagggccagctcatcagggttgcgaaggaagccgcgcaggtactcacgcaccgcgtccagtccctcgccctcgcgcgcggacacgcgcaaaatgggccgcttgtccgtaagccgctccgcctgcgaagcggtgaagcgctcgcccgcgtcctccttgttgagcagcacggcgcagggacagggcgcctccatgcgcaagaggtccagcgcctcatcgtccgggtcctgcgaggcatccaccaccagcagcgcaacatccgcccggccgagcgccgcccgggcgcgctccacaccgatgcgctccaccgcatcgccgctgtcgcgaagacccgcggtgtcctgaagcagcacgttcgtgccgtccagcataaaggccccctccagcacgtctcgcgtggtgccgggtatgtcggtcacgatggcccggtcttcgcccagaagggcattgaacagggtgctcttgcccgcgttgggccgcccgcacagcgccacgcgcaatccctcgcgcacgatgcgcgcgccccgctcgtcaatcgccccatccagccgcgcaatcagcttgtccagcccctcgcacaggccggagagcgcctcgtcctcgccgatttcatcaggatagtcgatgtgtgcctccagcccggaaagcagcgcggtcaagtcctcctgggccctgcggataaaacggctctgcccgccctccagctggcgttcccccgcccgcagcgccgccgccgaccgcgcagagatcacgcccatcaccgcttctgcctgcatcaggtcgatgcggccgttcataaacgcgcggcgcgtaaactcgcccgcctcggccggacgcgcgcccagccgcaccagccgccgcatcaccagcgaggccgccgccgcgcctccgtgggtgtggatttcgcacacgtcctcgcgcgtgtaggaccggggcgcatacatgaccacgcccatggcctcatcaatggggccggtttcgtccaccgcgtgccccaccatcagccggtggctttcgtagggcggcttggcccccttcggccgaaacgcctcttcaaacaggcgcaccgcctccggcccgctcacgcgtacgatggccacgccgccctcgcctgccgccgtggccacgcctacgatggtgtcctccatactctgttcaccctttcccggccctgaaaaaacgaaccggcaaaatcacgggcgggctttgcgcgccgcctgcgtttatgatatcatgttcacgcggccttttccagccgaaagggcaaaaaccgcaaaggaggggcgcttttcccatgttcgttaccattctgaccgcgcgcgctcatcggctgttcgcccccgtggtggaggctctgggccaatgcgccaggaagggcgaggatgtgcttttgctggtcccggagcaattcactttagccgccgagcgcggggtaatggaacgcctttcgctcaccggcatgtttttgattgatgtgatgagcccctcccggctgtctgagcaggtgctggccgccgccgggcgggacgggcgcgagccgctggatgccgcaggccgccgcatggcgctgagtcaggcgctggagcgtctggaggataaactcccctactacggcagcatcgcccagcgccggggctttgtggaaaagctggatgcgctgatcacggatatgaagcgcggcgggctggacccggacaggctgaaggattatgcggatactcttccggcgggatcgtcgcgcgacaagctgaccgacctggccaaggtctatgcccagtaccgcgaggtgctccgcgggcgcttcagcgatagcgaggaccaacttgcctacgtggcaggccggcttgcggacagcggctttttacgggataaacacctgtttgtctacggcttcgacaccctgcccgagcagctgatgcggctgctgagcgccgctgcgccgctgtgcaaaagcctcaccatcgcactgatctgcgacgctaaaaccgcgccggacggcgaactctacgcccccgtgcggcaggggatcgcccggtttcagaagatgcttttcctgagcggcgaaagcgcgaagctgcacgccttgccgccgcagctgccagaccgtccggaggcgatcgcctatctggaccgggcgctgtttgcccatcctgcacccgcctttgcaggcaggccggagggcgtgtatctgtccgacggcctctcgccctacgaggaagcagcgttgatgacccgcgaggtgcgctggctgctggcccagggcgtggacccggagcgcgtggccgtgttctatcccgacgggggtggctacgcctttgccgtgaccgccgccctggaggacagcggcattcccttctacaccgaccagcagctttccgccgcctcgcacgggctggcgcagttctggctggcggccctgcgcgccatggcgggcggctggcgcaaccgcgacatgctctgcctgatcaaaagcggctatgcgcccctgacgtttaaggaagggtgcgagctggaaaactacgcctactgctacggcgtggaccgtgcgcgctggacgcgtcccttcacccgtggcccggaggccacgcgcgcggaggcgctgcgcgtgcggctgatggaaccgcttctgcgggcacgggccgcactggtcgctgcgcgcgatgccacggcctcgctgactgcggcctttgggctcttgcaggacgtacacgcctatgacgcgctgaaacgcgaggaagagcgcctgctggaaagcggatttatgacccgcgcgagccagaacagccaggtatggcaggccgtgctgcggctgatagaccagctggtcaagctcagcggcggcgcacgtatcccccttaagcacatcgcctcgcggctggaatgcgggctttccgccatttcgctcaagtcgctgccgcccgccgcgggcatggtgcacgcaggcgccctgggccaccttctggccgaggaggcggacgcggtgtttctgctgggtatgaacgatggcctgctttcccgcgtcaccgacagcctgctcaccccggaggaacgagcgcagacgcagaaggacacccggacttttctgggcctgacggacgaaagccgcgccctcatggcccgcctggatgtaaagcgcgccatgacgctgcccaggcgctggctttttctaagctcagccaaaaccgcgcctgacggcacggccctgcggccgctttcactgctgggacagctgcgtgaccggctgatgccggggctcgcccgtacgcctgtcccggaggatgacctgcccctgtcctccgcgcaggcgctgggagcgctgggcgtgttgctgcgcgcccatgccgacggcgcggttcccctggcgccccgctggcgcgagcgcatggacaagctgctctcttccccggataccgcgcccgccgccatgcggctattgcgcgcgctgggcttcgacggacaggcccagccccttgcgcccggcacggcccgtgccctttatggcgatgagaccctgtccgtgagccggctggagcagtttgcggattgcccgttcaagcatttcgtcacctacggcctgcgcccccaggtgctgcgggaatggaaggtggaccccattgaaacgggcaccttctatcatgcggcgctcaatggctttgcgcggcttgtccggcgagaggcggcctatcccaacctgcccgacgaggccgtgtcacgcctggcggacgaggccgtggagcctcttgtggaggaggcgctcgcgggccccatgggcgacggcgaccgcagcctggcccgctttgaggcggcgcgcggcgctatccggcgtgcggcggtggccatcacccggcagctggcggcggggcgcttttccctcttccgcacggaggccgccttcggctatgaaggcggcatgccccccatcgtgctgcttttaagtgatggccgccaggtggccctccgtggccggatcgaccggatcgaccgctacgactcgcccgatggcgtgtatctgcgcgtaatcgactataaatctgcccggcagagcctggaggcggcgcgcgcctggtgggggctgcaattgcagcttttgctgtatctggatgtatgcaccagtgccattcccggcggcaaacccgccggtgcgttctacttctacgtggccgacccgctggtagaaagcgccagcgatgccgccgaaatcgtggagggcaagctgcgtgaggtctttcagctgcgtggcgtcgcattgagcgacgtggagattctctccgctatggacggcggggatgtcccctgggtgctgccgcccatgtacctcaaaagcggcgagctgaaaaaaacagcccgcgcgctggacatgccccagctcaccgccctgctttcccatgcgcgcgaggtggccgtggccttggcggaccggctcttcgggggggagacagccatctcccccgctcgtgacccggaccgctgcgcctgtgaccgatgcgattttcgcgccgtgtgccgttttgatcccacatcgcccgacgcgcctttccgcgatctgccggaaatgggcatggaggagctccggcaggctctttcgtctgcgccggaagaaaaacaatgaggggcgttgctattctcctccggttcatgtataatgggggtgtaagcacggcggcgcgcggcgccgcccggagataacaaaacagtgtaaggaggcgttaccattgattcaggtgattgccggcaaaaaaggctcgggtaaaaccaagcgcatcatcgacatggccaaccaggctagccaggaaagcaagcacgacatcgttttcatcgacgatgacaatcgctatatgtttgaccttcgtcacgaggtgcgctttatcaacgccagcgaatacgagctgctcagcgaccatatgttcatgggctttctctgcggcgtcgtagcgcagaacttcgacgtggggctcatcttcatcgacgcgttcaaaaagctgattcacaatgagctggccaccagcgaatgggtgttcaagcgtctggagaccatcagcagcaaccacaatgtggatttcgtgatctccgtcagcgccggtcccgaagagctgccggactttatcaagccctacgtgatctgaaccttcgcatgatgagggggacggctggaaaggccgtcccctttttcgttcatttccggctttacacgcgccccaaaaccgtgtatgatggaaccacttccaatcatgaagcatccgaaacctgtctggagggtgatcacatgtcctttttttccacgcgtggcggcgcttgtgtaaccgcgtctcaatccatcctgtggggcctggctgcggacggcggcctgtatgtacccagtctgtttccccagatttccagcgagcggctggccgccctgtgcggacagagctaccgtcagcgcgccgcacgaatcctgcgcgattttctggaggactactccatcgctgaaatcgagcagtcggtagacgcagcctacgctgccgatgcgtgggatcaccccgatgtggctccggtgcgcacgctcatcgaaggcgttcatgtgctggaactgtttcatggccccacgctggctttcaaggacatcgcgctcaaact

SEQ ID NO: 3970 - DNA, 7815 bp, Unknown
  16S sequences of unknown bacteria
tcaaggaccgcctggagcggatgctgggccctgaggcggcggatatctgggccatgacattccacgccgcctgctgccgcatcctgcggcggtacatcgaccacctgggctatgaccctcgcttcacgatctacgataccgccgattctgagcgcgtcatcaaggatatcctgcgggagcgctccctggatgaaaaatccttcccgccgcggctgatcctatccctcatcagcaaggcaaaggacaagctgcagcagccggacgaatttgccgcccaggccgccgcagcaggggactaccgtctggaaaagatcgccgaggtctacgcggcctatgcccagcgctgcaaggcagccagcgccgtggattttgacgatatcatcctgctgacggtccagctgctgcagcagtaccaggacgtgcgggactattatcaggagaaattccgctatgtcatgatcgacgaataccaggatacgaaccacctgcaatatctcctggcctcccttctgacggggcggcggcagaatatctgcgtcgtcggcgacgatgaccagagcatttaccgcttccgcggcgcgacgatcgaaaatatcctgaattttgagcagcaattccccaatacctgcctcatccgcttggagcagaattaccgctcgacccagtccatcttgaacgcggccaacgccgtcatcgctaacaaccaaggccgcaagggcaaaaacctctggacgaaaaacgatcacggcgtccccgtgacactctatagcgcctacgacgccagcgacgaggccaattacattgccgccaagatcctagccggcagcatgcagcactcctataaggattacgccattctctaccgcacgaacgcccagtccaacgcgctggaatatgccatgaagcggcagggcatcccgtaccgcgtcatcggcggcacccgcttcgaggtcaaggacatgctggcctatctctgcgtcatcaacaaccgggcggacgacttgcgcctggcccggattatcaacaatcccccccggggcatcggcgcaaagacgctggaaatggccagccgcctggcgtccagcagcggcgtaccgctctacggtgttgtctcgtcgccgggggaatacccggcgctggagcgcgcgacaggcaaactgcaggcgttctgccagatcatcgaggactgcgccgcgctgctggggacgattccgctgccggatttctacgacgaagtcatcgcccgcaccggctacgccgccatgctggagcagaaaaacgacgtcgagagccgcgcgcggctggataatatccgcgagctgaaatcctcgattgtaagctacctggaaaatacggacgagccatccctcaacggttttttggaggagattgccctctatacagacctggagcagctggacagcgacagcgacgccattgtgatgatgacgattcatgctgccaaggggctggaatttccccaggttttcctctccggcgcggaggaggggcttttccccggtatgcgcgccatcggcgagccggaggagatggaggaggagcggcggctgtgctatgtcgccatgacccgggccaaggaatcgctgaccatcacctacgccaagcagcggatgctctatggccgcacgaccgtcaaccaccgctctcgctttgtcgatgaaattcccaaggaatgcgtcaccggcgggggggaccgccgcccgcagcgccgggaggccgccccggcccccagaaagccccgcccgcggcatgacacgctcctatctgccaagccccaggccgctgccagctaccaggccggggatatggtcctgcacgacgccttcggcgagggcatggtcatctctgtcgccaaaatgggcaatgacgccatgctggagatcgcctttgaccgggtcgggacgaaaaagctgatggccaattacgccagccagcatatgcacaagcaggcataacgcgccccgccgtggcatagccttgcccgagggggtgaggggatgcgaagacggcggcgcgcccggcgctatcttgcgctgcttgcagcgctcgcgctcctggtggcgctgttttaccgcttccgcctgacgccgctcatcaaggagttggctgtcacggaggtggagaaccaagcgtcggacgtcatttcggacgccgtcggcgcgcagatcgcggacggcagcattgattataacaaaatcattaccctggaaaagaatgcagacgggcaaatcaccgccctcaagacgaatatggcccaggtgaaccagctgcggcgggagattttggcccaggtgaaccaacgcatcctggacctcgatgtctacgccctggccgtgccgttgggcagcgtcattgcccccgggctgctgtcgggccttggtccgcggctgccgatccacgtgacgtcggtcaacaacgccagcgcggatttcaccagcagcttttctgaagctggaataaaccagacgctgcaccaaattttaatggaagtcagcatggatgtcacgattctcgtcgccgggggcacgaaaaaagcgacgatttctcagaccgtcgtcgtcgcggagacggtgatcgtcgggatcgtcccggagtcgtttttgaatgtcggaacctaagggagagaaagtatggacccaaaagaagagatcgccgctctgacgcaagagctggagcaagccaattatcaatactatgtgctggatcagcccagcatggaggattttgaatatgaccggaagctgcgccgcctggaggagctggagcaggcgtggcccgcgtatgctgcggccagctcgccgacgaagcgcgtcggcgggatggcgctgcagcaatttgaaaaggtgacccacgccacgccgctggagagcctgcaggacgtcttctccgaagatgagcttgcagaatttgacgagcgcctccgcaccgggcagattgcccccgggtataccgtcgagccgaaaatcgacgggctgtctgtcgcgctggagtatcgtgacggcgtcttctaccggggcgcgacccggggcgacgggctggtcggcgaggatgtcacagagaatttgaagacaatccgttccatcccgctgcgcctgccggaggcgctgccgcggctcatcgtccggggcgaggtgtatatgcccaaggccgtctttgccaagctcaacgtcagcagggaagagcaggggctgtcgtcctttgccaacccccgcaacgccgccgccggttcgctgcggcagctggattctaagatcgccgcccagcgacagctggatatcctgatttttaacctgcagctggccgagggccgcagttttgcgacccatcaccagacgctggagtacctccgcagccagcacttcaaggtcattccgtacaccgtctgcaccgaaatgccggagatctgggcccaggtgcagcaaatccacgccacacgcctggcgcggccctatgatatcgacggtgccgtcatcaagctggaccgcctggccgaccgggacgccctgggcagcacggccaaattcccgcgctgggccgtcgcgtataaatatccgccggagatccgggagacggtcgtgcgggatatcgtcatccaggtgggcaggacaggcgtgctgacgccgaaggccgttgtcgccccggttcgccttgccggaacgacggtcacaaatgcgacactacataaccaggatttcatcgccgaaaaggatatccgcatcggcgataccgttgaaatccgcaaggcaggggagatcatcccggaaatcctgcgggtgaaacgggaaaagcgccccgccggagccgtgccctatgcgatcccgctgctgtgcccggtctgcgccgcgccggtgcagcgggatgcggacggcgttgccatgcgctgcacgaacgtctcctgcccggcgcagctggcccgctacgtcgcccatttcgtctcccgggatgccatgggcatcgacggtctgggtaccgccatcaccgaacaattgatcgccagcggcctgatccattcgcccgccgatctgtataccctgaccctggcggagatcgccgggctctggaaaaaaggggagagggccccgcaaaagctgctggattccatcgccgccagcaagaaaaacgacctttcccggctgctgttcgccctgggaatccgccaggtcggcgcaaaggcggccaaagtactgagtatgcacttcggaaccttggacgccgtctttgccgccgatgacgagacgctgaccgagattcccgacgtcggcgccatcaccgcggccaatatccgcgcctggtacgcacgcccgaccaatcagcagatgattgagcagttgcgccaggcgggggtcaattttgaaaatcagacgaagcttgtggaccagtccttcgccgggatgaccttcgtcctgaccggcacgctggagaccatgacccgcgatgaagccggccaaaagatcgagctgcggggcggcaaggtctccggctccgtctcaaaaaagaccagctacgtcgtcgccggcgaaagcgccggctccaagctgcgcaaagcccagcagcttgagattccggtcttgacagaagcagaattccttgcgatgcttgggtgaacgagcttgctatgagtttggaatagagattgcggccgcgttgtagagatagaaaaatgcggcgaataataaaatggcaaatgataattccggctttacaaaagcggcaaaggcgaaaaaagatgaattttacacgcaactaaccgatattgaaaaagaaatgcggcattaccgagcgtttttcaaaggtgaaactgttttttgtaattgcgatgacccgtttgaaagcaatttttttaagtactttgcgatgaattttagccctttagggttgaaaaagctgattgcaacttgctatgcgacatcgcctgttattggcgaagagtttatttatcatacagacccgaacaggcaaaattcatttgttccaaatgaattttctgtgccgctacaagagacgtccactggtaggggaacggtcgcttaacgcgggactgttgccttgtatggcaagcgaaagtgcaacaaaataaaaattttgttgcactttcgcataaattatgctatcatataatgatagagtccaagtacggtgcctgggctgggccgatgggcggcttttggggctgcgtttgatggttccggggctggtgtgggccgtatgcgggtttgaatttttctagttataatcttttcattcgttttcatctttccatgacgaggtgctatgatgctatatgatcgggattgcccgacggttttgcgggagtttctctcttatcacgaaaatatcaaaggccagtcgccgaagacggtcagtgaatattatttggatctgcggatgttcctgcgcttctgcaagctggtcaagcacgaaatgccctatgatacggacctggagacgatcccgatccgggatgtggatctggactttatcaaaacgatcacgctgcaaaatatttacgactttttgtcgtttctggccaacgaccgggtcaagaatccggactctgcgtatgccgagaccggcatcggcgcatcggctcgggccagaaagctctcggcgatcaaatcgttttacaaatatctgaccgtccggacaaagcagctttctgtaaacccagtgcaggacttggagtttcctaaactgcgcaagtcgctgccgaagtacctgaccctggagcagtccaaagcgctgctcagcgccgttgccggacggaatcaggcgcgagattacgcgattttgatgattttcctaacctgtggcatccggcgcagcgaattggtcaacctcaaccgcgccgatgtctacccggaccggctgcgggtcatcggcaagggcaacaaggagcgctttgtctacctcagccaggcctgcaaggacgccatcgacgcgtacctgccaaagcgtgagcagatcgttctcacggacaatcgggcgctgtttggctcccaggagaaaaaccgcatcagcgttgcgacagtgcaccacctcgtcaaaaagcagctggccgccgccgggctcgacagcagccaatactccgcccacaagctgcgccacacggcggcgacgatgatgctctccggcggtgtggacatcaagacggtgcaggacgtcctcgggcacgagaacctgaacacgacgcagatctacacccacattgaaaacaccgagctgaagatcgccgccgaggcaaacccgatttcccatattttcgaagaaaaataggccaaaatacgctacttccctactgaaatctaacaaaaccgcccattttccgcgcgcttatgcagaaaatgggcggttttcagactaaaaagcctcgcagagtttgcgccgcgcacggcgcaaataaagtctaaatcattttttccggcggcaagtgggtgagactccaaacgcgcaagcattgcgcgtttggctaataagcgagagtcaaaatcttcgattttgctcctcgagcttatacagcgtagtcgaacccatgcaccgcatagtcgggaaaaataattatcgccctgcaagtcgaacccatgcagcgctgtggaatttctgcgctttcagcgcagaaattatgcgcgcagcagggtgcatgccccttcaaatgcgagcccagcgaagcggtaagcgagagtcaaaattttaattttgctcctcgagcttatacagcgtagtcgcatttgagagcggcgctatagcgccgcttcgatggcttcgcggatgtttctggcgcggaggacctgcatcccgtcggggatcaccaggtcttttgtcccctgccgtgggatgatgcagcgggcgaagcccagccggtgcagctcatgcagccgttggttcagatggttcaccgcccgcagctccccggtcaggccgacctcgccgatggccgccaggtccgcctgcaccggcgtatcccgatagctggaggccagcgccaggacgacgggcaggtcggcggcgggctcgtccagcttcagcccgccgatgacattgaggtatgcgtcaaacatccccagcttcagcccgccccgcttttccagcacggccatcagcagcgccgcccggttgaagtcaaagccgttcgtcgtccgccggggaacattgaagctggttttcgtgacgagggcctggacctcggcgagaatcggccgtgtcccctccatggcacaggcgacgcaggtccccggcgcgcccgccgggcggcctgccaacaggacctccgacgggttcggaatttctttcagacccgtatcgaccatttcgaaaacgccgatctcgttggtggaaccaaagcggtttttctccgcccgtagcaggcggtagtgggtattcgggtcgccctcaaaatacaggacgcagtcgaccatatgctccagaaccttcggcccggcaatcgcgccttccttattgacatggccgacgataaaaaccgtcagccccgtcgtcttgcacagctgcagcagccgcatcgtgcagtccttgacttgagatacactgccggatgtagcggtgttgctctcggcgtaaagggtctgaatcgagtcgacgatcagtagatctggtttatattcctcggtgcaggcgacaatctgatcaatcgacgtctcggacaggacgagcagccggtctgtgtggacctggaggcggtcggcccgcagcttgagctgctgctcactctcctcaccggagcagtagagaacctgacgctgccggcaaagctcgctgcagatttgcagcagcagagttgac

SEQ ID NO: 3971 - DNA, 32759 bp, Unknown
  16S sequences of unknown bacteria
cagaacacccataaagttaaagggtggtctgtaccactaaaaaagttaaagagccagaaaaacaagagagatgttcaaaagcgaacatctctttttctcttttttagttgtctgcgttattatcaggctttttcgctacattttctatcgtgtcaacaactacagcattaagctgtgcagcgttctgtgatgtaacaaccggatacccggtatcattttcaatatcttgtcgtacctgaccggcatagctgccaccgcggcgggcaatcttctgactttctgaaaaaccctctggctgatgtgcttttgacaactctgttgttgtcgcttctgctaacatattcagtacaatttctatcgtgctcatgttatcacgaagattttcctttttcaggcctttcagctttttatattgtcgggtagtcataccagaccacgcttttgtgatttcatcggtgaggatagcgtattctttgtcctgctgtacgccgcgctcctgcctttcagcggtaagctcattacggacacgtatggaaaggagttgctggtgaatccagtctgtgtcatatccttttttatgataagtttctaatgcacggtcaattgcctgttccgggtcaatggtttcttcaatgcgttcacgtccgacctgtgccaaccaacgtttaaaaggctctgcctttggagaaggaattgactggataattctcaacaatcattcagtatttgctgcttgaatttttcgcattttatcatctgcggcaggcatttgaaccagggtacaaattgtaccccagttggcagacagttcaggatcacgagcacgcattttctttatgtactgtttcggatcagaactttttgccaaaactgcaatcacatcctgaacggaaaaataccattcttcctgttcttcatcccatgcagtgcgtatttttctatcttcgaaaagctgaatggaattatttctatccatgtgtttcaacctccttggaacatatattttaattttaacattaaagagcttttatttctataagggaagcaaatttcattataacaggcattgtgaaaatatgtgcaaactgctggtgctgcgaggctgtgggaaagctgtttcaccaaaacttttgaaaaatgcaaaactacctgccgttctttttccgtacaaatttgacgatggtataaatctacaaaaaacatataaaaaaattgtgaaaatcaacaataaattgttgacaaagttcattttaaatgcaataattagatatacttaattttgaggtgtattatgaaccaggttattaaagacagtatgatgacaaaagaatatttcttttttagctaccagggcctttactttagcgctggtaatttgtgctgctgtaaacaatcgtgatataatgcatcagctatatcaacagatatttacggtatttgcacagcggcaggtaccgtttttttaatctttaaatgagtattgcggaggaaaaaatgaagagcatatatgaacagaaacaggacatcgacagacaaatcgaggatttatacagacagagaaacgagcttgacaggaagctttcagcaaaggctttggcagagaaaacagacgagcttagagagataatcagaaaagcttccgaaaacgcggagcaggtattcccgcagcacgccagtgtagcgtgtcagggcgtagagggtgcctattcgcagatagctgcggagaggttattcaaatatccgggaataatgtacttctccaacttcgagggagtattcagatccatagaaaaaggactttgtgattatggtatactgcctgtcgaaaacagcacggccggttctgtaaacagaatatatgacctgatgaaagcacataaattctatatcgtaaaaagtgtcagaataaagatagaccataatctggtggcaaaggcaggcacagatatgtcggatataaaggagatattctctcacgaacaggcggttgcacagtgcagtgaatttcttgatcagctaaagggagtcaaggttaccgtatgcagcaacactgcggctgctgccaaaatggtggcagagtccgagagaaaagacatagctgcaatatcatcatcaaaatgcgcagctctttacggactaaaggagcttgaaacagcgatacagaacgtggaaaacaactatacaagatttatatgtataagcaaatatccggagatatatccgggagcagacagaacaagtatatcggcaatactgcctcatacaccgggaagcctgtgccacatacttaatatattatcagatgcaggctacaaccttgtaaagctggagagcagaccgatacccgataaggaattcgaattcagattctatttcgacttcgaaatgtcggtatatgcaaaagatttcatggagatactcgaagagcttgaaaaggcctgtgatgtatttgaatatctgggcagctattcggaaacagtgtaaacagagttaaagacagattgattacggaggaataaaatgataactgtattaaaagcggaaacaaccaaaaaacagcgcgataaacttatagagtggtttgagtcacagggactcaaagtacatatttcagagggagaattccagacagtactgggacttgtgggagatacatcaaaaatagacgaggagcttgttgagtcgcttgagatggtcgaaagtgtcaagagaataagcgagcctttcaagagcgccaaccgtaaatttcatccggaagactcggtgatagatatttcgggagttaaaatcggcggcggcaatttcgcaatcatagcaggcccctgctctgtagagtcagagacgcagatccttgaagtggcgcgcagcatcaaggcatcgggagcatcacttctgagaggcggagcattcaagccgagaacatcgccttatgattttcagggaatgaaagcagaaggaatagaactgcttttagaggccaaaaaagatacaggaatgcctatagtcacagaaataatgaacgaaaaacatctgcctctgtttgaagaggttgatgtgatacaggtaggtgcccgcaacatgcagaacttcgagcttctcaaggcgctgggcaagaccggcaagcctgtacttttaaagagaggacttgccaatacattaaaagaattgctgatgagcgcagaatatataatgtcagagggcaatgaaaatgttatactatgtgagagaggtatcagaacctttgaaacctacaccagaaacacacttgacctttcggcagtgcctatgctgagaaagcttacacatcttccgattgtagttgacccaagccacgcaacaggcattgcgagtctggttgagcctatggcacttgccgcagcggcggcgggagcagacggccttatgattgaggttcacaacaaccctgcagaagcgctgtgcgacggtcctcagtcacttacgccggagcagtttgcatcagtagccgcaaaggtaagaaaagtaagagaggcgctgaaatgaagacacttggagttgtaggactgggccttatagggggttcctttgttaaggcatacagggaaacaaaggattggagagtcctcggaacagataaaaatgataaaataacgcagcttgcaataatggcagaggatatagaggcggagcttacgcataagaatctgcacgaatgtgatcttgtgctgattgcggtataccctgaagctgcaatagaataccttgaaaaaaacggagaatatataagtcccgatgcaatggttatagactgctgcggcgtcaagagggcggtatgcgacaaatgctttaaaatcgcagacagatacggatttacatatgtaggcggacaccctatggcaggcagacatttttcagggtataaatacagtacggaagagctctacagaggcgctccgatggtgattgtacccggcaggtttgatgacatcgagcttttaaacagagtcaaggagcttctggcgcctgcggagtttggcagcatatccgtaactacagccgaaaagcacgacaggcttattgcattcacatcacagatggctcacatcgtttcaaatgcatatatcaagagtcccaatgcaggataccacaagggattttcggcaggcagctacaaggatatgacaagagttgcatggctcaatgaggatatgtggaccgagctgtttatggacaaccgcgacaacctcatatatgagctggactgcttcatcggcaacctgcaggaatacagacaggctctttgcgatgaggattatgagctgatgcacagacttcttgaggacggaagaaaaaagaaagaagaaacagacggaaaatgagaaaagtaacagtaaatgcttcaaaaaaatatgacatccttataggcggcgggctgcttgagcaggcgggcgagcttataaaacaggcggcaggcggaagctgcgctgccataataaccgacagcaatgtggccccgctgtatatgcagcctctcagatcaagccttgaggcagcaggctacagagttgtaactcatatatttgaagcaggagaggcaaacaagaatatagatacatttgcggagatactgaatttcctcgcagcaaacaggctggacaaaacagatgttatcgcagctctcggaggtggagttacaggagatatggcaggtttcgcggcatctgtataccttagaggcatcagatttgtacagcttcctacgactgtacttgcggctgtggactcctctgtaggaggaaagacagcgattgatctgccggcgggtaagaaccttgcaggagccttttatcagccggagcttgtaatatgcgatacggatactttaaacactctgccggagagagaatacggcagcggctttgcggagataatcaaatacggtatcatagccgagccgaagctgcttgatatgatacagaccccggagcgggatatagatgagattatagagatttgcgttaaaatcaaaagagatatagttgaggccgatgaatttgaagcaggacagagacagcttcttaacttcggccatacgataggacacgccgtcgaaaaagcatctgactttaagctgctgcacggtgaggctgttgcagtgggtatggtcatgattgcaaaggcggcggtcagaaagggcatatgcacagaagagtgccttgatgatattgtcagtgcgtgtaagaaagagaagcttccggtttcggcagactacagctgcaaggagcttatggatatgatatgctcagataaaaaggtaagaggaaacactatcaacgtaatactgcctgagcataccggcaaatgcatcataaaaaatataactattgaggaaatgagcagtctgcttgatatggcgctgcaggactagagtatgaaagcaattattaaaaaaccggcaaaaacaggaacagtaagagccatagcatcaaaatctatggctcacagaatgatgataactcaggctctctcagaaacagacagcaccgttatatgcggcgatacatctgaggatatagaggcaaccaagagatgccttgaagctctcagctcagaagatgaggtgaagcagctttactgcggtgaaagcggctccaccttaagatttatgcttcccatagcggctgtgctggggcttgagtgtgattttcatatggagggcagacttccccaaaggcctttatcaccgctttatgaggaaatgatgacaaatggttgcagcatgtcagagcagggagaaaatccgctgcatttaagcggcaggctgtcaggcggcacatatacaataccaggcaatatttcgtcacagtacatcacaggacttctgtttgctcttccccttgcagaggaggacagcagaattaatataaccggcaggcttgagtcctcaccatatatagatttaaccctgcaggctcttgacgcggcaggcattaaggtcgtttcagatgataagggatttggcgtgccgggcgggcagaaatacaggctgacaggcgagcatcacatagagggcgactggtcaaatgcggcattctggctctgcatgagcgcaatgacagacggcagtatatgctgcagcggtcttgatatgaattcaagacagggcgaccgcaggatacttgatgttttagagagtatgggcgggaaggtcatttgcgagaacaatgcggtgcgcatatcggcacctgagggacttaaaggagcagttatagatgcttcggaaattcccgatcttgtcccggtcattgcggcaacggcggtatcggcaaagggtcagacagtaatagagaacgcaggcaggctcaggctcaaggaaagcgacaggctcaaatccgtaagtacagtgcttgcagagcttggagcagatattgcagagcttacagacggtcttgtcataaacggcagcggcagcatcagagggggcagtatagactcctttggcgatcacagaatagcaatgatggcggcgacagcagcctgcatcagcagcggagagataacaattttgggagcagaggctgtaaacaagtcatatcccggattttacagagattaccgcgcacttggcggcgagatagatatagattagtattgtgctgattttgaaaggagtttaaaggtggcttcagtatttggagagaacataaaaatatcggttttcggacagtcccattcaagagggataggcgtttgcatagacggcatacctgcgggcgaaaaaatagatttagagcagcttcaggaatttctggacaggagagcgccgggcagaaacgagtattcaacgccgagaaaagaagcggacaggcctgaaattctgtcagggcttgtaggtgacacaacctgcggagctccttttgcggcagttatatacaacaccgacacaagatcaggcgattacagcgatatgagggacataccaagacctgctcatgctgattttgctgcaagagccaaattccacggttatgaggatacggcgggcggcggtcatttcagcgccagacttacagcgcctttgtgtattgcgggaggcatattcaaacagcttctttcccgcagaggcatagagataggagcgcatatcagctgtataggcggaattgaggacaagagatttaattcctgttgcggcagtgaagagctcgaaagagtaggaaagaccttccccgttatagatgaagaggcaggagcaaaaatgagagagctgatacaaagtgttaaggctgagggggattctgtaggcggcatgattgaatgtatgataacaggagttccggcagggcttggcgatcctatgtttgacggtcttgaaaacagaatttcacaggccgtttttgcagttccggcagttaagggcatagagttcggctgcggatttgacgtatgctctatgagaggcttcgaaaacaatgatccgttctatgcagaggacggagtgataagaagcaggacaaacaatcacggcggcatactgggaggcatatcgtcgggaatgccggtggtgttttctgtggctatgaagcctacgccgtctattgcaaaggagcaggacagcgtcagtatgtcggggcttgagaatacgaagcttaaggttaagggcaggcacgatccgtgcatagtgccgagagctgtgccgtgcattgaagctactgcagccatagccatatatgacgcatttcttggaggactgaaatatgagattagatgattacagagcagaaatagatacaatagataaacagataataaagcttcttgagcagagattgcagatggtgaaaaatatagggctgtgcaaacaggcaatgggaaagcccgtacttgatgcttcaagagaaaacagcaagcttgaagcgcttagaggtcagactgatgaagactcctacagctatatagctgatgtttttaaggaaataatggcgcagagcaggagatttcaggaggagcacaaggcggattacggacttctgggcaggaccctgggacacagcttctctccgcagatacacaaaagcatcgggggctacagctacgagctgtttgaggtcgagcccgaaaatctcaagggcttttttgagaacacagctctcaaaggctttaatgtcacaataccctacaaaaaggaagcgctaaaatactgcagctctctgtcggatgcagcgcagaaaacaggcagtgtcaatacaatagtgagaaatcctgatggaaactttgcgggacacaatacggattattacggccttgagtatcttatcaggtcagcaggctttgatgtttcgggaaccaaggtgattatactgggaaacggcggagtttcaggcactgtgagacagcttatgaatgacagcggagcggctgaggtcgtaacgatatcaagaaagggcgaggacaattacgaaaatatttcaaggcattatgatgccgaatttattataaatactacgcctgtgggtatgtatccggataacggcagagcggtcatagatgtaacagagtttaaaaactgcaaaggccttgcagaccttatatacaatccgataaaaacaaggcttgttatggatgcagagaatgcagggatacccgcagagggcggactcaaaatgcttgtggcacaggccgcaggcgcatgcgagctgtttctcggcagtaaaatttcagacgagcagatagaggctgaatatatgagggttttgagaaaggttgaaaacataatccttatagggatgccgggctgcggcaaatcctcaataggagaaaggcttgcagagataacaggcaagagctttgcagacagcgatatcagaataatagagcagacagggagaagcgcagaggatataatatgctccgagggtgaggaatatttccgcaaggtggaaacaggcattgcaaaggcagagggcgctcatacaggccgcgtcatcgcaacaggcggaggagtcgtaaccagagacgaaaacctcgatctgctaaggcaaaacggcagaatagtatatatcaaaagaagccttgagaaattaagctcagacggaagacccatatctgcggcaaacaaaatagaggctttattcagcaagagaaaagccgcctatgaaagctggagcgactttgaggttgataatacgggaatagaagaaactgcgtcaaatatagcaaaaatgcttggatacgggaggtaatacagatgaaacttctggttataaacggacctaatctgaatatgctgggcataagagagcccgatatatacggtaaaaacacctatgaggagcttgtgcgcctcatagagaaaacctgtgagcaaaaaggcattgaggttgagatttaccagtcaaatactgagggctttatagttgataaaatccagcaggcctacggaaatacggacggtataataataaatcccgcagcttatacccataccagcattgccatacttgatgctctcaaagctacgggcatcagaaccgtagaggttcatctgtcggatataaacagccgggaggaatttcggaaacgttcctatgtttcccttgcggcagccaagactatatgcggcagaggttttgacggttatgtagaggcgattgactatttctgcggatagatttacaaattgaatagaaccggtttgtgtttgtaatttgaatacagatcggtttttttgtgcaataaaggtttgaatgatttgtggtctgaatcttgcaatatcacttctgccgccgctaatacataagctgatctctaaagatgcaatacaaagaagattactaaaaaacttatactttacaatgaatatactatcgtgtaaaatgcgaagtaacaaatcagatgaagcttggaaaaattagagttttgcattttgtttccaaagcaggcggatgcaatatgccgccggaagataggatgagaaaggagatgagaagatgatacgaagaagacaaattcttataatactgctgacgttatgtatgacgttcacaatgatgccgctcgtaggagctggggaggggtacgctgagagcggaaacaccgcgaacactgttgtaaccagaacgaccacgttggatctgacaagtacgaacggaaaatatatggcgacaaacggaaatgaaaagacagttgattttacaactgcttctgtaaacgatagtgcagaaggatgggaatgggatcatcaaaacaaggtcttaacgcttttcggcgcccggattactgttactgagcctgtaagaataaacaacgagtactatggtatatttctcccaaatgatacaattgagattgtgttaaaagaaggaacagaaagcttagtacaggtatgtgacgccacaggcgaagacatcggggggacagttttttcatctgctggagtaggaaacagggaaagctatgaaggacagcttacgatacgcggcagcggtaaactgattgcaaagggcggtgcgcttgataattcaaacaacctcaaacagggccagcggacaagcgccggcatttattgttttgcaaaggaactcgttataaaagaaaatgctgttatagaagcatatggaggtgagagtagaagctcctttcgctctgcacacagtgcgggtattataggtaacatggtgacaattgcagataacgcaaatattacagcacgcggcggggatgtttgtgcggcagaatcaagaaccagttacgggatgcggccatttaacagcctgtccattggcgataacgccgttgttagatgctacggaggaaacgtaacaaagcagggagatagtgctacggagtatagctacagcggaggaatccgcacgtcagagatttccctttcctcctatgctcgtgtatatgcatttggaggtaagtcaataaatcaggcagccaatagtgcaggaatatatctttaccatagtgatcttagtaaaccgctggttgcaagcgtgagatataattcattcctgcacgcagaaggaggcatatccgaggggagtaattttggaatagctgtaaatcgttataatgtagacgaaagtatcaatcggacactgacagtttccgggaatgcatatataaaagcgataggaagagaaagcagaaatgacgatatctgcaagtgtatgggtctcgacttcaagaatatatatatcaacggcggtactgttgtggccagtgcagaaacgacggccagcaaaggcagtattgaagcgatatccccggctccaacatatgcagagggtttaactccgactgtcacagcaggggactccgaagccgctgcggtatctgctagtgcgacaagtgcagaaacttataaaaaacgctgggtcaaaattcagacaagtgagcctgtgtatgccattgcagcgacaccttccgaactggatttcgggacagtaaaaacaggctacacgcagcctgctgcaaagacagtgaccttaaaaaacacaggaaatgaaactgtcagtgttacaggaatacagtcagcagagaacagcaactacattataacaggaaaccttcctgctgagattgggccgcgtgaaacagcagatttcactgtgcagccaaaggaagcccttgcagaaggaacctataacgaaacagtaacaattctggggagcaatgatacaaagtccgaattgcagcttaagttcagtgttataaaaaacagttcgggcggaggttacataccaccggttcagaaacctgacattcaggcaggagagggtgtaaaagttactctcagcgcagatggaaaaaccgcaacaataacaatagaagaagaatatgaactcgatgacgttgttcttaacgggaattccaaaggaaaggtaacagaaatcaaagatcttaggacaggagataagcttgttgttactgccaaaaagaaagacagcggagctgatgatgcagagcttgacaaaaaggttaaagaactcataagcgggcttgaatttaaggccagatcccaaaaactcaaaaatggtaatatcagagttaagttgcaggggcagtttgatgaaattaaagaactggaaaaactcggttatacggttaagtataaattttacaggagcactaaaaaatcatcaggatataaagcgaccgtaacaaaaaatgttcctttatatattaatacagcgggcagggacggtgtgatgtactactacaaagcgaacattatgatctatgacaaagatggagaactgattgcacagactgcaattaaacagtgtaaatatgcaaacagacgttggagtaaataatataataaacgaaggaataatttaaacaacactaccgccgggacaaagtatcgccttatggcggtactgttgtttaagatggctagaaagagtaattatatatacatctgctttaggaagcagtgacacagcattgtctggctgaatctgctgatgcaatcaaaacagaaacattcagaaccgtaaagtgaaaataattgatattgcttgaaattcagccaatgaacattgactgaagtttttaataattggtcaaggaaaagataattttagtcaaagcagtctgccgaaaaacagaacaattctgcctgatacggcagcctttatagatgttgcattttaatttaatgcagcatttttatgctgtattcaaacaacttatatttgaggtggcagacgaatagtaagtttagtttgccataatgattataagtggtatataatagtgtaaatacagaaagagagcaatcaacaagtgtaaaggcaagaacagccatagattgcaatattggacacataaaggattttgtacgaaaaaagaatagaaactggaaggaattaaaatggcagacatcaaaaaggaacaggaaagagcagaactgcatcgcacaatatggagcattgcagatgatctcagaggaagtgttgacggttgggactttaagcagtatgtacttggaatgcttttttacaggtacatttcagaaaactttgcctcatatataaacgatggtgaggcagaggcaggaaacgaaggatttgattatgcaaagctttctgatgaagatgcagaaggtgctagggaagagcttatatcaacgaaaggcttctttattaagcctagtcatttgttttggaatgtcaaagaaaaggccgcagatgatgaaaaccttaatatgactttagaagccgttttcaatggcatagaaaattcggcaaaaggtacatcatcagaaaatgacatggcgggactgtttgacgactttgatgtaaacagcaacaaactaggtgcaacagtagcgaaaagaaatgagaaacttgttaagcttattaacggcgttgcatctatgaatcttggaaatgttaaagatcatgatatagacgcttttggtgatgcgtatgaatatctgatgacgatgtatgcatctaatgcaggaaaatcaggtggagaatttttcacaccggcagatgtatcagagcttcttacaaggcttggtactgtcggcaaaacagaagtaaacaaggtgtatgaccctgcgtgcggatcaggttcacttcttctcaaggcagaaaaagtgcttggtaaagatgctgtcagaaacggcttctacggtcaggaaattaatatcactacatataacctgtgcagaatcaatatgtttcttcacgatatagaaccggataaattcgatattgcctgcgaagatacccttatatcaccgcagcattgggacgatgagccgtttgagcttatagtttcaaatcctccatattcaatcaaatgggcaggagatgacaacccgctgcttatcaatgatcccagattttctccggcaggagtactggcaccaaagagtaaggcagaccttgcctttataatgcattcgctgtcatggcttgcatctaacggaacagcagcaatagtatgttttccgggaattatgtatagaggcggagccgaaaagaagataagaaaatatctgattgacaacaactacattgattgtgtaattcagcttccaagtaatctgttctttggaacttctattgctacctgcattatgattttaaagaagaacaaagctgataacagaaccttattcatcgatgctacaaatgagtgtatcaaggttacaaacaacaataagcttacgcaggagaatatggacaaggttgtggatacatatgcgaagcgtgaagaaacagagcatttttcccatcttgctacttatgatgagatagaagaaaacgattataatttgtctgtatcaacttatgttggggctgaggataccagagagaagattgacatagtagagctaaatgcacagattaaggaaatagtaaaaaaagaagaagaactacgcaaagcaattgatgagataattgcagaaatagagggataaacaatgaggctttgtgatttattatcaaaaccgccacagcatgagtatcaacaagtagagggatttttggtaaataagaaatgtagaatagggcaacaaatagacttagatgtagggactattgggttgaattatttttgtaaagaatgtgataaccagagaaccttttcatctcaaggcaaaataagatgtatttgcgttgatcataacaaaataagtattgatagtgttttagcttgcagttgtggagaaaaaatagaagcatggtttttaattgagagcgaagaagagataaataaattaaatcccaaagtgaaaattataaaaagaagtgagcatttgaatgaaaatgtcgaaagtatatatcaaaagtatggagccttttcaaagcttttagaaaaagcagagcaagcttattggtgcggttttggagcaggagcgattgtatacttgcgaaagatatatgaaactgttctaatagaaattgcagatagagaaagtattgaatatggcaaacacgataatggtagcccgggtaatttttccaaattactaaaaatggttgatgaaaaatataaaatagtgccaacagaattcgaagataagagatatagattatttgaagaacttagcggcgtggtacatggtgcatataatgatgaagaggaaatgaaaaagtttgaacctttaaagagattggttataggtattttagataacgttcaaaacaaaagcgaattacaagaagccttagcgtgcttgggttgggacaatgaaaaggagtagatatgagcaaagtagagcaattgatacatacattatgcccaaatggagtggagtataaaaaattaaaagagattgctgagatgaaaagggggacttcattaacaaaagcaaaagctattgagggggattttcctgttatttcaggcggaagagaaccagctttttattgtaatacttttaatcgctctggtgaaacaataacggttgctggaagtggagcgggagctggatatgtgcaatactggactattgaactgtttgctaatgattgtttcacaattaaaggtagggaagtaattagtacaaaatacctatattattgtttagcaaatatgcaagagaaaatttatgatacaaagaagggaggtggcgttccgcatgtacacatatccgatattgaaaatttcaaattgccagtccccccacttgaaattcaagaagaaatcgtaaaaacgcttgacaaattcacaaattatgttactgagttacaggctgagttacaggctcgaaaacaacagtatgagtattatagagatgcgttgctttcagtggaaaaggagcaatgtaaggccagtaaactaaatgaaattgccgatatttatgatggcactcatcagactccggaatacaagggcgagggtataccatttattagtgtggagaatatagaaagtatttactctagtaataaatacattagcgaagaagcgttcaaaagatataagataaaacctcaagttaatgatttgttcatgacaagaataggaagtattggcaaatgtgcagttatgacaaaggagagagaacttgcatattatgtatctttggcattaataagaccaaatcaagatatagtagatacgaggtatcttaaacactatattgagagcacgttgggttcaaaagaacttgctaagagaacattacataatgcggttccaatcaaaattaataaagaagatatcggaaaaatcgtaataagatatccaagattagaaatacagcaaaagatagttagtgtactcgacaattttgatgccatttgctctgacttaaacattggtctgcctgctgaaattgaagcacgtcaaaaacaatatgaattttatcgtgatgcattgttgacatttgctgaaactggcacgataattgcacagacagacagacagacagacagacagacagacagacattaattagacttattcagtatgtatttggttgggtacagattgacctagctactgtgggcaaggtttcaatgtgtaaacgcataatgaaatctgagacgagtccaactggagatattcctttttacaaaatcggaacgttcggaaaagaagcagatgcatatatatcaaaacaaaaatatgacgagtatcgtaaagcatattcatatcctcaaaaaggagaaattcttatttcagcatcaggaacaattggtagaacagttgtctataatggagaagaggcgtactatcaagattctaatattgtttggatagctaatgatgaaagtctagtgttaaacagatatttattgtattattatcagcttcaaccttggaatatatctacgggaggaacaattgcaagactttataatgataatatcagtagggcgaagatatgtgtaccaactatcaaggaacagaaaagaattatagaaatccttgaccgctttgatttactttgtaatgatatttcggaaggtttgccggcagaaattgaagctcgtcagaagcaatatgagtattatcgtgataagttattgaattttaaagaattatctatatagtttagaaagggcaataaatggctaaagttagttcaagggttacatcaagtgtgcttatgcgcattgaccattctgaaaaaatacaaacaatgtataaggagggttttgtcgagtttggttgtccagctaattggttggattatgctatgaagtgcaaagatgaaactattggcgattattttgaatgtgtttttgcccatacacttaaatctgataagcgtatcaatgaaatgaaggatatacatggaaacccaatgggagaccatttactaatcctcgaaaacagtaactcatacgattgtttgttaagattcgttcctacgatacttattccaactatgtgtttttattcattttccgtcaaaagagatttagctataattaataaaggcgaaaatcagtataatgggtatatttttgatcttgataagtatcgggaatatataggctacgctgaagatgattctagttttctctttattacagacgtggaggctttttttaaagaattgattatatcaattccaaaggccatagaagataataaaaacaatctcaccagtaaacgatattatggtggatttaaggtggagaatcctctgttttttagggatgttgactataacaaacataaaaaatcagacttgttttttgataaccctaatgggtttgacagtattttttggaaactacccgaatatcaagaacagtcagaaatgaggcttattattccaaacataaattttttacaaacatataatccggatattccttatgatcataaaaggaacaaattagttgttcagactcctcagataagagaatatgcaaaaattgtgaaagctaaagaggctcactacctcttctttaaggataatgatgatttggagaggacatttgactttgggtttttggaattgatgaaagaaaatgtttcgggtaataatgatactttggtttaataaaaggaggggaaagcgtgccgtattttaatatagttgcacagacaaatgaaaatacagtagtaacagagtatgagcctgtcaaggtgaagtctgacagttatcagagtgaggctgctcttgagaaagactttataagaatgcttcaggaacaaggttatgagtatcttactattcatacagaagcagaccttgtagctaatcttcgtaataaacttgaagccttaaacaatgttgtttttacagacaatgaatggaatacctttttcaaggaatctattgccagtcagaatgacagaattgaggataaggcacgcaggattcaggaagatcatgtgcaggtacttaaaagagatgacgggacctccagaaatatcacccttatagacaaaagaaatattcacaataacagcttacaggtaataaatcagtatgaagtgtcacagtctgagggggcaaaacacgataacagatatgacgttacagtccttgtaaacggattgcctcttgttcatattgaacttaaaaggagaggcgttgctattaaagaagcgtttaatcagattaatcgctatcagcgagactcattctgggtaggttcaggactgtttgaatatgtgcagattttcgtaatatcaaacggaacaaataccaagtactattccaacagtaccagatggaatgctattaaagacgccaaggctgcgaaaggaaaaagaggcaaaaccagtaacagctttgaatttacatgttactgggcagatgcaaacaacagagttattcctgaccttgtggattttacaagaactttctttgcaaaacatacactgcttaatattctgaccaagtactgtatctttacctcagaagaaatgctcatggtaatgagaccatatcagattactgcaacagaaagaatcctgaatcgaatcgaaatagcacataattacaagaaatacggtacggttgcaggtggcggatatatatggcatacgacaggttcaggcaagacgcttacatcatttaagacagcaaggctggcatcaaacctttcatatattgacaaggttctctttgttgtagacagaaaagaccttgactatcagactatgaaagaatatgacagatttgaaaagggagctgccaacagcaatacttcgacagctgtactcaaaaaacagcttgaagatgataacgctcatataattattactactatacagaagcttgccacattcataaagaagaacaaaggtcatgaagtttatcagaagcatattgtaatcatatttgatgagtgtcatcgttcacagtttggtgatatgcatgctgcaattgtaaagaattttaaaaagtatcatatattcggatttacaggtacacctatttttgcagagaatgcaggagccgttcgtacaccgcagtttatgactacggagcagacctttggagatcagcttcatacatatacgattgttgacgctataaatgataaaaatgttcttccattcagggttgactacatcagcacaatgaaagaaaaagaaattccggatgaagcggtctgggatatagacagagaaaaagcaatgatggctcccaagagaatatctgccgtaacaaggtatattcttgagcactttgacagaaagacctacaggggagataagacatacgtgtttaatcagcttacaaatatatctgatgttgctgccggcaaaaacaaggttgaggaaataaaggcagcacagaggctcagtgggtttaattcaatatttgctgttgcatctgttgatatggccaagctttactatgatgagtttaaaaagcagatggctgatgatccgacacaaaagcttaaaatagcgactatctacagttatgccccgaatgaagaggaagcggcaggaggtatacttgatgaggagaactcagaagatacatcagcacttgaccagaattcaagagatttcttagaaagtgcaattaaagattataatattatgtttcatactaattatgatacatcaagcgacaaatttcagaactactacaaagatgtatctcttcgtatgaaaaacaaagagctggatatgctgattgtagttaatatgttccttaccggttttgatgcaaccacacttaatactttatgggtggacaagaatcttaagatgcatgggcttattcaggcattttcacgaacaaacagaattctcaacagtattaagacctatggtaatattgtatgtttcagaaacctgcaaaagcgtgttgacgatgctatagccttatttggtgataaggaagccggcggagtggtgctcctcaaaagctttaaggactattattacgggtatgagtctgctgaagggaaaaacatgctgggttatgttgacatggtagatgagcttagagatgaatttcctctggcagttccacagattattggtgaagataatcagaaaaagtttattaaactgtttggagcattccttaaaatgagaaacctgctcagcacttttgatgagtttgaaggaaacgagattttctcggagcgggatttgcaggattatcttggacgatatcaggacttgaaggatatatggagaccggaagataaagacagtactaatatcaatgatgatattgtatttgaaatagagcttatcaaacaggttgaaatcaatattgactacattctgatgctggtacagaaatatcatgacagtcatatgcaggacaaagaaatacttgttacaattaataaggctgttaatgcgagtccggaactcagaagcaagaaacagcttattgaaagttttataggaagtatagataacagcggtgatgttgttgctgagtggaatgaatttgttgagcatcagagagaagaggatcttgagataattatagcggaagaaaagcttaaaccggaggagaccagacgtttccttgagaaagcttttgaagatggtgaaatcagagaaaccggaacagatatagacagaattatgccccctgtttcgagatttggcgggagtggcaataacagggcagccaagaaacagactgtcgttgaaaaactgaaagggttctttgaaaaatactttggagtcggaactaaatttgaagcagcaccgactaaggtatatgattttggagagacagagctgctcaaagttgcggattctgttagtgaacttgttaaaaaataatagtaattgtaggagaatatatgagctataaaacaactgacgctttgatgaagcatttacgaaagagtggtatttcaataggtggttcaaaacagaaacgccaattgattaatacaggatattttcatggatataagggttatcgtttctttgggaatgcaagcaggaaattaccgtttacatcatatgatgaaatttacgctacaattcagtatgactcggagttgaaagcacttatgtatggtaagctgatgtttattgagaccgcggtaaagaatatagcattagaaagtatacttgtaaatgctaattcagaaactatacaggatatgtgtgacaaagttgtcagtgggtacaataatgcacctgtttcagcaactacagaccaaaagagaaaactgcaacaaaataagctgcatttacagaagtctattcagtcaagtctggcatacgcatacaagaaaaacaatcctaagataacacatttttataacaatatcggatattcagatgttccgatatgggctttatttgaaataatgacgatgggtgacttggggtatttactatcatgccttacatatgatgttcgagatgatatttcgaagcgtttatctataaataattcttatgatacaggtagacagttaatatataagtacatatatacattaaaggatttgagaaacgcgattgcgcataatggagtagtttttgacactagatttagaaatattgatcctacaccagctatgaagcaatgcttgatatttgaaattgggttaccatacgtaaattttaaaacaataggagactatattattcttatatgctactatatgaaactacttaaggtatcaaaacaagaaataaaagcatttgttagggactttgaaaggataaccgataattatataaaatcggtcaattctaaagttgctgcaatagtagttcatccgaatttgacatcgaggataaatattttaaaaaattttatatagaaacttgaattttttgttggttgatgtataatataaagtaataattggggtatgcgtttgcggatgcatacttgagagagtcggagtaatctggctcttttgtgttttatacaggttttaaaataagattttgaggggttaccatttacggtatattagtcgtaaagcccttatattaaagccctaggctattcactggttgcttgttcgtctgataatatttctttatatcataagaatattttcaagagtggcgaattagataaaaattcagttaccgggaaatactcggcaactgctgctggtggtaagaactgcttgacatctttctataaccttgatgccatcatttctgtcgaataccatgttaattcactcaaggctacaaatttcagaatatgggttacagtcatacttaaagaatttatgacaaagggttttgccatagacatgacaggctgactgccgaaaaacggcataaccctgcctgacacggcagaccttacagatgttgcattttaatttaatgcagcattttttttaatgtgtgaaaccgaaattacttttttacggtatatacagcagagtataatctgaatgagaggtgataaattgcaggacgataaaatagttgagctttattggaagcgggaagaaaccgcaatagccgcaaccgagaaaaaatacggagcctatctgatgaaaattgcatataacatactggttgacagagaggacagcagagaatgtgtaaacgatacatacctgaaagtatggaactgcataccgcctcacagacctgaggcactgtctgcatttcttgccaaaatagcgaggcaaactgccattgatatatttcgcagaagaaccagcccaaaacgcaggggctctgaatatgcagtttccctttcagagcttgaggactgcattgagtcggggaacacagtggaaacagaagtcgatgcaaggagtttggctgatgcaatcaataatttcctaggtgaattatccgtacttgaaagagatgtatttatagggagatactactttgcagactctgttggtgacataaccgcatactgcaatatcacggtgccaaagaccaagagtatgctttaccgtctgcgcagcagacttaaaatctacctgaaacaggaggggtattttgatgaaaagtaaaaatatagctgatgcgattgatatgcttgatgatgatattctgctgcataccgcagaggtcagaatgaagataaaaaaattaaaaagagtaaagctgataaaatatgctgctgcggcctgcctgtgcatcatatgtatagcaggtatttggctgtatgagggagctgacgaatttgtcccgattgcttctctgcttgatgaaagcagagtttcatcggaagaacacacatatacagataccattgaaataggagattacagatgtatgtataacaaggtaaattcggctctggcatcaaggcttgaagagagcataggcaaggcatttgataattcagagaagtggtattatgtttcgggacacaaagatgcccagtatctgatacaaagagaaagtgcgggttattcgttgtgggaatttgcctgttttgacagcaacggttacagctacagcgatgtaatgcagtctgtatatggcattgactcgatagataaaatagctgaaatcagagtccgcccgtctgatgctgataacactgactatggtaaaaaacttcaggagcagacaggggaatttactgtaaaggacagaaaagatatagatacagtttacagatgtctgatgtctcttgaatgttatggagatgacaactgggatatgatagaataccgaggctctgatgatgaagcatgctccggagatgctgtgaagcttgggcggtatattacgataattacagatgacgggaatgaaatagacaggctgaaatatacggcggtatccgatatgttttacgaatacggaggagttacatacagcaggcttacagatgagcaggcagagaatatgcgcagtattttaaaaatcatcgataaatgataaaaggcggcaggcccttagatagggaattcctgccgctttaatctttctccggatatatattgcggtaccacagacctgccagataaagagaggtcagattgctcattatacgagggtcaagtccggtacggcttattattttgtttatcttgtactgaacagtatttttgtgtatgaaaagctcggaagctatggcatttatagagccgttgctgatgtaatatatatttatgaaatctattatgtcctctatttctctatgttcgcagtctttaaaaacaatgccgcagaaacgttttttgtgatcgatgtcaacagaacttaaaattatgtcaagcagcatttcgtcataaataaatatgccgctctgtccgttcagaagctccataacctttcgcgcctgatgaaacgactgatgggcctgcctgctgtcaggaaagcttgtacctatggcaacagtgtaattgtcctgcggaaattcgctgttaaagcaggtcaggagatactccctgaatttgtctgcggagctgaaattgcctataaggatgccgtagttgctactgtatcctgtaagaatatgtgttttgtctattattgaatcaataaagctgtgaactgctttactgttgctgctgcttacaagcgctgcggtaataggtgaatttgggttgatattgtattttgtcagcttttcggtaagctgggcgctgctttcaagctcattgttgatccagctgtttatgaagagggtgcgcgaatgttccctgcggttgctctgctgtatcatatcaaagtccttgacgagaatttcagttacctttttgataaggcgcgcgtatctgccggtttcggatacatcgcctgttattcccacaactccgattatattgtcatcagaaaacagcggcagatttataccctgcctgcagcctgcatattcctcatcgtaatatactggaagctctttgagattttgcttgattacaagatgtgcgccctcgtggaactggccgacacgttccttgtccgtacttgccagaataactccgttttcgttcattatattgatgtcataatctatgacagagctgatttcccgtatcagatctgtagccgcgctcttgcttattttcataaaacacctccgcattaatttgctgaattgtttttactatattggcaatactgttacgcgtaacagcaattagcctgtattttcggatatatgcctatataaaaatgttacatataatattataattataacaatattattcgtcaatataaacaggaggtttacaatgaaaatgaaaaaggctgtttcaagatcgtgctcaacacttattgcattaagcagcgcgacaaaggccggagatattatttttggaaaaaacagtgaccgtcccgtaaacgagtcacagcctctggcatattttccgccggctgaccacgaagaaggtgaaatggtgcagtgcacctatataaaaattcccgaggtttcacacacttacggatatataggctcaagaccgtacaacatattcggttttgaacacggtgtaaacgaacacggagtaatcataggaaacgaggctgtaacaggcagagaaacacctgagcttaaatggggccttataggaatggatattttaagacttgcccttgcaagatcagacagcgccgcaaaggctgttgaggttataggcgagcttcttgaaacttacggaacaggcggagatccgctgatcagacctcagtatttcaatgccaactatattgttgcagactacaacgaggcatatatatttgaatcctgccagagaatgtgggctgccaagaagatagagcatgtaggtcacataggaaatatctacgcgctcagggatgactatgaccttataggcaaaaacgtaatcaaagaggctgcggctaagggctggtgcagagatgaggagagaataaacataggtgaaactttctccatttcagactgcgactatgaggacggagaagcgtatttcagatacatcagacaggaagaactgatgaaaaacagagatccgttcactgtaaaaatgatgatgaacaatctgcgtgaccattatgacatggattacagaaaaccgatacagtatgacatcgctacttcaaagatgcctacaatatgctgccatccgggcggtatgaacggctgtgcatcagctgcaagcgtggtatgctcacttgacaagaatgcgcctgaacctttcaaaatcacatactggggaagtatggctccgccttgttgttcggtatttacacctaaattcaatatcggctggatgccggagcagctggcggttgcagatgctgtatataacccggacagcccttggtggattttcaacgagcttgaaagatacatctccttaagttacaacgactttgctcctatggcgcaggaagtatttcagcctatggaggacgagctgatacagcaggttgagcaggctaagagcgaatacgacggcaacgatgaaaaactcaaggctctttcacaggaagcatttgagagaagtattgccgcagcaagagaccttacagcaaagataaaggctaagctgccgtcaacgagaattaattatctgatgcttgactatttcagagattcagcggatatgtgcggaatgccttatgacttaaagctgtagatatactactgatacagagaggaaaaacaaaatgagtgataatggattgaaaaaacaaagcgtaggccttataggtcttgtgggaatgatatacgcaatgaccgcagccggcgcttacggtatagaggatatgatatcctcttcaggaccgggaatgacaataataatgctgtttgtactgccgattatatgggcattccctatagcgcttgcatcgtgcgagctgggctctgcaattcctgacgaatgcgggttttacagatgggttcagagagctttgggcgagttctggggatttcagatcggctggctcaaaaatatagggatatatataaatgttgcggtattcgttgtactgtcaacagattaccttgcttcatatctgggactcaacaatcttcagagctacatatgcaagataatcataatcggagttttcacctggataaacctcagaggagtaaaagacgttgcaatcgtaagctcgataatatcaggagcaattctggttgcctttgcaggtattgcaataatagggtttattcatttctcccacaatccgtttgaaccggttgttgctacaggacagacagttgtaggcagcataggctcaagcatagcaatcggtatgtggatgtatgcaggctatgagtcaatgtcaagtcttgcgggagaggttaaagacccgcagatgattccaaaggctataataatagcgctgcctctgattataggtacatatgtgcttcctacagtggcatcacttggcgctataggccagtgggataagtggggttccgaaggagtttcatatgtaaacgttgcaatgcagtttgctcctgcattcggagtagctttcgtaatggttgctttcatatcaaacatatcaatgtttaacgtttatctggcatcaggcgcaagaggcttctttgtaatggcggaggacaaccttgctcctaaggcgcttgtaaagtgcgacaaaaaaagaggtgttccttatgtggcaattataagtctgtcggtagtttcactgattttatgcgcgttcaagtttgacatacttgttactatagtttcactgtttaatctgggactttattctctgattatgatttcacagatagttctgagaagaaaagagcctgacctgcctagaccttacagaattaagatgggtaaggtaggcactgacatattctgcgctgttcccgttgtggttgcgtttatagccctttatataaacggagcggactatttcgtaatgggacttctgggtatgatatcaggacctatcgcatacataatcttcaagaaaatttacggcggtctttacaaaaatgatcctgagaagtatcctataaatgaaaaaacaaagcttgcagtcggagataccaagagaatatcattttctttcggacttctggcagtgcttatgattataggcagactgtttcttcctggatatgaggatcacgcatattatgcagaagcctacggcgttgacaatatgtttgatattctgatgatgcttgtaactgtcggagctgcggtatgcgcagtgctggccgttatatttggagttttatacaataagacagaatcgaaggaagcaattaatggataagcaaaaagttttgcaaaaaaaataccttataatgcctgattctttcaagggaactatggattccattgaagtatgcgagattatgaaatcagcagtgcttgaaaaaaatccgggcgcagaggttgtgactgttcctgtagctgacggcggagagggtacggtggactgttttctgtctgcctttggcggcaaaaagaaaacggtgactgtaacaggaccctacggtaaaaaagtacaggcagcctacggcattacgggcgatactgcaattattgaaatggcagcagcctcaggctttgcgcttaccgataacggcatgagagatccgtcagctgcgactacctttggagtcggcgagcttgtcagagatgccgtagagtcaggatgcaggcgtataatactgggacttggcggaagctgcagcaatgacggcggagcaggaatggcagcggcactgggaaccgtgttttatgatgaagcgggcagatcctttgtccctgccggcaggaatcttgacaggataagcaggattgataaaacagcttctgacagacttttgggaaacgtggctatagaggcaatgtgtgatatagataatccgctttacggaccaagaggcgcggcatatgtgtttgcaccgcagaaaggcgcagacgaggctatggtcagagtgcttgacggcaatctgaaaaaatatgcggaaacagtaaaagctgaaacaggagcagatatttcagagcttgcaggcggcggtgctgctggaggaacaggcgcgggagcatatgtttttctcggcgccagactcagacagggaatagatgtgatacttgatatgctgggatttgagaagctgattaaggattgcagagtgatttttacaggcgagggcagctttgacagtcagagcctcggcggcaaggtggctgtgggaatttccagaagagccatgaaatcgggaatccctgttatagttgtggcaggaagcgttgccgacaacgtcagcgggctttcagaagtgggaattacaggcgtatttcagactgaccccggcacttatgacagccagagcgagatgttcgcaaactgcagaaaagacctgaaaaggacaatgtttaagatactggataaaacagaattctaagaatttaacgtaaatgccttacataaaaaacataaagataacgggacttcggaagtgtttctgaaatcccgttatttattaggaacacatatcactatcagcaaaagacaattatatgtgaatatacaagttcagtgtggtataattaagatattgtcgatatctttatttttgaaaaagagaaaagagtgaatatacactataaaacaggaggcagaagctatgggaaaaatcatattattccacggcagttctgacaggaaaataacacctacgtttggtttaggtgaagaaaaacacgactacggtaagggtttctatatgacagaaagcgcagagcttgcaaaagaatgggccgtatgcaaaataggcggaattaacggctgggtacacaagtatgaattagatactgatgaattgaagatacttgatttccagaatcttaatattctgacgtggcttgcagaacttatgaaacatagaaatgctgctgattctaaaagatacagagtgctttcacagaaattcattgcagaatacggcattgaaacaaaagaatatgatgtaataaaaggctggagagcagatgcttcctacttttatattgcaaaagcatttgtgagagatgaaatagatattgacatattagaagaacttttgtcattgggcggacttggaattcagtattgcctgaaatcagaaaaagcctattctcagcttaatgagattgaagatgaacttgaacctgttgaatacagagagtttaatccgaaatacaatgagagggatgcagcagccagagaaaaaatgcgggaactgataaattccgaagcaaataaagtgacaaatgtattcagtacacttttgtgaggtgattaaaatgtgcgcatatccaaaatgttatctggaggaagtagtagaaactcagggtaagctgtttgactggtttgcagagagctttcctgataaagatacagaggactttattgtagcatatatggtaagcaggacaagaaaaagtattgatgaaggacaggcttttgtttctacaatgagctttgcggagctatgggagtgtttttgtgatacagataaatattctccccaaaacggaaaagcaatgaaaggctttatgccagactggattggtgaattctatgcatattaccagtggtattacgacattgccagcagtgaaattatagacagagtaccaatcgattttttaaagaaagcatatccggctcttcacgatatggagcttgaactggcagtaaaaaaggtgggagaagtttaatgaatatagtatgttttcataatcccgatgaggagaacgggtatttgagcaactggtacaagtcggactttgtggcagaggagattaagttctcgtcaatggagcagtttatgatgtatcagaaagctgtgcatttcaatgacattgcatctgcgaaacagatacttgaaactgatgatgttgcagagataaaagcacttggcagaggcgtaacaggatttgaagaaagctattggaacggaataaggcagattgttgtttatgaggggcttattgcaaagttctcacagaataaaagtttgaagaaattgcttcttggaactggcaaagatattctggcagagtgtgcggtaaaagacataatatgggggataggtgtatcgatgaaagacccggacagatttgataaaaccaagtggaaaggccagaacttgctgggatatgcgcttatgatggtaaggaacagattaagatgagcttaaagccctgaaagtaaatttgtgaggcagataaacataaaagagattagagatgctttttagaaaggggaaaaccatgaaatcagaaaaatatttgagagtgcccgttattgctgtaataatcatatcccttatattagggacaacttcatttgctgatgcggcggccaaaccgaagctgtcagcgcagcagctgagcattcgggcaggcagcacaagcgagctgagagttaaaaatacagataaaaaaatcagatggtccacatctgacaaaaaaattgtcactgtgaaatctgcaggtaagactaaggcaaaggtcagcgcgaaaaagagcgggacctgcgttattacggcaaggatttcaaagaaatgcacattaaaatgcagggttaaggttctggcaaagaaacagagtaattcacagcctgcgctgaaaacaatagaatactccaatatgacggatgagtattcccgcggaattttatctgacctgcttgcagaaaacgatattgaagcatcgcgcattgacgctttaatgacccgcattgatgactttaacggcagtgtcaggaaagagtggctgactgacggatttgaagtcatatcacctgccaaaacaaagtatgatgtttatgatatgcaggatgaatatacagtaaaaaacggcgactttccggggcataactgtcgtatcacagcttttagcctgatgagtgcatatatcaaaaccgccggagagcttccggaaaaacagggagaagattttctttttatggatttaaaaacaattgaagcagatacaaaagtcctttgcggtgacagcgccgacagattttgcgcgctgtttgcacctgtagctgcagcaaagagcactaaggtgaagacgcaggttctggcactgcagcgcggctgggcagagcgtggaattactttttcaggcagcagggcgcgtttgatttccgtaatttttcacgataaattttcagacgatgagaacacgctgtctgtcggccatgccggagtattgctgacttcaaaagacggtaaactgtattttattgaaaaagtcgcttttcaggagccttaccgccttattaaattcagtaacagaacagaattaagcgattacctgatgaaaaaatatgatacctcgtggggtcaggataccgcgcgaccgtttattatggagaatgatgccttaatgaaaggctacagatgataagggcagggtttttaaaattcccacagttttaggagagtcggagcaatt

SEQ ID NO: 3972 - DNA, 32759 bp, Unknown
  16S sequences of unknown bacteria
attaataaattataaaaatattaagttgttgacagaaattcacaaactcgatcgatctttttcgatatctctcggaaacggtctacaacaattaccatatccgttttatccttcagcagttgaactacttttagcatcatacccagtattcgagccttcaataacgatcggcattgctcgggcggtaagaaactgtcgggaaatatttccctatatcgatgaataacacgattacccagatccgggtttaggtttaaattctgttgcgaaaagctgttttcaatcggattataggtaaaaagagcgtagcctatgaagtggagcagatcaaataagtagctctcagtaaaacaaaaatcgaaatcgatgactgctgctatatccgggttttgaaacaatatatttcccagatgataatctccgtgattgattattttgagtgactgaatcgattttttgtccatgttctgctgaatttgagctaagctgttgactgcactgagaataaaatcacgcaggtctttgtttttagccgatattttcgtatgtaagaccgactgtccagccaggatgggagtgacaaacaacaagtcgtccagtccccgaccataccattggagtttcagggggtcaaatgaataagtaggtttttcaattgtttttccatatagtgatgataagatatggagcgtccccaattgttcggctgctttcagataaaggtcttctacttgttgttttgataagttgtctgtggcatcatggggaataaattcttggacttcgatggaataggaacccaacggtaggttggtcctgcctgcttttgccgggagcacatcaggtgttttaaattgatgttttttcaaaaaatttataaagcggaattctttatcccccttttttaagaaggatggcaagaacttgacaatatattttgacctcgaggtgtcaatcatgtatactcggcacatatggtctgaacgaattgggtttaattcattgatacagcctacatcatagaacgcctctaaaagggcattcagcatttcgtgagaagattctgacattttcttttctattccttatttctgttgacaaactctaaaatagttctcgcgcctttccgcgctcctcctgccgaaagcaaggtgtgctgaatttttaggcaattgtccttaaatgttttgttatgaaagatttcttgtgcagcataaaacaatcgggaaggggtgactctcttcatctgaagagtacagcctaagcccaactcttttattcgttcggccacaagaaattggtcgcttctctgcggcacaattagaaggggcacggcaaaagataatgcttcgttgacactgttcatgccgccgtgacaaataaaacaactggcttgagaaagaattcgtatttgatcaactcggttataaatggtaatattcgcagggaggaggccgaaattacggctctcatattgatcgccaagtgtaataatgacattccattccgacacggcaaacgcatcaatgcactgacggataaaatcaatattgatactggaagtgccaagagagatatatacaatcggctttctggtcggcggtttatcgatcattcgcttttgctgcgtcaacgtggcgccgacaaaacagtatgttttatcaaagttaccgcccattaactggaattcctttgaggtatatacgatattgagatccgaacagctggaaaaaaaggatcgcagagaatcctcatcctcccctctctgaaagggagggactagtaaggacttttgtaaacgggatatcagctccatttgtttgtcggtagttgagcagattttttctgggaagtttagtatatcctgcaagaatatcttactataacgatgtaataaagcatcatcgtaggcaaatttggtgatggaacaaatggatggtaattgcctatcttttgcgattgctttgccccaggcagcggattcgtcatatataatatagtctaccgcaaaattcctgagttcatgagtcagcatctgatgatacttgtgtgtttttcgtatttgcatcaggcgggagtaaacgagacggtcaaaaggatctatggccgattccgtttctgaaaaggcttcatgtggagcggggacatgtcgatagggaagaaatatagcccctgtcttttttatagctgctttaaattgatcggttgcataataataaacgtgttctccctgcctgataagctcttttataagccccagagtaggattggtgtggccataggcgttaggacatccgaagaagaggactctggacatgggaattttcacctatttctggtttttcattagaggagaacggttggccaagcagtttttttcatagaggcgtatatatcgctgaaagagttggctatcgttcagaagatggtcggcaaaactgtctttcccacccaaatacaataaatcccggctgatcgaattatgttttagaagataggaatcgacaaaatggatcaaatacggcagcctgtcaaaatcagataccggtatgttttctatatcgacaccgtgtcggctaaaaaatggtttatgataattcggttttgcagtttagaccagtcttcacagggaatggcaacgggaaacgtcagattggttaagatgataatacgcacatctgggggtagaatactggtctttgacaacgacaaaagggaatagatcgtttcgtttatgagtatggggttattgatggcgcaatataggagatatctcatttaatcgcctcatgattatccctttttgtatcgttgtactgagatttgattatataggtcaaaacttttgcatcatatgtgtattattgtctcagacgaattcattgagtggttaatgaaataacgtgatagcttatttggaataaacaggagtattgaaaaagaggaaggtttgtgctgtactaatacatttacaaaaagggtattttggagtaacataaaatgagaacatttgttctaatactacctgatgagtaaattcgcgctttgtgctaatcaatcggaaaacgcatgaatatacaagagcgttcattggcctataggagtcataaaaacaggagaaaatacctatgagtgagcaaaatattcaagaaaacttcaaattagtatccccttacaagcctacgggcgatcagccggaggcgatcgccaagctggtggatggggtagaacggggagacaaagagcagactttgctgggggtcacaggctccggcaaaacatttaccatagcaaacgtcattgctcaggacagaaaccgactttggtactggcacacaacaagacgcttgctgcgcgatgactagagtttcgggagttttttcctgataacgccgtcgaatatttcgtatcctaatacgccggaatagaaaatatatgtgaattgtgtactatgtagtattgtatattaacatgtagttgggcaaaatgaaccaaaaaacgtcagatataacaaagtgataaaagacggtattagtgacctaattcgtgtgattggccattgaggatgaatacaccaaggtgcaaagtttcgacgagtaggcagatgtttatatcaccaagcctttctctatggttttgctgggaaaacgaattacagcgctgctgcggcgaagcggacaaaatatcctgcccgatatcatgacatttggggatataaccgtgaacttttccgggtatacagcctgggacagcgacggaaaaattgaattgacgcccaaagagatcgaccttctgcggttgtttgtggagcacaagggcctggtactcacgaggaatcaaattctggatgagctgtggggcgacgacaatccgatcattgaccggacgatagacacctatgtcaaaaacctgcgcaaaaaatgtcggttagattgccttgtcacggtaaagggaattggctataaatacgaggtgagagaatgaagcggctgaagatttaccctaaaacattcttttatacactggggctgctgctgtttatcgtactggtggcccacgcgctgctgtattttctcacaccgcaggttccactgaagctatcggccagccccggcaacgacgatggactctctgacaatagacggcgaattggatgacagtctggtggctcccctgtttcaggaattggatgtcctatggaaaaacagttccctcacaccggcgcagctggaagcgttcgtcctcattgcgtcggatatgaaaagcttactgccggcgattcagcaaagacttaccagcagcattctgctgcatgaactgcttgcgatgatgagagaacggtatcgcttggaggagatggatgcatcctgcgcaggcatcttgttctgcaagacgatggaatccatgttgaaagaagtactgttcggaaagctaaaagcgctgtttccggatgagcagatatacaagaacaaacttcgggatataaaggaacaaaaagtaaccactggtacctttacatatcttctgaataaagaggaagtgcgggcccgtttagcttcccgcaaggccctcctgtttgagcaagtttgtgacgatcagtggtggaaagcatatgccgaggagttggaggaattccgaaagcttcgtaatacctgctgccattcagaaccactgagctggcagcaagagaaggagctgatccagatactttttgatcatcaggagtttatgaaaactctggtcggtgatgttttgtgatcagtaaattgtaaaggatgtgttagtggtggcagaaagtaagtatcaatttgaacggctaacgccaatcgacaacattgagtcagatgtatatgaagatgcaataaattacgtatttgaaaatcctgacgtaaaaaatgttgcaaacaatgacaaagcaggattatgtcattatctgtggagacttcggcggcgtctgggacggttcaaagcgagagaaatactggttggattggctggaagataagccgtttaccaccttgttcgtatcggggaatcacgaaaattataatttattgtctgaatacgctacggagtactggcatggtggtaaagtgcagttcatccgtcctaccattgttcatcttatgagaggtcaggtgtttgatctgtgcggaaagaggttcttcactatgggaggggcttcctcccatgatatcacggatgggattctggtgccgaacgatgtggagtatcacgaggcggaagataatctagagtcctgcggcagaaccgtggattatatcttatcccattgttgtccgtccagcattatggacgttatcagtggtgggatgtatcaacatgacagactgactgattattttgaaacactgaagaagctaaaccgtatgcacataatggctatttataggtatacggttgaacgatcgccctctgtagcacgaatactaggtagcgccagctgggttctgatcctcacaaagacaaaaatcaaatgtctcacggtacgaaaacgacgcaggagattcgcttgaaacaccgtcgagcactcgtgttttaaaggttccgcaatgtgtataccgataaaaggcagttactgccaggactataatgaaaatttaatattaacattggtggactcaaaggaaaattgtatagatgtaattgcataaccgatagatggggtagtaaagggaactatagccaatatcatagcttgaatacatgattaccttttttaccttatctgcctgcggaaattctgcgagaccaggtaacaacaatgtgtcttcgacaggaactacggatatagtagatgctgtcttttatgaaatcgtgtcggatgtctcttttttataaaacaacatccgagtgcggtgacaccagtatgttgttttataattgatggagtatgtgctctcatacatctataatatgcttttcgatatccgaaatgattgcaacataatgttttttctctacgtttataagcatttttatccttagataatgggtaaaaataaaaactgagtgaatattaccttaaatgggcaagtctgaaaaaccagacttgcctgttttttatagctatatagtattctgtatcaataacagtgcagcgagtttagcgcatattttgccttttcgtaacttttgtaggatactatggacctgaaaaagtccgaatgggcgatacaaaacggtagaagataacagtaaatgattttattggaaatatcagagataacagagtatagttgtgtaggttcgagaatgataagttacagattagggaaagcgaataagacctgcaagggagagagccagttaagaggacggatggggaaaaggttgtatttgcgctgatgaacagctagctgcttggcaaagtccacgaaggaatagaatttgtggtcggcataaaagtactcgttgtccttgcggtggctgcgttcgaccttgccgttgtgcctgggcgtaaaaggccggatcttcttgtggcggatgccgagctgagccagagtcttctcaaacatggtaaggggcgtcttttggctgttccccatctcattggtaaactcaaagccattatcggtttggacacattcgatggcaaagggaaacttttccacgacatgcttcaaaaactgtgtggaggagtaggtactgttctcttcaaaagcctccagataccggaaacggctgtattcgtcaatgaaggtgtattgataccactttgtgccatcctcctgtccgataatacaggcttgagggacaaatttcacatcgatctgcacacgctggccgggatattgcatctgctcatagggcttggggatatactttggattcggcagcttaaccggcttgccgtcaatccggcacagcagcttatgcggccctgagatggagcgtgtgtagccgcgttggcgcagcttcacccaaaacacaaccaaacccgcatgcgggtttcggcgccgtatgtttttcaccagcttgatctcttcctctgtatgctgattggggtggctgtgcggacggtgagaaccctctgccaaggagtggacggttccgtcgtacttttttctccatcggtaaatgttttgccggctggttttgtaccgaatcgccgctgttgtgactccatgtttcaaagtatattcgattaccgcttgcttaaaccgcatgtcttgtgttatcgtattcatagcgaatagggtaacctgcctttcggttttgtctcgacaactctaccgtatcacaggtcctctctattcgctatctttttttattcccccttgtaacacatcattgtagcacatacaagatcagagataacagagtatagttgaaaattgaaagttcggtcaaactatgctataatttattggttgacattccaggctgtctggagtaaaatggcctttagaacgaatgttctaaacttgtggtgagcaaattcgtgtaatagctcccaaaatagggatggatgaacatacagaacaggtgctgtgtgatttagctgagtttataatggagaaaaatgcctatgagtgagcaagagttatttaaattagtcgcaccctacaagcccaccggcgaccagccggaagccatcgccaaattggtggaagggatcaaaagaggggataaagagcagacgctgctgggcgtaacaggctccggtaagacgttcaccatggccaatattattcagcaggtgaaaaagcccaccttggttctggctcacaataagacgttggccgcgcaattatgctcggaatttcgtgaattcttcccaacgtcttcggtggagtatttcgtgtcctattacgattattatcagccggaggcatatatcgcctcaacggatacgtatatcgaaaaagattccgcgatcaacgacgagatcgacaaactccgccattcggccacgtccgccctgtcagagcggcgagacgtcatcatcgtggcgagcgtttcctgcatttacagcctcggcaaccccatcgactaccgcaacatgattatttccctgcggccgggcatgataaaaccgcgggacgagcttcttgccaagctggtagagctccaatatgaacgcaacgacatcaatttcacccggaacaagttccgcgtccgcggcgacgtggtcgaaattttccccgcctacgcaggggaaacggtcatccgggtggagttttttggggacgaggtcgaccgcatcagcgagatcaatcctctgacgggcgagcttaaagggctgctcggccatatcgccatctacccggcctctcactatatcgttccgcgggacaaaatggaagacgcggttcaggagatcgagcgggagctcgccgaacgggtggagtttttcaaaaagaacggacagcttctcgaggcgcagcgcatccttcagcgtacccgctatgacatcgagatgctgcgggaaatcggggtgtgcaaggggatcgagaactattcccgtgtcctggcgggacgggcccccggttcttctccctttactctgctcgattattttccggacgactatctgctcttcgtggacgaatcccacgtgaccctgccccaggttcgcggcatgttcggcggggatttcgcccgcaagaaaaatctgatcgattatgggttccgcctgccgagcgcctacgacaaccggccgctgaatttcgacgagttttatgaccgggtcaaccaagtggtgttcgtcagcgccacgccgggggattttgagcgggggcacagcaccgagacggtggaacaggtcatccgtccgaccggcctgctcgatccggaggtggtggtcaagccggtcgaagggcagatcgacgacctgatggacgaaatccggacgagagctgcccggcaggagcgggtgctcgtgaccaccctgaccaaaaagatggcggaggatctgaccacctacttcgataatgccggcctgcgggtccggtatatgcaccacgatatcgacaccatggaacgcatggagatcatccgggatctgcggctgggtgaatttgacgttctggtcgggatcaacctgctgcgggagggcctggatattccggaggtttccctggtggcgatcctggacgcggataaggagggcttcctccgctccgaaacctctctgatccagaccatcggccgggcggcccgcaacgcagaggggcaggtcatcatgtatgccgatcaggtgacgccctcgatggagagggccatccatgagaccaatcggcgccgtgccatccagatgcggtataatgaggaacacggcatcgtgcccaaaactatcctcaaggatgtgcgggatatcatcgagatatccccgaaaaacaagggcctggacaagccggcgaagcgcctgagccgcgcggagcggcagcagcggatcgagcagcttaccagggagatgaagaacgccgccaagctgctggaattcgagcacgcggcctggctgcgggacgagatcgacaagttgaggaaaatggactgaagcatattctttttgcagggggtgcgtacgatgccgccgctggaatttggcacgatccgaggcttcggggatttccgtgccgccctgctgcgggcgggattcgccgtgggtggcgaaaatgacgaggggatcttttcccttcgtccctatatggacccatccttgcaatatcataccggcgaccccgaaaccgatccctggctctggcgtgtccgagtgctcgaagaccgggctcttgccggcggcaaggtgtttttcggcaaagcgggctggatatcccgggagtggtatccgcttttcctggcggtccgccgccgggggaaaagcctcgaagaactgtatgccgatggccttgtttcccggctggaccgggaggtttaccggacggtagccggggcgggtctcctgccggtacacaagctcagggaacggatctcctgcgacaaaccgtcccagatcgaggcggcgctgtcccgcctccaggctggtctgtttctcaccgtctgcggggagacacgcaagctctccaaggatggccgcccctatggctggccagtctccctggtctgtacgcccgaggcgttttttccagaggacgtgtggggagagtccctccggatatcaccgggggaggcatatgcccggatccgggagcaggtgctccgcctgaatctgcaggcggacgaaaagcatattcgccgcttcatcggcggatgaatccaactatggcggcatactcgagctgccggggatagagagggactgtatttatgcagagcaaactgaccgtcaaaggcgccagggaacacaatttgaaaaacgtggatatcgaaatcccccgggacaagctggtggtgtttaccggcctgtcgggatcgggaaaatcctccctggccttcgacaccatctacgccgagggacagcggcggtacgtggaaagcctgtcctcctatgcccgccagtttttgggccaaatggaaaagccggacgtggattatatcgaaggtctgtcgcccgccatttccatcgaccagaagaccacctcgaaaaatccccgttccaccgtggggaccgtcaccgaaatctacgactatctccgcctgctctacgcccggatcggcatcccgcattgccccatctgcggccgggagatcaagcagcagacggtggaccagatcgtcgaccgggtgatggcgctcgaggaggggacccggattcaggtgctggcgcctgtggtcaggggacgcaagggtgagcacgccaaggaattcgaggcggcccggaaatccggatatgtccgggtgcgggtggacggcaatgtctacgacctgtccgaaaccatcccaatggagaagaataaaaaacacaccatcgaggtggtggtggaccggctggtggtccgcgcggacatgcggggccgtctggccgattcggtggaaaccgcgacgggcctcaccggcgggctggtcaccatcgacgtagtggggggggaggagctgcctttttcccagaactacgcctgtcccgagcatggggtgagcatcgaagagctctctccccggatgttttccttcaacaatcccttcggtgcctgtccgaaatgcactggactcggtgttttcatgtccatggaccccgaccggatcctcccggataggaagctgtccatccgccagggcgctatccgcgcaagcggctggagctatgccgacgggggcaccattgcccagatgtattacgaagggctagccgcccattacggcttttcgctggatacgcccgtccaagacctgccgaaaaaggcggttgacgtcatcctgtacggcacgaacggcgaaaagatcaagatgacccgcaaaatggaatacggcagcggggaatatttcaccgatttcgaaggggtgctgaacaatctccaacggcggtaccgggaaacctccagcgaatggatgcgggaggagctcgaggaatacatgagtgaaatcccctgcccggaatgccatggccaccggctcaagccggaaagcctggccgtgaccgtgggaggggagaacatctcttccctgagccggctgtcggtgtcgggcgccctgtcctttctcgatagcctggaacccagtctcaccgaccgggagcggaagatcggggagcggatcctcaaggagatcagggaacgcctgggctttctccagagcgtgggtctcgaatatctcagcctgtcccgggcatccggcaccttgtccgggggcgagagccagcgcatccgcctcgccacccagatcggatcctacctgatgggggtgctctatatcctggacgagcccagtatcggcctgcatcagcgggacaacgacaagctgctcgccaccctcaaacgcctgcgggacctgggcaacaccctgatcgtggtggagcacgacgaggacaccatgcgggcagccgactggatcgtggatatcggcccgggggccggtgtccacggcggcaacgtgatctgttctgggccggtggaggaggtctgtgcctgcaaggagtcggtcaccggccagtatctcagcggccggcgccgcatccccgtgccggcggaacgccgtcccggctccggccggctgctgaccgtccgcggggccagtgaaaacaatttgaaaaatatcgacgtctctttccgcctgggggcgttcaattgcgtcaccggcgtgtccggctcggggaaatcctccctggtcaatgaaatcctgtacaagcacctggccgccgcgctcaatggcgcccgctgccgtgccggggcgcacggctccatcgagggcctggaggccctcgacaaggtcatcgatatcaaccaggccccgatcgggcggaccccgcggtccaaccccgccacttataccggcgtgttcaacgacatccgggagctcttcgcctccactgccgacgcgaaaatgcgcggcttttccgccggccgcttttccttcaacatcaagggcgggcgctgcgaggcctgccagggggacggcattatcaagatcgagatgcatttcctgcccgatatttacgtcccctgcgaggtctgtaaaggccgtcgctataaccgggagacgctcgaggtcaaatataaaggtaagagcatttacgacgttttggacatgacggtggaagaggcgctctcctttttttccagcgttcccaagatcgcccgcaagctccagaccttgtacgacgtggggctcggctatatccaggtcgggcagcccgccaccaccttgtcaggcggcgaggcccagcgggttaaactggcctccgagctgtcgcggcgcgccaccggcaaaacggtgtatatcctggacgaaccgaccaccggcctgcataccgccgacgtacagcagctcatcgaggtgctgcagaagctggtggagggcggcaacactgtcatcgtcatcgagcacaacctggatgtgatcaaaaccgccgattatatcatcgatctcggtcccgagggcggggataaaggtgggctggtggtggcggccggcacgccggaggaagtggcggccgtcccggactcctataccgggcagtatctgcagaaggtgctctcgcaggaggagacctgaggatatccggccggcgtatactcaccccggtcgtggtgcagactaagcgcatcaagaagaacgggagacggcgggatgcgcatatcggatattccctgggaaatggtccaacaggaattgtacagttggaatcggcccctttctttggagaccgtccggctgctggacgagctcttcttttcgctggaggacacgggggagaggggcgatctgatcctggttttcgggagccggcggggcttccgttaccgtgggcgtcaggcgctgcggctgtaccaggccgggcgggcaccccatatcctcgtttccgggggaacgcgggatccggctctgccgacagaagcctccctgttccgtcagggctttcgggaacatggggtgccggacgaggcgattttaaccgaggagatgtcccggaccacgcctgaaaacgtcgcgaatacggctgccatgctccggcgccggtacggcaaaacgccgcttatcctgctgcttgtgacggcggaattccacatgacgagagcctacctgaccgccaaaaaaggtttcccggattcctaccggctggtctcctgtccggctgtgagcctgcacggcaaacgggacaattggttcgccaccccgcttggacgggagcgtctcgggcgggagctgcagtccctggtggcctgtgcccgcaacgggctggcggcggatcgggagctgtttgcgggattgcgggagcccgtctgccggggctgacaggccgtgtgggcttatccggcgaggccgccggctaccattttttcagtctgaattcgatcgaaaccggcggggtttccgccggtttttgcgcgttttgtgggcaatttcgttcaaaaggggaggattcggacatggaaatatcggaaaaaagcggcgttcatcaaggaatatttacaaatctttcatatactgtttttctccgtattgtatgatactatagacgtcagccgtgaggtggaaggacatgtcatgtttggatatgtgaaggtataccagccggaactgaagatgggggaattcgagcactaccgcggcgtctattgtgcgctgtgcaaacagcttggcaagcggtacggttttttggcccgtatgaccttgagctacgacttcacctttctggcgctcttttatatggcgctcggggatgactgccccgggttcaaaaaggggcggtgcgcgttcaatccgctgaaaaaacggacctgctgctgtggcggcacggctctcgaggacgcggccgacgcggccgcgctgctggtgtattacaaaacccgggataccatcgccgacagtggcttctggaaacgcctcggcgcccgctgcctgcttccgtttgtttccgccggccgcaaaaaggccgcgcgggcaaagccggagctggacgcggtcatggcggactgtatgcggctgcaggccgggctggaacaggcgaaatccccttccgtcgatgcggcggccgaacccacggcacgtatgcttgcctatctggcggcggcggcggcgcgggacgaacgcgaaaaacgcatcctcgaccggttcggctactgcctgggccggtggatctatctcatcgatgccgcggacgacctggaagaggatctgcaaaacggaagctacaatgcctttgcgctctcccgccggttgaccgccggggatgccgctgccctcggggaggccaggcgatacgccgagggttcgctcaacgcgaccctcgcggagtgtgaggcggcctacaatttattggatatccgccggtttgacggtatattgcgcaacgtgctggagctcgggctgccttacgtgcagaaacaggcgctctttggcgatccgcagtcgaaatccggcaaacgcagaaagcgagaggacccgaactatgactgatccctatcaggtgctgggcgtacagccgagcgccaccgacgaagaggtaaaagcggcctatcgggagctggccaagaaataccatcccgaccactacaacgacaacccgctctccgatctcgcgcaggaaaagatgcaggagatcaacgaggcgtacgacgccattatccggatgcgccggcagggcggtccggcaccgcagggcggggccccttcccagggaggtgggacctcccgtttcatggatatccgcaacctcatccgcaccggacgggtgatggatgccgaaaccctcctagacgggattcccggcccttcccgggacggggaatggtatttcctcaaggggagtgtcctgttcaaaaaaggatggctcgacgacgcctacaaccatttttccactgcggtccggatggatccgggcaacatggaataccggcaggccctcaaccagatggagttgcggcggcagaacggcggataccggaccggccgtcagacggcgggaggctgcagcgcctgcgacatgtgcagcggcctgatctgcgcggactgctgctgtgaatgcatgggcggcgaccttatccgctgctgctgacacggatgaaagtttcaatatgccgggccccggacgggcggccggctggaaaggcctgatggcagttcatgaagcacagcggaaaaatcgcgttgggcgggttgcttgccgccctctccttagtctgtatgctcctgaccatttttccttttgccgactatgccctgcccgctctcgcaggggtgcttctcatccccatcgtactcgagagcggcgtgaaatgggggtttatggtctatgccgtcgtggggatcctgaacgcgatcctgactccctccctggaggcaaaagtgcttttcatcgcctttttcgggtattatccggttctcaaggccctgatcgagcgcattcgtttccggccgttggaatgggcggccaaactcctgctcttcaacggtacgtttgtggccgcctattggctcatgctgcatgtgttcgccctgccggccgacagcctggagctgttcggcgtcaatgtgccgctgctcctgctcggcgccgggaacatcgtgtttgtcatttacgacgtggcggtcaccaatctcatcgtcctgtatcagaggatgctgcgcccgaagcttctgcacatattccgcatctgaatggacagccgggcgctgtccattttcattttcaattgcaggaacggggaatgccgcttgcaatttcgacgcgaaggcggtacaatactaacggaatacgcagcggcaggcggaaaggttggatcggcttgaaaacgaatttgatcgcgcatatcacccgggaaatgccgggtttttccaaagggcagaaacgcatcgcccactatatactcgagcattatgacaccgcggcgttcatgacggcctaccggctgggcgaaaccgtcggggtgagcgaatccacagtggtccgctttgcggcggagctggggttcgaggggtatccgcagctgcaaaaagcgatgcaggagcttatccgcagcaagctgacctcggtccagcgggtggaagtcacccgggcacgcatgggggacagcgaggtgctggacaacgtgatggcttacgacatgcagaacatccggcaaaccctcgaggagttgccgcgggatgtgttcgaccgggcggtggacgcgctggtaagcgcccgcaaggtctatattttcggggcggggagctgccgcgcgctcgccaatttcgcggcgtattatctcaagctcctcctgcccgacatccatctggtgtatacctccagcgagaccgagatcctcgaagagctcatccatatcagtgaagaggacaccatcctcgggatgagctttccgcgatattccagcaaggcggtcaaaaccctgcatttcgcgcattcccgccgcgcgaaggtcattgcgatcaccgacagcctgctctctcccatcgcggattttgccacctgcctgcttctggcccacagcgacatggccaccatcgtcgactcgctcgtggcgccgctgagcgtgctcaacgcgctgatcgtggcggtgtcgctccgccggatggagcagaaccgggagacgctcaacgagctcgaagggctgtgggagacctatcaggtataccagccgttcgaaaaaacggcggacggggtgtgaaggtgcggagtatggaatcggatcggcccgtcattgtggtgggcggaggcgccgcggggctgatggcggccggatgcgcgggccgccgcggccggccggtcacggtggtggaacgcaatccccggccggcacgcaaggtgctcatcaccgggaaaggccgctgcaatgtcaccaataactgcaccgctgaagacgccgtcgcccatgtcccgggcgggggccggttcctgtacagcgccttttccgccttcacgccgcaggactgcatggccttgttcgaagaacagggcgtgccgctcaaaaccgaacggggcggccgggtattcccggaatccgacaaagcgatggacatcgccgacgcgctggcgagatatgccaggacgggcggcgcccggataaggcaggggcgggtttcggagctcctgatcgcggacggggcctgccggggggtgaggctggaggatgggagtgtccttgaagccggagccgtgatcgtctgcacgggcgggctgtcctatccgctgaccggctcgaccggggacggatacgccctggcacgtcaggcggggcataccgtcacgccgctgcgtccctccctggtgccgctcgaggcggaggacggctggtgcgcggccctgcaggggctatctttgaaaaacgccggtctgaccgtccgggacgaagccgggcaaaaaaccatttatcgggacttcggggagatgctgttcacccatttcggcctgtcggggccgatgatcctcagcgccagcgcccatctgcgccatatggcgcgggggcggtataccgtccacatcgacctgaagcccgcgctgacgcccgaacagctcgacagccggctggtacgggatctgcgggcggaacaaaaccgggcgttcgggaccctgcttggcggcctgctgccgcggtcgatggttccggtcatggcggagctctgcggtgttccgcctgagcggaagtgccacagcgtcacccgggaggaacgggccgggctgctccggctcctcaaggacctgccggtacggatcgcgggcttccggccggtggaagaggccatcgtcaccgccggcggcgtggccttgaaggaaatcgacgcaaaaaccatggcgtcaaaaaaactgccggggctgttttttgccggagaggtgttggacctagacgcctacaccggcggcttcaatctccagatcgcctttgctaccggtcaggcggccggccgggcggtctgaccggaaaggatcggggcggatgtacaacaacgattatatcttgcggatgattgaggacctgggccgggtgctgcggcaggtgtttttgcaggaagaggaagagatgttcgagattgtggacgaggagggccgcttttccgaaagcgattttctcggctatcgcgtgggccggctgctcttggaacggaggatcaacgaagcagagaacctcctgttcgacgagatcgaacgggatccccagccgtcctttctcgcggtcggcgtccatttttacgaggaccttcaggagctgtccgacgaggagctggaggcggcagatttctcccgggaggagatcgccgaggggctggaagccctgaaacgtctctgtatggttcccggtgaagagcccgtatctgagaaacaggaggcatcatccatgcaggaccacaaaccggtttcgattgcgatcgacggcccttcgggggcggggaagagcaccatcgcccggatccttgcggggcggctcggcgttttatatgtggataccggggcactctaccgcgcggtgggctgtttcgtgctggaccgcggcgcggacccgtccagggcggacgaggtcgagcccctgctgggcggcctgaaggtggagctgcgccatgaacacggtgaacaacgcgtttacgtcaatggggaggatgtcaccggccgcatccggacgccggagatttctatggcggcctcggccgtatcggccctgccggcggtgcgtcgtttcctgttccacctgcagcgggataccgcggccgtgcaggacgtcatcatggacggccgggatatcggcaccgtggtgctcccggacgcgcgcctgaagatttttctgaccgcgtcggcggaggaccgggccgccagacggacggaggaattgcgcgaaaagggaatcgaggccgattttgacgaagtgcttgcggatatgagacagcgggattataatgatgaaaaccgggcagaagcgccgctgcgtgcggccgcggatgctgtgcggatcgatacgacgggcaacacgctcgaggagtcggtcgctattttggaaaagctggtgcgggataccatcggctgaaaggggcatactaccatgtggttcggacggttcttgctgtggtttttcaaaccgctggcatggctcctgttcccattcaaaaccataggccgggagaatatcccggatacgccggggcagccgcctttggtcctctgctgcaaccacatttcggtgatcgaccccgttttccttgaaatgtgccagaaacgtcacgtctatttcatggccaaggaggaaatttttaaaaaccggctcgccacctggtttttcgccaagcagctcggtgccttcccggtcaaacggggagcgggggataccggggcactggataccgcccgccggatcgttgaggaggggaagctcctcgggattttcccggagggtacccgttcgaaggacggccggctggggcgggccaaatcgggcgccgcgctgattgcggcgcagaccggcgcctcggtcctgcccgtcgcgatcgccaccaaaaaccagaagctccgccttttccgtcccacccggatcgtgtttggccctcctctatctccggaggagctgcacctggacaatcccgaacatccggatctgcgcttcgcgtcccgcctggttatggacaggatcggggacatgattgcgcagaacacccgttaaaaggggggaggcgccatggagatcctggtggcgaaaaccgccggtttctgtttcggcgtgaacaaggccgtcagcgcagtctataagctgctggacgaaggccggacggtctgtacgctcgggccgatcatccacaatcctcagcttgtcgccgatctggaaaagaggggcgtgcggatcgtcggctcaccggatgacgtgccgcctggggcgatgctggtcatccgttcccacggcgtgccggcgtcggtctacgaccggctgcgggagcgggaggtggactatctcgacgcgacctgccctttcgtggctaaaatccaccgcatcgtagaacggcattcgtccgaaggatacgcggtcctcatcgcgggggatccggagcatccggaggtcatgggaatccgcggacactgcaggggcccgtcattcgtgttcacctctctggatgatctggagcggctgagccgaaatgaggcaattttaaaggaaaacccggtcgttttggtctcacagaccacgtttcagatggaaatatgggaaaagtgctcccaattcgcaaaaaaacactatacaaatcctttggtttttgatacaatatgtaatgcgactgccgaaagacaacatgaggcggttgctttgtcgcagaagagcgacgtgatggtgattgtcggcgggcgtcagagctccaacaccgccaagcttcgggatgtgtgccagcaaggctgtcggacgattctgatcgaaacggcggacgagctgtcctccggtccgtttgctggagcaaaggtcgtcggccttacggccggtgcctcgacccccgccgatattataaaggaggtactttcaaccatgtccgagattgtcaacaacgaagtccaagaaaacgagacccttcccacggcggaagaggcggccgctcccgcctcggaatcccccgctgccgagcaggccgcggagacggccccggaggctcctgcggaagccgtaccggaagcccctgccaaatcctttgaggaaatgagcttcgaagaggccctggaagcctctcttcagagtttgtctacagacgagagagtccgcggcgttgtcgtgggcattgccccgaacgaagtgcaggtcgaggtggtgggccgcaagcaggccggctacattccggccgacgagctctctgctaccggcgccaaccctgcggatctcgtgaacatcggggatgagctggatctcctgatcatgcgcaccaacgatcaggaaggcaccatcatgctctcgaagagacgggtcgacgcgctcaagggctgggatacggtcgtggccgcggaagcgagcggcgacattctcgacggcgttgtcaccgacgtcatcaagggcggcctgctggccgtcacccatggcgtgcgggtgttcattcccgcctcccaggcttcggccgtgcggatggaggatctctctccgctgctcaagcaggaggtccgcttcaagatcatcgaggtcaaccagagccggcgccgtgcggtagggtccatccgtgcggttgcccgtgaggagcgtaaggagaaggaagcggcgttctgggcgcaggccgaggtcggccagcgctataccggcgtggtgaaatccctgacctcttacggcgcgttcgtggatctcggcggtgtcgacggcatgatccatatttccgagctctcctggagccggatcaagcatccttccgaggttgtgaatgtaggggatacggtggatgtctatatccgtgatctggataccgagaaaaagaagatttccctcggctaccgcaaggcggaggacaatccgtgggagattttcaaggccaattatccgatcggctcggtggtggacgccaagatcgtcggcatgaccaccttcggcgcgtttgcgcagatcattcccgggatcgacggcctgatccatatttcccaaatcgcagaccgccgcattgaaaagccccaggatgagctgaagatcggtcaggaagtgaaagtgaagatcaccaacgtcgattacgacagcaagcgcatcagcttgtcgatccgcgcccttctggaggacggcgccgcagtcgaaacggctgcggaagaggccgtttccgaggaagcgcccgctgaggccgcggcggaagaatccgctgaataagagctggcggaaatcatacaataaagaggaaacgggtcggccgtttcctctttattatggacgatgtgggaggaaaagagtatgattgccattgcctgtgaccattccgcgttggaaatgaaaaacgaggtggaggccctgctcgacgagatgggccttgcctatcatgactatggaacctacacggccgagagctgcgattatcccgtcttcggagtccgggccgccaaagcggtggcggcgggcgagtgtgaacggggaatcgtcatctgcgggaccgggatcggcatttcccttgccgccaacaaggtcaaggggatccgctgcgccttatgcagcgaaccttattccgcagagctcacccgccgccacaacgacgccaatatgctggcgctgggcgcccgtgtgatcggaccggagctcgccaagagcatcgtccgcacctttttgaccacggaattcgagggcggacggcatgagcgccggatcgcgatgctcgcggccgtggaaaacggggaagagatcggatgaaagcggtttcctggaacgtcaacggtctgcgggcctgcctgaacaagggcttcgccgacgtggtgcgggagctggatccggattttttctgtgtgcaggaaaccaagctacaagccgggcagttggatctcacgctgcccggctatacctcgtactgggattacgcggaaaagaaaggctattctggcacaatgattttagccaaaaaaccgccgctttcggtttcgctcgggatcggggatgaggaacacgggcatgaaggccgctgcgtgacgctggagtatccggcgttttatatggtcaccctctattcgcccaactcgcaggacgggctgcgccgcctgccttatcgcctgtcgttcgaggaggcgctgcggcgctatcttgccggcctggacgcgaaaaagccggtgatcctctgcggagacctcaatgtcgcccatcaggagatcgatctgaagaatccgggccccaaccgggggaatgccgggttttccgacgaggagcgggaggcgttcggacgcctgctcgccgccggctttaccgataccttccgcctgctccacccggatcaaaccggggcatacagctggtggtcctatcgcttcaacgcccggcggaacaacgcgggatggcggatcgattattttctcgtcagcgaccggctggcgccgcgggtggtacgggcagatattgcctcctctgttttgggttcggaccattgtccggtcctgctggagctggcggactgatttggaagattccggctgtgggaggccgcgaggacgccctggtgattcggaaaggacggatggttttgaaggatctgccccgtgaggtcctgcatctgcagatgcaggcggccgtggaaaatttacggaaaaaccggatggatgcctatctggtctcccgcaaagaggatgtcgttccgcaggtgcgcgcgttgctgcatgccggcgattcggtggcggtggggggatcggagacgctgaaggagagcggcgttctggaactgctgcgaagcggggactaccagtttatcgaccggtacgctcccggcctgacgccggaacaggtgcgccgggtgtttctggacagcctctccgccgacgcctacctctgttcggccaacgccgtcaccatgcggggagagctctataacgtcgacggcaacggcaaccgtgtggcggcgctgtgttacgggcccgcttccgtcatcgtcgtcgcgggccgcaacaagctggtatcggatctcgacgaggccgtcagccgcgtcaaacgcatggcggcacccgccaacgccctgcgcctctcgaaggagacgtactgtgcccggaccgggcgctgtctcggtctcggctcgccgtcctgcaccgacggctgtacggtaccggaccggatctgcagcacctatgtcgtgcatgggtggcaacaggaaaagagccggatcaaggtcatactggtggaagaggacctggggctttaattggaatttttttcaaaatactggccgatccgacagcggaaaaacctctcttggatgaagcggctgttcccggctcatactatagatgcgggccgcggattgcatcgcgtccatggatggatttggaaaaggtttgtatttgatttttcccaaaatcatgctataataggaatgttaaaattcgtggggagttggatgagattggaaaaatacctgatccgcggagggaatcccctgtttggtgaagtggaaatcagcggagcgaaaaacgccgtcgtcgcgatcctgtcggcgaccctgttggccaatggcgtctgccgcattgaaaatataccgaatatcgccgacgtcacgaccagcctggatattttggaaaatctcggcgcggtggtgaaacgtgtcaacaaaaacaccgtggaagtggattcccgtccggtgttcagccataccgtgccgcacgatctggccaggaagatgcgggcctcctattattttatgggggcgctgctcagccggttcggcgccgcgaaggtcgcgatgccgggcggctgtaatttcggggtgcggcccatcgacaagcatttaaaagggtttatcgcgctcggggcggatgtggccccgatggaaaacggcatgatcgagctgaaggcggagcgtctggtggggagttctgtctatctcgaagcgtcggtgggggcgacggtgaatgttatgctggccgccgtcaaggcgcggggcgtgacggtcatcgaaaacgcggcaaaagaaccgcatgtggtcgatttggccaacttcctgaactccatgggcgccgacatacgcggggccggtaccgacgtcatcaaaatccggggtgtagaccgcctgtacggcaccacctattccatcattcccgatcaaatcgaggccggtacctttatggcggcggccgtggcgaccgggggagacgtgctggtgcgcaacgtcatcccgaagcatttggaatccattacggcgaagctcctggaaatgggggccgaggtggaggaatacgacgattatgtgcgggtgtgccgccgcggaccgatcctccactgcaatgtcaagacgatgccgcatcccggttttccgaccgatatgcagccgcagatcgcggtgctcctggccatggcagagggaaccagcatcatcaccgagagcatcttcgacaaccgtttccagtatatggatgagcttcgccgaatgggggccgacatcctggtcgacggcaaggtggccgtgatccagggcggcaagcccctgacagccgccccggtcaaggccgtggacctgcgggcgggcgctgcgcttgtcatcgccgggctggccgccaaggggacgaccgaggtggaagatatccaccatatcgagcggggctatgaatgcatcgtggacaagctccgccatctcggagcggatatcgaactggtccagcaggcggaaccgggactgcgtacggcactgtaagaatggaaagggtgtcttcaaatgcagcggtcgtcccatgggacgagagcatttgaagacaccttttgtttcaaccggccggaggaggggaacgcatgactgtcacatgcgtttgggagcatcatggaaaggcgtcgctcatatatgccgaccagtttccgggtgcttatacacgaggggcgaccaaagacgaggccttatccaaaatgccggcggaagtccggtcctacatagcatggaaaaccgggcaatatccgcccggctggcccgaaatccggatgatacaggagaacgcctcggaattggctattgaagacgcggacaccgacgtgctgttcgaccgggaaatcggggtattggatgagaaggcgtatattaccctcaaagccctggtactgaaatccgcccgcgactttcagcgtctgtatgacgccgtgccggacaaggaccgcagcgtattgccggaaaggagcaccttttacggatccgtaccgcgtacggcccggcagatgtatgaccataccaggggtgtgaacgcattttatttcgggaaaatccaggtacccgcggacgatgcgggacggatagacgattgccgcgagcgcggctttgcggcattggagagcctgcccggctatctggaaaaccgggtgtccgatgacgggtttggggaacagtggagcctgaaaaaggtctgccgccggtttatctggcatgaccggatacacgcgaaggccatgtaccgcatggcagagcggaccttcggccccggcagcgtgccggacatcttctgtttcggcgggatttagctcatactcaggatgaacatgggaaaggaccaggaacccttatggcacgattttgtccacttttcagcggaagcagcgggaactgtacatacatcgggacccccgaaggcggcatcctcatcgatgccggtgtgagcgccaagcggattgaaaccgcttgctgggatcgcgggatcgggatggacagcattcgggggatttttgtcactcatgagcattccgaccacacggccggactgcgagtgctgcaaaaacgcttcggcataccggttttcgcatctcccgggacacgcgccggactgatcgggggcggcgcgctgccggaagatgcggattgccgggcaatggaggaggccgtggaacttgcgggcatgatggttcggtcgttccggacgccgcacgacagccgggagagcacgggctatcgcgtgagcaccggcgacggccgtacactggccgtcgcaaccgacatggggcatatgacggaagaggtgcggacagccttgtggggctgtgatctggtgatgatcgaatccaaccacgatatccgtatgctggaaaacgggccgtatccctatgtcctcaagcggcggatcctagcatcgaccggccacctgtccaacgacgcttgttctttggagctgcccgagctgatccgccggggggcgacacggctgtttctggcgcatctgagcaaggacaacaattccccggagctcgcctatctgaccgcgcagtcagctctgacggaggcggggatgagagaggacatggattttgtactgcgggtggcgccccgcacagatttggaaccggttatggtgttttaaatgtgataacagtcaaatccggtggatctttatgtgcggctacatcctttctccgcgcggagaaaggatacaaagaagcgacaaacggggcttccccttgtaacctactgtgattcagaaaggaaacatcgcgaactatgaccactctgtatcttgtgcgccactgcgaagccatgggaaatatccgccggatttttcagggccacatcgatgaagggatcagcggcaatggacggcggcagctggaacggctgacggaacgattccgggatgttccgctcgatgccatttattccagtcccctgcagcgggctatgtataccgccgaggcagtggacggcgcacatggattgccgatcgtacaggatcggcggctcatggaaatccatggcggcgtttgggaggggaagccctggaaaatgttgccgttgctctgcccggtacaaagcttcaaatggaaccgtgcgccttgggatttccatccccggaaaggggaggccatgcgggaggtatacagccgcatggcggaggcgctgaccgagatcgcggcggcccatccggacgaaacggtagccgtggcgtcccatggatgcgctatacgcaacgccctgtgctgggccaagggctggcctattgaaaggctttcggaggtggcctggtgcgacaacaccggcgtgagtgtcctgcgtttcgaccgggaccgggtggagcttatattggagaacgacaacacccatttgaacgaggagctttccacttttgccaaacagacctggtggaaggaatgaaggcgcccagctccagagatcctagaagctgtcatatctcccctgaaaggatggcatggcatgaaggacaaagcgaacgagcgcctattgggcatcgatcttggaacggtgaggaccggctttgccgtgtccgatccgggcggcttcttggcctctcccatcgaaacggtaacggaacgggatctgacccgtctggctgaccgggctttatccattgccgccggacaggggaccgcccgggtggtgttgggccatccacgcaacatggacggctccaggggagagagcgcccgccgggcggaggagttcgccgcgctgctgactgaacgcgggctcgaggtgattctctgggatgagcggatgaccaccctgtccgctatcggttttcttaaccagaccaacacacggggaaaaaagaggaagggcgtggtggatacggtggcggcggttatcattctgcaatcgtatctcgattcccgcaaaaaccagccggccggatcctgaccggaagagggagtataaaactcatgggcaaactgctttgggtcggtctgggcggagcggtgggagccatctgccgctacctgatcgggcgtatcccggtccatctggattttccggttctgacattgctgaccaatatggcgggagcggttcttatcggtgtcgtgaccggtctggcgctcaggggcccgggactttccgatgccgctcttctgttctggaaaacgggtgtgtgcgggggattcaccaccttctcggcattttcactcgagtcactggggctgctggaatccggcaagccattctggggaggcctgtatatcctgctcagcgtcgggtgctgtatcggaggcgtggcgctcggccaggccatcgtccgcctcttcgttaaacccgtataagacgaaaaaacagggacccattataggcgtatgggctgaaaaagagagaagtcaaacgacgttgacttctctcttttctgtcggatgccctttcagcggcattcacatggcttttttgcaagatacagaatatatgtatccaggaatacgatccgattgcccgcctcgagaacagctttccggaggccgttatagaataggctcctgtaaggctcgggaatcacgatatggtcgcaatgtgtgccggcaaaggccacgtattcatcggcggtaaattcacgtctgccgccatattcccgtttttcaaaaccggcatatccatactcaggcgcgttcgtatacgggaaggcaccgtgcgcgtatgcggtttccggtttgaaatactgggaatagacccgctggatcgactgatacagcgcttcattcggcgttttgtaatcgcttttggtcagcatcatcgccagggtcccgcccggattcagcagctcaaaggtcttcgaaaaggcaatcttttcggggatccattgaatcgttgccgcagaatagatcacgtcgaatgtctggctgccgaagtcgtgggtgataaagtcgtcatgaatcaaatggaagtttggacgcccgccatacttgcgcttcatcgtttcggccagatgctcaccgagctcgatggcgtggtagccgcatcccgtatcgagtatggggccggtagcctgcccggttcccggaccaagttccagaacggttttgccggggccgattccggcgtactcgatcagatcggcaaacagttccgcacagtatcgcggcctgtatgtatcgaactgatccggtatggtatcgaacacttttcggaattctaaacccatttgttgtctcgcctccttgaagagctccacactggctttcagcggggatcatcccggtttggatttacaagcggggccgaacggaaccgaaaggctttcaaatatagcaggagaggccgtgccccgcctctgccgatgcaaacacggtatcgatgaccttcatgacccgcaatacctgagaaagctgcacggtcgctttcgcccggccctccagaacctcgacaatgttgcgataatagtccgaccaatcggattgtacgtcgggcagcggcagctccttggtggtatggacagggcggggggccatggtacgggtggggcccgcctcggtataaacgatatcgtcggcccattccattttttcatcggtgtctaacttcacgattttgccgtggcagccccagccctcgaccacggcagtgccgtcggttccggagacatgccagcggggcaaattcacaaaacagttcgtcgacatctcacacaaggcggacaggccgttttcgaaccggagcaggattttgatgttatcctccacctcgggagtgaaaacgctgagcagatgcgcgtccaccgatacgacaggggagtcggtcatatccaggagctggtccaccagatgcaccccccaatcgagcaccatacccccgccgttgaccttgtatccgcgccagccatgcatggcgccgcgggagccctgtacccggctttcgataaagtaagggcggccgatggtgccgtcggccaggatggttttaacgatgcgataatcccggtcccagcggcggttgtgatggacggtgaacagcttgccggtttcatcggcggcggcaatcatctcccgcagttcctccgtgttcatggcgacgggtttttcgcacaccacgtttttaccggcccgcaggcaggcgatgacaaggtctttatgtacatggttcggggtggcgacggtgacgagctcgacggagccgtcctgcagaagctcatcaagggaggcataggcgtataatccatcctcccgcgctttctccgcggcttcctcccggatgtcgtacgcccccttgaccagcagttccgggatcttttccgagatgcttttatggtgccagccgcccatcccgccgtatccgattattgccatggtatgcttcatgtgaacgttcatcctttcgatgagccgccaaagcccggcggcagccacttgttctaagacacttgttgacattgtatcacgaggaactgtataataccaatcaacaagttgtaaaaaccacacgattattgcggggcgatgagatggttccagtttatgacacaaaatccgatttatttcaaatcgatgtgggaaaccggatggatttccccccacatctccatctggacatggagcttttgtatgtccaaaaggggtggattgccgcgcaggcgggggacggggaatatcaggtgggggcgggcgaactcctatttctcatccccaatgcaatccatgcgtaccggactctgacgccgccggaagagaccggatatcttctcatcatggcgcagccgggctgcgcgggcgattaccagaaccggctgctcaccacctatccggtctgtcctcttgtgagggaggaggctttgcatgccgatgtccggtatgcgttgaacgccctgtcaaacggggggacaaatcaggaaagccaggatgtcctcaagctttttttccagttgatactggcccggattcttccggtgatggaatgggaaaaccaggaagccatccggtcccacagcctgacggcacaagtgatccgatatatttcccagcattaccgcgaaaatttatcgctggagacgctgtccagccggttcggcgtcagccgctaccatctctcccggcttttttcccggacgatccacactggattttatgcatatctccattctctgcgggtcaattacgccaaggggctgctgcaaaactccagtcttgacatcctgactatcgcgatggacagtggctttgaaaaccagcagaccttcaaccgggtcttcaaatccctgtgcggcatgacgccgaaggaatatcgccgggccgcttggggaatccggaaaaaagaggaagaggctgtggggagcccctgaatccggacatgagaatagcagaaacggacggacctctcaccggaagagaggtccgtccgttttcatatccttcaagggagtgggaatacgcgcgaggggggaggggttagaatcccaacccctgcagccagccgagcataaccttgggccattcgcgtgtcccgctgattcccgaggccaatccacagccatgatccccattttcataaatatccagcaggtgggggataccagccgtttccaatgcctcggccaacatggtgctgttttctaccggtacggcgctgtcaggccggcaatggaatacatacatcggcggtgtatccggacggacacccagctcgcccgagaaacgcttcgccagctcccggtcggacgcctcggcgcccagaaagttgtactttgagccgccgtgggtgtatttgctgtacatggatacgaccgggtagcaaaggaccgccgcgttgggacgggaggaagttttgtcgatggcgtctcccatctctttcccgtaatcgaaatgctccgccgccatacaggcgagatggccgccggc

SEQ ID NO: 3973 - DNA, 16115 bp, Unknown
  16S sequences of unknown bacteria
tgtatccctgcggatatggtcggtgatgatccgcagggatacatcctgcttcttgtccttgccataggtgacgccggacagctttgccacatgatccagaatccggtggacggtatccacatcaaacagactgtccacatcctgcatgatgcaggccagacgctcgatgcccataccggtgtcgatgttcttccgggccagaggggtgtagttgcccttgccatcgctactgaactggctgaacaccaggttccagaactccacataccggtcgcagtcacagccaggagcacaatccgggctgccgcagccgtacttttcgcctcggtcgaaatagatctccgagcagggaccgcagggaccggaaccgatctcccagaagttgtcctcccggcccaggcgaaccatatgatcctcctggacgccgatctcctttgtccagatgtcataggcctcgtcatcgtccagaaataccgatacatacagtttgtcctccggcatcttcatttcctgggtaataaactcccaggcccactgacaggcttcccgcttgaagtaatctccaaaggagaagttgcccagcatctcaaaataggtgccatgacgggcatccttgcccacgctgtcgatgtccagggtacggatgcacttctggcaatcggtgacccggggggccggcggagtgagctcgccggtgaaatagtgcttcagcggcgccataccggcattgatgagcaacagggaattgtcgttctggggcaccaggggaaagctcttcagccgcaggtggcccttgctttcaaaaaagcggagaaaccgctctctgatttcattgagtcccaatttttccatggttcttctctccatccttgctatttttcttccttttccacccggcggcgtaaaaaggctttttcgtgcacttgttttagttgaggcagcaccagacgctggtgggggtggtgagcgcaggtaagttcctgtccttcctcatccaaaagtctttccacctggaaggccaccggcgcccccacagggtcgatcagctccagcgcatcccccagggaaaaccggtttttctggagaaacaccggcccatagggcccctgctctcccagagacagggcacagacctcccaaggccgctgatatccaccgtcctccggccgctggctgtccgtatctccgaaatagaaaccggtgtaatattcccggtggctgaccttctccacttcctgccgcacccagtccggcaaaacatatcctgccggatctttacaatataggtcgatggccctgcgataggcattggcagtaatggcagtataataggcggttttggcccggccttcgatcttgaagctgtccaccccggcttcgatcagctccgggatgtgatccagcatgcaaaggtccttagagttgaggatgtaggccccttcctccccttcgaatacatccatcacttgccctggccgctgccgttccaccagggaatactgccagcggcagggctgggcacaggctccccggttgccgtcccgtccggtgagataggtggacagatagcaccggccggaataggacatacacatggccccgtggacaaacacctcaatggccagttccggcgaagtcttttcccggatcagggccacctcctggagggaaagctcccgggccagtaccacccggtgagcccccagcttgtgccaggcctctgcggcctgataattggtgatgttggcctgggtgctgatgtgccgctccagccggggagcgtactgcttgcacatctccagcacgcccagatcggcaataatagcggcatcggcccccgcttgctggagaaaatccagaaaagcaggaattcgctcggcctcctcactgcggggcatggtattcaccgtcacatacacccgtttccccaggctatgagccagcttgcaggccttttccagctcctcgccggtgaagttgcccggggccgtgcgcatcccaaaatccttgcccgccagatagcaggcgtccgccccataagcaagggcgtattccagccgttcaaagtccccggccgggctgagcagttccggctttctcatcccatctgctccttcttttcctgcatggccgccacattggcttcatgctcgctgtaggtctcggcaaacacatggctctggtcttccggatcggccacatagaagtaataatcatgattctccggctgcaaagcggccagaatggcaggcacgcccggattgcagataggccctttgggaaggccggtgaccttataagtgttataaggactgtcgatctccagatcctcataggtcaggttttccttgtgttcgcccagagcatactgcacggtggcgtcgatgtccaaatgggggaaattagtgggatcattcaatcggttatagatgactccggcgatggtggcctgctcttccggcagcaccgcttcccgttccaccatggacgcaatggtcagaatctgccgcatggagtagcccgactgctcggtcagctcccgcatttcggaagtgtacttgttgttgaaattgttaagcatggtgttgagcacccgcaccggattgtcattgatatagaactgataggtatcgggatagaggaagccttccaggcggttttcctccatgggcacatcctgaagcatttcatgcttgaagggataggtgttggccgtctcgatcaggtcctcggccccacacacccgggcatcctccaaaagctgagcgatctgctggatggtatagccttcgggaatggtcacctcggccacctcggtgtaggtggacacccgattgagggtgttgatgatctgaccatagtccatgtccgcattgacctcgtattttcccgaatcaaaggtcttgtcctcgttggaaaaattggcatagagcgtaaaggcccaacggcagcgaatgattccttcttccttgagcatcttggccacttccccatgggtggtgtcctcactcaattccagcatggccgtcttttccggcttgaccagagcaaacatatcgtttgctatgtagatgccgaaaccggaaataatcagggagacacccaggataaacaccaggtagctcaccgcatgcatcatactccccgcccggttcttccggcgtttttttcttcttttgcgagtccggggagccgggctctgctcatattctccgctggtacggctcatgatacacctcctattggttatcggttaagtcaacagagttttcagcacaaacagcacaagtgtgaccagcacgccgggacaaagcaccgagcgcacgatggctttgctgccaccgctgccccgcagccgtggcacccggcctttttcgatcaggttttccaggcaagaggccgccccatagatgctgaggaacagcaccgccgcggccagcatgacaaaataaggccaaataccgaaggccgcataccgtttgagcaaataactcatggccagataaaacaaattgttgaaaaaatgtccaaacaccgccggccacacagaaccggtgatgatggtcatatacccgaacaaaagccccgctgtgagaggccccagaaaattggccgtggagccatggatcatggcaaaacacagggccgaaatgaggatggccgccgtctgcccccatccttccagaccggaaagcaatccgccccggaaaaacagttcctcggccagagcgggcaaaaaggcgatgaccagcaccaaaagccaagtgggggtaccgccatactggctccaggcgttataggccgtatcctccagcaaagcgcctccggtgaaaagggccaccagataattgaggaagaaggacaaaagggacactgccaaagcagaaaaaaagacaaaaggggcaaagcgcagccggcttcccccaagacgaagcttcataggggattggccctttctccccaacagccaaaagaccagaagaggcaggaaaaatgccacgacttctcccagggccgccatcgccaaagggggcagccaccggttgttttccggcagcgcacccaggatgaacaaaatgcccatggacaccggcggcatcagagaatagatcagtggattcattctccatcccatcctttcccaaaggtcaggacccgggactgggtgcagatcagatccatcttctcgtcatgctcttctgtgggcacatggggaaacagcaattcctcatggcacaaggccgcccggaaaaaccgtcccttctgcaagaaccggtcatagaatccggcgccatgccccagacgggtgccatcttcgccgcaggccacgcaagggatcacggcaaagtcgatctcttccggctccacccagctttccccttccggcggcaccgggatgccgtactgtccctcttccagcttgtccaaatgagaaagctggcgggcccgcatcacgcccttgccgatgcacaccggcgcacacacccgcttcccgtcctgcaatgccatgcggaggaaagcaaaagtgtccggctctctgcccaccgacaaatagcaaaacactgtaccggcctgcctgtattccggcctctgtcccaatgcccgggcaaaggattcccctctcccccggacatcggcatcggaaaggctggccagccgggagcgtgcctgctggcggcattcttttttattcatccatggtctccttcttctcagttaaacagcagattgcaatagcctgccttctgttccagaagcttttctcctaccggtgtcaaaggcagcgccatagcaaaaggcttgggatcgttttgaggcagcaaccggcacagaccttcttcagcccctacctgatccaaagcagcagcagccagacgcaacgcatccggccccagggcttcacagacccgccaggcttctcccacaggctcgatacagccccaggccgtgatccggccgtcccgccgcagcaccagggccttgtccccataaagctcctgctgaatggaaaaatcctccggcgtgcgatccacggaaaacaaagatcccaaagccttgcgatacagttccgccacctggggcagatcttccggccgagccacagacaacaggccttcttcctccctgcgggccttgatctgccgttcttccacccaaaaggcagtgcggtagccaaagcgccggtaataatcaaacaaagagggctcctgaggaatgagcatcagcaggtcgatcccctgctctatgcctttttcccgcgcttcctccagcaatgcacctgccagacctttgccccggcaggaaggatgggtacctaccccatatacatagaggccctgtccacggttcttcccctggcgcagccgcaccggcaaaagctggagcatggcctgaatgtgttcttcctcacagagaagggtgttttccggcttccaaaccctttggaaaaaccagcgggtaaagcttttttctccgggaaagcacagatcaaacagcgcttccagctcgttttggtcttcttttttccccagccggatcatggcagaggctccatgcggtatttggccgtcagttccaccgggcgataggagagcttagcctttcgcagcccttcgatccccatatcttcctcccggttcacataggggaaatccatcccctcatgggcgatgaactcccggttgatcaaaggataggccccggggacatcggccatggctttttcgatctgcaccgtcagagcatcgctgcaagaagggcttcccatggtaaaggcagccatacgcccatccacataaagcaccccgccccgcatggccaagtcctcgtaatgctccagggcctgccacaccgcacagtgttcataaaccacggtatcggctgtatttgcatcgtgacgctcacaccacagatgatggaatttcaaaatctcatcccgatgctttgcagggtccagcttttcataatgccagttgttttcatgctcctgcaaaaaacgattgatgaaattccgcttggagtgaagctttttccctttgagggtggccagatcctcactgcggtaaatatagtcgaagttgtcccggtcctctgtaaaggcataccggccggggagcaagctttccacttcttccttctggtcctgggtgcagcccaaaatccgatagggctttccccgttccctggcatcctgggcgatgacttccagcgcggttttccggtcccctttccccacggggaacagataagtgagttcaggagcatcttctcccagggagagcatatacaaaaaatctccctgtatggcaaacaatgtccggtaccggcagcgccagatgaacatatcggtaaagcaccgctctgtcatgcgggccggttccagactgagtttttcttcaatctgcttcttgtcttctatggaaatttctcggaaaggaagcattatttcaccattttcctctttcagttttgatccattactgaccggcctgtcccagacgatagcgcacctgctcccagatcttctcatggatctgctccaccgtcaaaggtgtcccttccggagcgcaggagatgatctgccatccgtaacgccggcaaatttccagcgcaccttcccggcagcgggacagataatcatgatctttttcgtggatatctccctcattcccctggcgcttttgaagcaactggaatgtcaaattcgccggcatatccaggaaaaacaccaaagtgggcgcagggagtccaagtttattatactcaaaatcaaagagccaatccaaaaaaggaccggtctctttctgtgggagcttggcggcctggtgcaccgcattggatgtggtataccggtcgcagagcatcagcccacccttttgatggtagtcctgccaatcggttttataggaagcataccggtccaccgcaaaaaaggtggacgctgcataggggttgacgctctccggctttgtgccgaaggccccgcccagatacatctccaaaagggccgccgaaggctggtgataccggggaaagaccgctttgcgaaaatcgatctcttcctgctggagccgctgacacaaccgggcaaactgggtggattttcccgacccgtcggtgccctcaatgacgatcagttctccagccatcacttcaccccatacaactgacgcacttctgccattttgccgcagctcatctttccttccgggcaaggaccataaaggcaggccgggccggccttctggaacagatggggcgccaccttgcggcactcttccagcatctgccgggccacctcccgtatctcccactgggcccggttgcagcagcgcaggcggaagaaattataaagggaccgtgtatccatggtcatcatcatcttggtgcagcaagcattgggcagcacaaaccgggcgtcctcattggccatcttccgggccgctttccgagcttcctccggcgccattccctgctcttccagccgggcagcctgccggtctgtgagggccgcagccagctcatcatacagacgctgatcctccgccatcgccttttcaaagatctcccggcaatggggatcctctgcaatggagggaggcagcacatattcaaaggctttttcccgcacataccgctgggactgcacactgaaggacgcaatgcgatgacgggtgatctgggccagcaaagagcgggacacgccttcgatggcaaaggtgaagctggcgtgctccactgggctttcgtggccgatctccgccagcatatcgatgaagttctgggttttttcctcgtccagcccctcccagatggtgtccgcactggcggcggaataacacatccgggccgcggcggccaccagcttttccggctggggcgtatgagaaagcaaagtcacttttggcgtcatatcattcttcccccttgatgcgccagcggaaggccgcaaacatatattgaggcagtttcatcatgcgtcccagacggctgggctgcttgagcagacggtacagccactccagaccaagcttgatgaaaatgtccggcgcacgctccacttttccggcgtacacatccagagatcctcccagccccaccatcaaagtggcgttcagttcctggaaatgttcatcgataaaatactcctggcggggagagcccaggcagacgaacaaggcatccggatgggcggcattcaccgcttcgattgcctcactgtcctctttgaaatagccgtcatggcagccggccactttcaggccgggatatttcacctgcatccgacgggccgcttcttcggccactcccggcttgctgcccaggaaataaatactcttgcctgtatcccgcaaagcggagagaagattttctccaaactccaccccgggcacccgccctttcaggggacggcgaaggatgcgggaggcatagatcactccgatcccatcgggcagcaccaatcccgcccgagacacaatatcccgcagcttatcgttggtgacgcaggcctgggcgatctctgcattgggtgtgaccaccatgcatttgctccggctctggatctgctccatggcatagcccacggcctcatccatggtcacattgtcaaaggccacagccataattttgatacgaataaccgacatccctctctatatcaaatatacaccgcttattttaccctattttcccttttgacacaagggaaaaggtatacaaatatcctttcccacaagctctcccagccatggaaaagcaaaacagatccagtgcctggattgccgtacttttctttgcttccagcttgtacaaaacagattttgtcttttcagggtcttgttccccggctgaccgaccgacaatttactttcataccaatgaaaaaagcccgccatggatgcggacctttttctgcactctttagttttcccactctgacggctcttcctcgtccggcccttgcttcaatccctggaaggctatggacaaaaatccagccagcataatgcctcccagcagcgtcaccgaaagctggcccaggaaattctgaggggccagataaaaggcgatcccaataaagaaggaggacagattgaaccccatatggagcagaatgctggccttgaggctgtcggcgcgcaggcgcacatatcccagcaaaaggccgaacagcgtggcatagacgatccacaccagctgcccatgaacaaagccgaacaccagtccctgcagcagcaccgccagccaggcgggcatggccttccgcagccgggaaagcaccagcccccggaaaatcagctcttccaccagaggagcgaaaatggccaccgacaacaaatcggcccacaaaagagaggtgttcagtccttgggaagcctggttgtaagactccatcagctgctggggcaaaggcagaagctccatagcgccggtggtcagaatattgccgcaggcaccggccatcagcaaacaagccacctgacgcctcccgatgttctgtccgccctgtaccagatcccacaggggcatcccccgcagcttggccaaggccataataatcaaaatggtgagcacctgactgctcagcaaaatcactgtgctgtagtcgctggcaaaggcatcatacaactctgcagcccggtcgggcgccgtcgtttgaaaatagacctgcgcaccgatactggccaccaaagaacaagcaaactggaccgccagaaacagcagcacatagccgatggcccggcgaagatttcgtagtttttccatgggcatctcctctcaaagggaacaaaaagggcgcaaggcccagccttgcgccctttctctttctaatttagtcgaacaggggatatttttcgcacagcttgttcacttcgctgcggatataatcggccttgttctcaaagtccaccgcagccagcttaatcagctcagccaccttgggcatatcctcttccttgaagccccgggtggtgatggccggtgtaccgatacggatgccgcttgtgacaaagggactctccggatcgttggcgatggagtttttgtttgcagtgatatacacttcgtccagccgcttctgcatctccttgccggtgacatggaagttgcgcaaatccaccagcatcagatggttgtcagtgccgccgctcatcaggtcaaagccttccttgagcaacgcatcggccagagccttggcgttcttcacaacctgctcctgataagtcttgaactccggcttcatggcttcgccgaagcagacggccttggcggcgatgatatgctccagcgggccgccctgggtgccggggaacacggccttgtcgatctgctttgccagctcttccttgcaaagaatcatgccgccgcggggaccacgcagcgtcttatgggtggtggtgctcaccacatcagcataaggcaccggactcatatgcagtccagctgccaccagaccggcgatatgggccatatccacaaagagataagcgcccacttccttggcgatgtcggcaaagatatcaaagcggatctcccggggataggcagaagcgccggcgatgatcatcttgggcttatgctccttggccagcttgcgaacctcatcataatcgatggtctcggtttcagggttcaggttatagggaaccacatgataataattacccgaaatattcaccgggctgccgtgggtcaggtgaccgccgttggccaggttcatgcccaaaacagtatcgccgggcttgaccagcgcatagtaaacggcaatgttggccgaagcaccgctatggggctgcacattggcatggtctgcagaaaacagcttgcaggcccgctcccgggcgatgttttccaccacatccacacattcgcagccgccgtaatagcgtttgcggggataaccctccgcatatttattggtcaggacagtgcccatggccgccatgaccgcggggctgacgatgttttctgacgcgatcagctcgatattgcggcgctgccggttatattcctgctcaatggcctggcccacctccggatcgaactgcttcaccaaatccatattctctcgaaacatggcgcatccaacctccttattttcattcatcaaaggccgaaactttgattccattatatactcgaattgtttttatttcaactctttgctataatggaatccatcctctcattcccgctaaaattcctgttttcgggcatatttcacatcacaggatgaggaaaacagacttttcctcagtttcctcctttttcttcgtcgaaatatccaaggcactcccttggcgctctgtgcactttgcccgatcttttctgccgaacatggaatgagataccatatgacaaaatattttctctggacggtgaaacgctatgcggaaaaaagaacgcgcggctctgatcgtggaagccctgaaagaacattaccctgcctcctgttccctggtggcccggaaggattacgagcttttgtttgccacccggctgtcggcccagtgtaccgatgcccgggtgaatgtggtgaccaaagaactgttttcccgctgggacagtctggaagccattgccggagcggatctttcggagctgatggaagtggtcaagccctgtggactgtaccgggtcaaggccatggatattcagaaatgcgcccaggccctgctggaaaaccatggaggcaaagtgcctgacaccatggaagaactgctcaagctgcccggcgtggggcgcaagacggccaacctgatcctgggagatctgttcggcaagccggccattgtggccgatacccactgcatccgtatctccggccggctggggctgaccaaaagcaaggacccctatcaggtggagatggatctgaaaaagctcattgctccagccgatcaaaacgacacctgtcatcgttttgtccactttggccgggatatctgcaccgcccgctcccccaaatgcaccatgtgtttcctgctggacatctgtccccagggacaagggaaataacaaaccggacgccgcaaaagcctgcaagtaaaaagtcaatataatgccgtctttgcgcttctattgattggattttcccaccatacccctataaggagtgtcgcagatgaaccgaaaaaagattattacatatttcatcatcacttttgccatcacctatacatcctggtggggattggcactgctgacaaatctgaatatgatccattcctcgcaaggcctgtttccttttcttttcattctaggtggtttcgggccgacgattgccgctattttggtgttgcctgaaaaacggcccatatcagtgttgaaatttattttctcctgccagaaaaatagtttttggtatctgttattgttctgtgcaatgcagggagctgtcattggattttcctctatggaaatcaatccacagcttccttggtatgcagcaccgattgttatgctatccgccacattagtaagcggcggcaatgaagagcttgggtggcgaggcactatgcagcctgaactggaaaaaaagtttccgttcccaactgcgacattgataaccggctgcatatggatgacatggcacatcccgctttggtttataaagggcatgtcccaccaaagcatccacttcggtctgtattgcatctacggtttgattttgagtttttggcttgcaacgctttataaaaagacaacaagtgtgttctgctgcgcagtctttcacggattttcaaacctgatgctttcgatgtttgtcattaaagtgaattggcttttggtcgtgggattgattgcagcgcttgtgttttccatctggctctactacaaaaatacagaaatacagagacaaagttcgtaaaagcctgcaagtaaaagtcaatacaaggaggcagcctatggattcggattatgtttttctcacagaaaaagaagccatgtgggcggaaatgctgatggaagcactgcaaaaggcagatattcccgcggcttccgtcccggtatacggagcgggcctggtcatgcgggccggtgtgcaggagcggctccggatctatgtccccctggcgaataaacctcaagcggaagagctgctggaagaacttttccccgaaaaccagaaatgatctcattttggcaaaaaacagcccggatagaaacctgtccgggctgttttcattattttttctcgtaaacaattcgccattatgcaccgattcgtgcatccttctggcacagccggttgagaattgcggtggcttccgcccgggtgatccaatcaccgggatggaagtttccttctgcatcacttccctgcaagatcccggcctgatacaaaagccggatctccttggcgtaggtctggtcgtcactcacatcgggcggcaggatcgcaccttccaccggttccagttcctcttccggcagagcgcgggcaaagagataggccatctggctgcggctgcaccgccaataaaattcactcttcctttcaaaggggatgattccctccaaaatactgtaagcctgatagggagcgtcccaaggttccccgccagtcaggtccacaccatcatctgtataaatgctgcgcaccacactggccattttaatggcttcactgcaagacaagtactctcccggggcaaaggttccatctcccatgccatccatcaggcccagctcataggccccctgaatggtgccctgctgattcgccccataccaggcgttttcatccacatcggagaactgaccttgctgataggtccgctcctgaacaaaattgtccatcgaaccgcaagcggcaccaagcatcttgatttcctctgcaaccttggtcaggctctgtttacccagctgatcctttgccacgccgtctatattccactgccacagtgttccatcggtggccagaagggcgctccgggtcccaccataggccagctcggtaaagcgcagatcgcccgtatccaccaatgtgggttccggcagccggtattgctcttcctgaggatcgttgtcctttccctggtaatagccccacagataaagctgtccatcctgggtcagggctgcgccggaaaagcgatccagatcggcctgctgcacattccgcatcagccgggtgggctccatcacatagaagtcatccattcccagagaccgatgttcaaaattgccgccccacacataaagatctccatcttcggtgagggcctggcaggtgtattcatcacactgcaccgtgagtacatcggaaagaatccaacggggctctgcactgttcttgggatttccttctccatagccggtctcacccatggggcccatgccccaggtatacagttttccatctgctgtaacaagggcgaagacattggggccgcaggccacatccgcagcaaaccagttgatattttggggcgtgtcccatttttctatgatgggattccagtttgcatcatccccggtatacacattcccccagacatagaccccgttcatcgttatcgctatgccgttttccttccaacggtctgccttgagcacagggggcaggccctccttcttcacccactggccttcccacagatacaggctgccatcccgggtgatgatcaggtcatcatcgcaataggacactttgccaggggttgtcacttgctttgcactcccatcggcaaaggaataaagatcccctgcggggtccacaaaatactctgcatcaaagattcctttttgatccaaggggcggtttccaggttcctccggcggcttcggctctctttggagctgctccggcaccatcacgccggtggtcacctgcttgagatcccagccgacatcgtaaacccaactgatattccacagatatagcccgccgtcctgggtgagaatcagggtgtctagcccctgggccaccacatcggccacagcggtatcaccgcagtcaaccttctcggggctagagaaggaccattcatccatctcatgattttcataggctctgtcgccatagaatccccatatataaagctctccgctctcggtaatagcaatggcagatttataccagtccatactcactcgatccacatggagcatgattcgggttggctgccagatcttacctcccgaaagccccagagagctatcccagttttcaccccagccatataaagtcccattgttggtaatggcatagctactccactttctgctcactgccatcttcacattggaaagaatctttgttggcacagggctgtattgaggaagcccctctgcatagccattttgacccacgccccaggtatacagatcaccattctgggtcaccaaagtgaaattaccccctccggtggaaacctggaggccagcaggaacaccctccactttatgcggtgaggtgtactttttccagatcgggttccattttgcatcgtctcccatgtagacacttccccacacatagacgctgccattctctgtgacggcaatcccatgcgtctcagaaatatctgccgaaatcacaggaggaagaccctccaccttctgaggagcatcccgatccactgtatcacccaggcccaactgcccattgtgatttttcccccaggtgtacaggctgccatccgctgtgacggccagggtctgattcagcgattccgccacatggatcacattggaaatcccttctactttttcaaactgacactggcccgtgtatgtgtttgacccttctctcagctggccttcatacgccagggagttcccatgatacagatccccattctccatgacaaaataattttctgtgaccgtgcgctggttctgaaaatccagcgttttttcggtctctcccgcgccctgcgccggcaaggacgaaaacggcagcaatgtaagacaaaacatgatggccagcaacaaagaacatttcctcttcatacccatacctcctcaccataatgcagttatatttttctgtactaatttcaatatatcaccgccacatctaaaagtaaagagcagggagaggaaatggactgccccatcttgtgcggacagtacaaaaaagccccctggcaggaaatattaag

SEQ ID NO: 3974 - DNA, 18340 bp, Unknown
  16S sequences of unknown bacteria
gcctcggcggcgggcagctggcgggggatgtcatttcacttgtgtccgggattacctacgcaggcgtattcctgctcaacgatatgccggacggggatcccattgcgtcggtcttttggggggctgtcggcagcgtgctggcaggcttgccgtttatgactgatctgcctccgctgggaacggccggcgttgtcagtatgctggtgttgggcgtttttcagatgggcggggcatttttatgcctgacgatcggcctacgcactacgccgccggtgacggccagcctggtgtccggcattgagccggtgctcaatcctgttctggtcgcgctgttttacggagaggtgatggggccgctttcgttccttggcgctgtgattgtggtcggcggcgttgtgggatacaatgtcctgctgacaaagcgaaagggaaaagagacgcaggacgtgccggcgtgcagcggcaatgccgtttcttcggcgcccaggaaagaagacggaatcaaagtgccataatacggaagaacctataataaccgataaaaaggagaatgatcatgacttgctatgaagaactcaaggcccgtggactgattgcccaggtcaccaacgaagaagaaatttccaaaatgatcaacgaaggcaaagctgttttttatatcggctttgactgcacggcagatagcctgactgccggccattttatggctctgacgctgatgaagcgcctacagctggcgggcaacaggcccattgcgctgattggcggcggcaccactatgatcggcgatccttccggccggacggatatgcgcaaaatgctgaccaaggaggatattgcgcacaatgccgagtgcttcaagcgtcagatggagcgctttattgagttcggtgaaggcaaggccatgatgctgaacaatgccgagtggcttttgaacctgaattatgtggagctgctgcgcgaagtgggcgcgtgcttcagtgtgaacaacatgctccgcgccaaatgctacgaacagcgcatggagaagggcctttcgttcctggaattcaactatatgatcatgcagtcctatgacttttattacatgttccagcattacggctgcaacatgcagtttggtggcgacgaccagtggagcaacatgctgggcggcacggaattgatccgccgtaagctgggtcaggacgcccacgccatgaccattacgctcctgacggattcccagggcaaaaagatgggtaaaaccgcaggaaacgccgtctggctggacgccaataagacatcgccctatgatttctaccagtattggcgcaatgtggatgatgccgacgtgcttaaatgcatccgcatgctgaccttcttgcccatggaacagatcgatgaaatggacagctgggaaggcagccagctgaatcgcgccaaggagattctggcctgggagctgaccaagatggtgcacggcgaggaagaggccgacaaagcccagaacgccgcgaaagcactttttgccggcgcgggcgacagtgccaatatgccgacgacggaactgtcggaggaaaactttaccgacgggtcgatcggcatcttgcatctgctcactgcatgcgggctgtgtgcgtccaatggcgaagcgagacggcttgtgcagcagggcggtgtgtctgtaaacgatgcaaaagtgattgcggcggataccatgtttgccaaggaagcttttgccggggacggcgtgatgatcaaaaagggcaaaaaggtgttccatcgggcgcgtctgaacaggtgagtggaaaggaaacagagcaatgcaggaaccgtatctggaatacattctcagcgatgagaaaacacttcttcagccggagcgcattctggcgcttttgaaagaaacagcttgggcgcggcactacacgctggataccatcgatggaatcatccggaactccctttgcatgggcgcttatgtcaggggaatgcaggtgggctttgcccggtgcgttacggatgcgactactgtattttatctggaagatgtggtgatccatccggagcacagaggctgcggactgggaaaagcgctggtgaagacgatccttgcgcaggaaccgatttgtcggctcaaggggattctggtgacagatgatgccttttctctctatgagccgttcgggtttgtgcgtgatcgggagatttttatgaaaaaagtgtccccgctgaacgggtgcttttgaacaggccggctgtcagagccggttccgaacacaacaatcagagactacggagggaagaagatggatcgttttcagaaagtatatagccaggggacgattgaagtgatggaaatctggaaagatacggaaacaggcgtccattatgtgtttcaccgaaatgggaatgctgcgggttttactccgttgcttgatcaagatggaaaaccggttgtggcattgtaatctctgtaggttttacttgcagcaaaaggcagtcatcatagcgaagatgactgccttttgctgtttttattttttgtagagcgggaatgaaaaaatcaaataaaaattctttccgctgcttcaaagtgaggcagcattgtcatttaccggttggatttcagcttctctttttgggaaagcctggacgcagccgacggatgccaaaaccaatccccataccagctaaagagatcgaacgtgaaatttcgatgcgcgtcaccctgctgctacagctggaaggatgatacattatttggcgatggaatgtgttaattttttcgcagcaggaaagacagtgcgaaaaatatggctagatagagcgtgattgtagcgccggcgctggcgccgatggcaaaggaagtcattacgccggcaatacctgccgccagcgctcccagtacggaaagcagatggtattggcgcatgttgcgggcgatattccgtgccgccgcgccgggcagcaccagcatggagttgataaccatcagtccaatccaggacatggacagcgtgaccaccacggcaatggccacggcaaacagcgcttcatacagcactacacggatgccgcggctgtctgccagggcaggatgaacgccggtgagcagcatgcggttcagggcaaacagccagaatacggctacgcccaccagaatgcagaaaagcagtccgatttctgccggcgaaacgctcaaaacgtcaccgattagaagggcgttgaacttggtgaaactttgtccgcccagggtggcgatgaaaatgcccaaagccacggcggtggaggaaaacacgccgatgactgtatcgctggacatgtgggctttgcgctgcacgagtgtgaacagcagggcaaacaccaccgcaaacacgactgcgcatggcgtgggggcgagcgcgccggccagcgtgcccacggccatgccggtgaatgcgctgtgtcccagtgcgtcggagaaaaagctcattttgttggttaccaccatggtggagagcaggccgaacagaggcgtaatgaccagcaccgccagaaaggcgtttttcataaacagcagtccgtctgcctgcgcccaggtgaatggcagaaggctgagcagggaataccagagttccatcattttgccctccattcctgtcccaggtggaatgcttcacgaaatgcgtcggaattgagcacaacacggggcgtgccggcggcttgaatggtgtcgttaagcaacagcactttgtccacatacggatccagcatggtgaaatcgtgggtagacatgaggatggacaaatcgtatttagtgcggatctcatcgagcatatccagcagcagtttcatgccatcgatatccacgccggacatcggctcgtccaaaatcagaatatggggtaccggctccagagccagagccagcagcacccgctgcagttctccgccggacagagcgcccagccgccggtcgatcagcttttcggcatgaacgcgtgcgaggcactggatcactttttcccgcaatgctttgggtacgggtaaaaatacaggccattgggagatacaggagacaaacagatccagcacgctgataggatcactgcggtcaaagaccgggttctgcggcacatagccgaaggtgggctgggctttgtcgccggtggccagaaagaattccagcttgcctgtgtggggaacctgccccaaaatggctttgagcagagagctttttcctgcgccgttgggaccgatcagggctacgatctggccgcagtggatgtgcagatccacatgctcgaacactgtcgtttcgcctagctgcagtcccagatctgtggcccgcaggcagcaggcgccatggcagccaatgtcgtggaggcctggatgcttgtcaatgcgcattcttttgtaaatcgtttcattcttcatgttcgggcagttcctctccgctcagaccttcatagattactttcaggttgttgtcgtctcgctggatatagtctgtgctgtcgtccggactcatcagcatgctcagtgtaccgatggctacgccggtttctcgttggatggctttcgctgtggcgtctgagccgttttcttcgacaaaaatcattggaatatcatattcccgaatcaattccacaatttctttgatgtctttggcgctggcttcgctgccggcctcttcttcaacggcgcgcaggatggtcaggccgtaggcatcggcgaggtaggaaaaaccgtcgtgaaacgtgatgagcaactttttctcctgaggcagtgcgtcgaagtgttttttccatgttaggaaacgctcgtcgatgcgggaacaggacatacgcatgacggcgcggtagtcgtcgtaattaccgtaaccgagagcggaaagaccttgggcggcattgtccatcatttgcatgtaacgctccgggtcaagccagagatgggggtcataatggtcgtcctcgttttcggcggcactgtgatcgtggttgccatgtcccgtggcgggaagcaggctgatgctttcagagcagtcaatcaccggcacgtctactgtggaaagagcgtccgccataaaagcttccagccctgcgccgttgattacgattacatctgcatgttccagtgtgcgcatgtcctctacggtcagcgtgtagtcgtgcagacagctgatctgctgatcgaccaccaaagtgagtaccacatggtccataccgccagtcagtgctgcaagcaactcgtagacggggtatgtggtggcggcaatggtcaaaacgctgtcgtcttctgccgagggagccgtttgacgtgctccgcagccgctcagcaagagcgaaagtgagagaatggcagcggatagaaacgggaagatataatgctttttcatagcggtatgtgctccttttatttattacggctgcgctgtgcgttgttcccggtccgcacagcaggcggcacaggtgccgtaaaacatggtttttccaggattgatggcaatctggtgggcctgggagagatggcggtaaaggtgggacagttctgcgcagtcgatgttcactacactgccgcactgttcgcatttcatggagaagaacacatcgttctttttgggaaggtagcgatagcatgcggcggctacgccatcaatcgagacccgggcgatggctttctcggcttccagacgatccagcgtacggtaaatggtagtcaggccgacttttcgattttgcttttccaattcttcggaaagttgctgaatggtgatataagcgtctgccttttttcggatgcattcaaggatgcactcgcgctgtctggttttgtaggtttttccggtattcatggaaatagccccgtttcgttgaatttgaaaacttttttcattttatgcgcagagaagggatttgtcaaggaaaatgaaattgtttttcaaatttctcctgtgctccttttatattcctgacgcaactgcgccggaacccgtacagattaatttgccagaatgtacgaagcagcgctggctaccatcgcagtgatctgctctgtgcgggctttttcgtgctgtttcccttggaacagcacccttttctgtctgccagaatgcagtgaaagggcagccggaaaatcgactgcccttatggaggaagtatttgtttgtactgtgtactgctggatccaacgaaatcattattcgatttgcgatgcaattgtacttagtgcagaagcgatttggcttccaatattgccgcttgcctcaatcattgcattacccataagtacggctcccataataatcgcagctgcaatcacaatgctaccaattaaattttgatactctttcataactttatacctccgtaaaattttgcttgccgctctgtttgtcaagaaaatgcagcgcaagacaatgaataaagctgcattttttagcctgttaacgaccagatttacggtagctgtatgggggaagagacttgtgttaggcaggttccgtatttaggagatggctgcaggaaatattgtaaagcggtttatgcataatagttgatcaggcagcctgccagaataatgtcgcgctcttcccgggtaagacccggcagatacagtgtcacggcagtttctttgccgccttggcaaagcgttgcggaaatttcctcgtccgtgccttccagcagggcacggatgccggggatatgcacccggtcgccgctttgtagatgatactctttcaaattcggcagaatgaacgggagcatgccccagttgaccacattggagcggtagcgtttggtggcgtaatcctcggcaatgttagcgcagccgcccagcacacgctggcaggaggcggcctgctcgcgggcggaaccgtcgccaggccgcatggccagcaccaaggtgcccagacccgtcgtggctgcatcatgtccggccagggcttccgtgagagcctcgctgtgctcgcctctgcggcgtgccagctccagttccttcaccgctttggctcgggggacatattggggatctttccggctcagagtaaattcggacaggcgcacggggttggaacggtaagacgacgtttcgcccgagggaattaactcgtcggtggtggtcacaggatcgtagattgcggcggccacggtgagcagcagattttccggcagggcgatctgctcaggccagtcggtgatgttagggccgagaatcagttctgcgtcgctttcaggcttgcctgcaccatagtaaacccgcgccttgtaggagctgtcgtcgaattcgtacagttcctccgctgtgtctgcgggaacacaatccagttccgtggcggcggtaagcacaccgccgttcagagcagtcgccgcaatggaccgggcatccatcagagccacgtaggatacctgtccgtcggagggcttggaaccttcgcggttggggaagttgcgggtggagtgacggatggagaatgcgccattggcaggtacgtctccggcgccaaagcagggaccgcagaaacaggagcggatggaggtgcctgcactcatcagcgcagcgatggcgccgttttttgtcagtgcctgcatcacaggcatggagccggggtagcaggaaagccagaacgcaccgttgccggtactgtggctttttagaatgtccgcagcgcgcatcaggttctggtacgttccgccggagcatccggcgatcacgccctggtccacacagaactggccgtctttgatcttgctcagcagcgatggggcgtttttcacgcccagctgtttttcggtgtccatgtccacctgatgcagaagatccgtcagattggctttgaaattggcaattgtaaaagcattgctggggtggaaaggcaaggcgatcatcggctcgactttggacagatccagctcgatcaatttgtcataatatgcgccgtcggctggcagaagttcttggtagtccccggcacggccataagaagccagggcgcggcgcaccgtttcgtccgtctgccagacggaggagaggcaggcggtttccgtggtcatcacatcgattccgttgcggtattccatggccaaggccgaaacaccggggccgatgaattccagcacggcgtttttgacgatgcccgccgggaacgtttctccgattagggtcagagctacgtcctgagggccaactccgggctggggcgcgccggtgagatacacggcgatcactttggggtaagcgatgttataagtctttttcagaagctgccgggccaactccgggccgccttcgccgatggctaccgtgccgtaggctccgtagcgggtgtgggaatcggaaccgataatcatcttgccgccgccggcataacgctcgcgcatataggaatgaatgacggcctggtgtgcgggcacaaactcgccgccgtattttttggcggcggacaggccaaatacatgatcgtcctcgttgatggtgccgcccacagcacacaggctgttgtgacagttggtgaggacatagggcaaggggaaagcgcgcataccggaggcgcgggccgtttgaataatgcccacatatgtaatgtcgtgagacgccatggcgtcaaaggtaatttcaagagcatcgctgtttccgctggtgttgtggctttgcagaatgcggtaagcgatggtaccctttttggcctcggcaggggaggggagaccggcggcaggtccatctgcagcggggatcagcgcgccgccgcggaggtacatgccatcggagtgaatattcaacatgaaaaatcacctgtctttaagtaggataccttgtattatagcaaaaagaggactttcacacaatacttggttaaaaattcctgccggaataggatgtctggacagtattggaagggtatggtagaataaggccaatcaaacctaaaaaagaaaacagagaaaggggatgtacatatgggtaaactggatggtcaggtagcgctgattaccggtggaacgaaaggaatcggcgaggctgctgtgcggctttttgtgcaggagggggcccgcgtggtgctctgtggccgtgcgcgacaggacggagagcgtatcgccgcagagttgaacggcggcggcacacagcgagcggcgttttttgcgctggatgtggcggattatgaaaactggaagcaggcggtttcttttgtaaaagacacgttcggcaaactgaacattctcatcaacaatgccggcatcagtttccgtgaaacgctggcagaaacaacgccggagagctgggaaaagacgatcgcaaccaatcagaccggcgtgtattacggtatgcagctttgcatcgctgccatggcagaaaacggcgaagccggcgctgtcgtgtccacagcgtcgattgatggcgtagtgggcgacgcggacttcttctcatattgcgccaccaaagctgctgtgcaggccatgacccgctgtgcggcgctctattgtggacaaaaaggcctcaatattcgtgtcaatgctgtggcgcccggctatatcctcacgcccatggcggaagaggatgcccgccagaacggccagagtattgaagagtattgccgggagtttattgccctgcatcccatcgggcggttaggcacaccggaagaggtggccaaggcctatctgtatcttgcctgtgcagattctgcttttgtcaccggcactacgctgatggtggacggcggctacacggcgcagtgagcaacgagtggatctgaaaaaggagctgcagcactttacaagtgctgcagctcctttttaatatgcggagatcagatttgtttgtgatgccgtgcacaccaggcgcggttgatggcagagaggatgccgcgcagcggtgcgaggttgatgttatgatcaataccaacgccaaatacgtcgttgccatcgtgatcgcgcagctggatataagctacagccatggaatcagagccgtcggaaatggcgtgctccttatagtctacaaaggtgaaacgatccatcttttggccgtggatggcattaaagaatgcgtcgatggggccgttaccctcaccggatacatcaaaagtcgtgtcagtgtgccgcagcgtgccgcagaacttcacatgagatctgccgtctttgcccgtagtttcctcaaaggaatggcgcagcagttcataaggataggaagcgtcaatataattttctttgaacaattcataaacgcgctcggcgggcagttccttgcccactttgtcggtttccacctgcacaatatgtccgaattcagcgtgcatgactttgggcaggtcgtagccaaagttatgctgcatgacaaaggctgcgccgcccttgccgctttggctgttgatgcggatgatcggctcatattcgcggcctacgtctgccgggtcgatgggaagatatgggatctcccaataagggctctggctctctttcatatactgggtgcctttgttgatagcgtcctgatggctgccggagaaagcggtgaacaccagctgcccggcgtagggctgacggggcggcaccaccattttggtgcaccgttcgtacatctccttaattttgttgatctgggagaaatcaaggtgcgggtcgatgccctgcgtatacatgttcatggccacggttacgatatccacgttgccggtgcgttcgccgtttccgaacagggtgccctccacgcgctcagcgccggccagaagagccatttctgtagtggccacgccagtgccccggtcgttgtgggggtggatggagatgatggcgcagtcccgggaggggagatggcggatgaagtattcgatctggtcggcatattgattgggcatgctgccttccaccgtggccggcaggttcaggatgatcttgttttccggtgtagcgccgatggtttcaatcactttctgacaaatcagtgcggcgttgtccatttctgtgccggagaaactctcgggagaatattcatagcggaggttcatacctttggcaatgacgggttcgctcaactcccggatcaatttggcggcatccgtggcgattttgatgatgccgtccatctccatgtggaacaccactttgcgctgcagggtggaggtggagttatagaagtgcagaatcacatttttggcaccgtcgatggcctcgaaggtttttttgatcagatgttcacgggcctgcaccagcacttggatggtcacgtcgtccgggatcatatttcgttcgatcagggtgcgcagaatttcgtattccgtttccgaggcggaggggaagcctacttcgatttccttgaatccaatatccaccaacgtctggaaatattccagcttttcttccagattcatggggtcgatcagggcctggttgccatcgcgcagatccacgctgcaccagatgggggcatggtcgattaccttgtccggccaagtgcggtcgggaatgtattccggatggaacggaatgtattttttgcagccttcgtacatcatgataaaaaactcctttcggggggcatgaaaaaaacgcccccgactgtttcagtcaggggcgtgtactaacgcgttaccaccctggttcagcctgcggttacccggcagaccctcatcggcctccaacaaggcctgagcatataacggtgctcaccgtgcagccctacgcgtctgtttcggactgccaactccgggaccagttatccattggatcgtttctgctgccttgcaccaaccgccagctctctgaaagaaagagaaaccaatctttttcccttcatcgtctttgatttttatattatatccgactctgttttttgtcaagaggaaggcgcatattttctgcggcagaaaaagaaaaaagaaatacttgacagaaatgaaagcgatctatataataaataaagttcatcggggtgtggcgaagtttggtatcgcgcatggttcgggtccatgaggcctcgggttcgaatcccgacactccgaccaaaaagaaagacacaacggaagttgtgtctttcttttttgcttttggcagatgggatactgctgggatatagtcgataagctgtaacagacatatttcagggataaaggcatacagtagaacatcaaatattttccaaaggaggcggggcgtgttggcggatctgcgttacagtacggtggcggaggattatcgaagcggcaagggccggctatacagcgccggccgggaaagaacccggagaaaagatgatgccatgggccgtggcgaactgctgcgctggatacagctgatcgtatgtgcatcgatttttctcgctttggtggtagcaaaaatcaatatgccggcgcgttttgaaagcctgcgcgctgcgttctctgcacaaatggagcacagtgtggattatcgggaggtattcagtgcagtgggacgggcggtgagcggagaggagagcttgcaaaaagtcgccggagatgtttatgccgaggtgttccaccccgcagaagtagaggggcaggccgtggaaactacggtcacagtacccctttcagacatcagccagcaagagccggtaaacgccttgctggctttttcacggcattgggatgactgcggcacttggctgcagcgccagggtgaacgttcttctcgtcaggaattggtggcagaaaagggtgcggaaacggcagaaagcgcactgccgccgggggctgcatctgcttccgaaacgcaaccggaggaggcgcaggtgcagacagccccggccgaagaggtgccggaaggagtcattatggaacagtgcgtgctgggaatttcctatacgacgccggtgtccggctggctttcctcgccattcggctatcgggagcatcctgttgaaggggaagagaagttccaccgtggattggatattgctgcccccgccggcacggacatcggcgcttttgcggatggaacggtcaaagcggtgggcgagagcagttctttgggaaagtatatcatgctcagccacagtggagggctgacgacgatttatgggcattgcagtaagatcacggccagcggcggtgcagtggtgaaaaaaggagaaaaaattgcggaagtggggagcacggggttagccacaggcgcgcatctgcattttgctatgcagcagaaagatgtctacttgaacccgatttattatgtcacattggaagaagcgccgtcggactaaagcggggcggattgcggtcagcccttttttctttctgctgctggctctgtttgcggcagtggatcggcaaaggctgctgtttccgatcttgtcggccgcagcgctgcatgaggcggggcaccttgcggtactgcgtctggtgggcggacagattgagcagttcactttgacgccttttggcggagaactgcgcatccggcgcagtgaatggctttcctacggaagggaaatcgcttccgttctggctgggccaggggtcaacttagtgtgcgctttggtgctgggtcgcgcggcggcggagctttcctgggagcggggctatctgctttcgggtatccatatgttgctggcgctgttcaatctgctgccgctgcggcaactggacggcggcagagcgctgtatctgatgctttcctggctgctggaccctattacggcggaccggatcggacatggggtcggctgctttttcctgtgtgtggcgctgctgctgaccgccgcgttgcagggggcagtggggctgcagctgccgcttgtcgtactggaattctggttcgttttgtgctggtgcgcagaaacaggtattgtcaaatcacgtctttgcgggtaaaatgaaacgtaatattatagaaataggagcgttttatctgtggagaaacgactggagcgcattttgccccgggtgcagaaaccggcgcgctatgtgggcggagagtacaatcaggtggtaaaggacaaagcgcaggtagatgtgcgctttgcgttctgttttccggacacttatgaaatcggcatgtccaatctgggcatgcggattttatatggtgtgatgaataatatagacggcgtttggtgtgagcgggtgtttgctccctggccggatatggaggaggaactgcgccgagcgcagattcctctgtatgccctggagtccggcgacgccgttcgggaatttgacatccttgggttttctctggggtatgaaatggctttttccaatgtactcaatgtgctggatctggcaggtatcccgctccatgcctcggagcgcacggccctgacgccgctgatcatggctggcggcacagcctgcttcaacgctgagccgctggcagaatttatcgatttgttttccctgggcgaaggggaagatgttacggtggaaatcattgagctgtatcgtcgggctaaacgcgaggggtgggacaagccccgcttcctgcgtgcggcggcacggatcgaaggcgtgtatgtccccagcctgtacgacgtttcctaccatgccgacggcactgtcgccgcgattgaggccagagacggcgcgccgcaggtggttaccaagcggattgtgcaggatatggacaaagcttattttccggccaaaacgattgtgccttccacggaggtcatcaacgaccgtgtaacgctggagctgttccgcggctgcatccgcggctgccgtttctgccaggcgggatacgtttaccgtccggtacgcaaccgcagcaaggatttgctgctgcaatatggggtagaagccctgaaagattcaggctatcaggaaatgaccctttcctcgctgagcaccagtgattataagccgcttaacgatctgtgcgacggcctgatggaatattgtgaggccaacaaagtgcatctttctctgccatcgctgcgggcggacaatttttccatggagttgcagcagcgcctgtcccgagggcgcaaggcggggctgactttcgccccggaggctggcagccagcgcctgcgcgatgtgatcaataaaaatctgacggaggaggatctgcttcattcctgccgcattgcgttcgaggggggatggagttccgtcaagctctactttatgctgggattgcccacggagaccgacgaggacattgtggaaatcgcccgcattgccgaccacgtggtgcatacttggcgtgagagcgcgccagacaagcgccggggcgtcagcgtcacagtgtctacgtcctggtttgtgcccaaaccccacactgcttttcagtgggaggcgcagattaccaaagaagaatatgagcgccgcgtgcagctgctgcgggacaatattaaggctaaggcggtatcgtataagtggcacgattccgacaccagctttttggaggcggtgctctcccgcggcgatcgccgcattgggcgcgtgctggaagcggcctggcgccggggggccaaaatggatgcctggcaggattattacaatttggatctctggatggctgcttttgaggactgcgggcttgatccggctttttatgccaatcgtgtccgtccgggagacgagatcctgccctggtcgatgatttcttccggcgtttcgcagaagttcctgtggcgggaacgccagcgcgcttatgagggcattaccacgccggactgccgcacccagtgcaccggctgcggagccaactgcctgattgggggaggaaagtgcgatgtctaaattacgtttgctgtttgaaaagcaggggacggcctgctatatttcccatctcgatctgatgcgtactttccagcggctttttttgcggggcggcatgtttgtcaaacactctcaggggtttcatccgcatccgatcatgtccattttgctcccattgccggtggggcagagcagctgctgtgaactgctggattttgaagtggaaagcgaagtggatctggagacgcttcccgctttgctgaacgcagggtgcccggaagggctgcgggtatgcaaagcttatgaggcggtgcgtccggtgcgggatcttgcttttgtggcggcggatgtgaccttgctgtacgaccgtggtgtgcccttgggggcggcggatgctgtgcgggcacttttttcccggaaggaagtactgatccagaaaaaaacgaagcgcaaagctttggccgatgtggatctgatccccttgattcgctcttttgaactggaagaggaagagaggcagctgtgcattcatacgatcgtctcggcgcagaaccccggactgaatccggcgctgttggctgtggctgcggaaaaagaattgccgcagtacgttccagatttttcactggtacggcgaacagatgttttggatgctgagggaaagtcgtttcgctgaaatcttgaaaacagtctgctttgtcaaaaaatgaaaataatgcttgcattgggagcgagtctgtgataaaatatcccagtctaaaagggcggtcctctgtcgtgctgcgcattttttaaactgtgcagccgagaaagcggcatgaacgcctatacttgaggaggaacatatccatggatttgatgcaggcactgagagaatctcaggtcagagaaaatcgccccgaggttgccatcggcgattttgtcaaggttcacgtgaaggtgaaagaaggcagccgtgagagaattcaggttttcgagggcaccgtcattgccaagaagcatggcggcgttgaggagactttcaccgtccgccgcgtgtcttacggcgttggtgtggagaaaattttcccggtcaactcgcctattatcgacaaggtcgaagtggttcgccacggtaaggtccgcagagcaaagctgtactatctgcgcggccgcgtgggcaaggctgccaaagtcaaggaaaagatctgatattgatttttaccgcaaaaaagaggagcgttttgctcctctttttttgtttttgaaggcatacaggctgtccctatagaaaaaatctaaaaaacgggaaagaacctctttcttttgaaacagaaatcagatataataataaactattgtagtatggttatcgatcagcagcgggaggaacgaaaaaaccgtgggccaagagacacagacagagcagaaaaagcggatacatccgccccggcgggagaaaacaggcgcggaagcccctccgctgtggctggatctgctgcatgcattggtttggtcggtggtattagtggcgctgtgttttaccttttttgtgcgcattatctgtgtggaaggtatttccatggaaccggccttgcggcagaacgaccgagtgctggttttgtctaccctctggcacgctccgcagaatggagatatagtggtgtttcggaaggacagttttttgagcgaagcagtgatcaagcgcattatcgccacggaagggcagacggtggacattgattttaatacaggtgcggtgacggtagacggcacagtgttggaggaaccgtatatcaaggaacctaccctgactgccggagacataacgtttccgttcacggtatcgcccggctgtgtgtttgtgctgggggataatcgcaacgccagcacagatagccgtcagagtgtattgggggaactggaccgccggtatctgctggggcaggctgtctgtattctcattccggggccggatgaaacgggccgaaccgattggagccgcattggaggggtgaagtagcatgcaggatctgcattattttccgggtcatatgaaaaaaacccagcgggctatagaagaagccatcaaaaaggtggatgccgtgtgtgaaattttggacgcccgcattccgctttccagccgcaatcccgatattgacgcactgacggcaggcaagccgcgcttgatcgtactcaatcataccgatcaggcagacagtgctaaaacaaagctgtggagcgcctatttccgccgctgcggctatgcggtgatggaaacggcagccaaaagcggtgcgggcgtgaaagaatttgtgcctgccgtgcgtgcgctgctttccgaaaaattgcagcgctatgccgaaaaagggcaggccgggcgcacgatccgcgtgatggtcgtaggaatccccaatgtgggcaagtccacctttatcaaccgcgtggcaggcaagatccgtgccaaggcggaaaaccggccgggcgtaacccgctccaatcagtgggtcaatgtgggcggcagcctggaacttttggatacaccggggattttgtggcccaagtttgaagaccaggctgcagcgttgcgtttggcgtttattggagcgattcgcgacgaggttatggatctggaagaactggcctgtgcactgatggaattcctggcccgggattatcccgcctgtcttttggagcgctacaaagtaagtccggaaa

SEQ ID NO: 3975 - DNA, 14354 bp, Unknown
  16S sequences of unknown bacteria
ataaaaatatataatatctaataatgataacctttatgaacaagctataaaaaagatgacaccaaagaaaagctgtgataatataaaaatatattttagtttcgtattaaggagttcttataaagtatggaaattataatgttaggaacaggaaatgccgtagtgacagaatgttacaacacctgttttatactaagtgagaatagcaattattttttggttgacggcggtggaggaaatacacttttgcggcaactgaagcaagccggaattccatggacacaagtaaaagatatatttgttacacataaacacattgaccacttattaggaattatttggatgctgcgtatgatatgtcaaaatatgaatcgtggcaactatacgggagaagctaatatttacgcacatgaagaagtaatatcccttctaacagatatggcagaaaaattgctggataaacaggaaacacgttttataggtaacagactgcatttgattactgtgacagacaaagaagagcgcatgattttaaacagaaaaataacattttttgatatacactcaacaaaagcaaaacaatttggcttttgtattgagttagaccatggagaaaaattaacgtgttgtggagatgaaccgtatcatgaaagtgaacgtcaatacgtggaaaacagtaaatggcttttacatgaagcattctgcttatactcacaggcagatatattttcgccttatcaaaaacatcactctaccgtgaaagacgcctgcgaattggcaaataaaatgaatgtaaaaaatttgctgttatatcatacggaagataaaaatataaaaaatcgaaaagagctttatacagcagaaggaaaacaatattatcagggtaatctttatattcctgatgatttagaggtaatagaactatgatataacaaaacaaatataacattgaatgcagcacatattatcgttccaatatgtgcttttttatatttcacaaaagcagaaatacataaatcccaaaaatctccgcaaactatagaaaatcatattatggaggttttatatatgcatcacgaaaataccaatttattgaacgaagtatctaaagcgtctaaaatgggcatagatgccattaacattcttttacccaagattaaaaaggaagatttaaaaaaagaattaaaagaccaatgttcagaatatcaaaaattacaagcaaaagccaatgaggcaatgtccgaatataacgttacgccaagtaaagaaaaaatgatggaacaaacaatgctttggggttccattcaaatgaacacactgctggattcctcagaacagcatattgctgaaatgatgattaacggcacaaccatgggaattatcgatatgaccaaaaagttaaatgaactggaacagcccaaagcaaaagaaaaagaaattgcagaagaatttatagaaaacagtcaggcttacattgatatgtggaaaaactatctataagttctgttatcctccctcttcccttgatttcattaacattctttattataataataaggattaacacagcaaagtaatgagggaaaacaatggcattattaagcgcaagcggtttagaaaaatcatatggtacagacacgatattcagtggtgtttcctttgaaatacaagaaaacgaacgaattggtttggtaggtgtaaacggaggtgggaaaacaactctgtttcgactgctgaccggctcattaacccctgataacggaagtattgctcaatccaaacaaaccaatattggttatatggagcagcatgtctgccgtgattccgatatcagtgcttatgctgaagtattaaacgtattctcttctttgctggatatggaacaagaactggagtatttaaaccaacaattacaaagtgcatcggacaaactgagtgatttgattgaacaacatgcagttttaaacgatgcctttctacataaaggcgggcttacctttcgcggacgtacccgttctacgttgctcggtttgggatttagtgacgaacaaatggcaatgcccgtaatgtcactaagcggcggacaaaaagcaaaattgcagttagccaaactgttattgtctgaagcaaatttattgttgttagacgagccaaccaaccatttggacatttcttcagtccaatggctggaggattttttacgttcctacaaaggcgctgtcttcgtcatttctcatgaccgttattttttagaccgtattaccaaccgtacttttgaactggaacacggcaaacttaccatatacaaaggaaattacagcacctatttaaaattaaaagcagaacacaatttaaccgtacagcgcaattatgacaataccaaaaaggaaattgaccgtatttacgggattgtggagcaacaacggcgctggaatcgtgaacgcaacatcaaaacagctgaaagcaaactaaaaatgatagagcgcttggaaaacactttggaaaaacctgctgatgaattagagacaatggagtttcactttgacattcaaaagcgaggcggtaacgatgttttaaccgtaaaagatatttcgttgtcttacgattcaaaacctgtttttaaacatgttaccatggatattcatcgcaaagagcgcatttttttaattggtcccaacggatgcggtaaaacatcactgttccgtacgttattgggtatgcaatctccggacagcggcagtattcaatttggtgccgatattgaaaccggatattatgaccaaattcaagccggattacatgaagacaaaactgtactggatgaagtatgggatagatatccttctatgacacagacagaattacgctgcggattggccgcatttttattttttggcgatgacgtattcaaaccgatttccgcattaagcggaggtgaacgcgctcgtgtcttacttctgattttaatgctttcaaaagcaaattttttaatgctggatgaacctacaaaccatttggatattcagtcttgtgaagcgctggaatctgcattacagtcctatgaaggcacattgcttatcatctctcacgaccgctattttatcaataaaatggcagacaaaatttatgctcttacgccaaacggaattgagcaatatattggtgactatgacacttatttggagcatcaaaaagttcagcagcaaaaacaggaaatcatcacacctaaagtaaacgattataaactgcgcaaagaacgggagtctgaactccgcaaaaaaagaactgctttaaaacgtacagaagaaaaaattgaccaactggagcaagaaattgcaaaattggagcaaacgttgctgcaacctgaaattgccagcgattatcaagctgctgttgaaattaccgaacaaatgaatgcatttaaagaagaaagtgagcagcttctggtcacttggagtgagctaagcgaagaattggaacaacaaatataaaaatagcaggagtaaacggatactcctgccaattataatgcagcggatactgcaaattcttccaaatcttgtaacaccgcatctatttgctcccgttccacttggtggttgggcgttccaatttctacagtaagcggttttgttaaatccataccaaaaataccgattaaggactttgcatcaaccttgtaacgctttgtggtaaggtgaatcgggcagcgatatttactcatcgcagttacaaatctatttactttgtcgccattatccaataaaattgtcgctgtttccataatgaccctccataaacatgtatattcgtttcagtaaaactgttcttttaaccatattatcattaaaatgaaatagaatcaatatgcatagttgccatatattgtttcaatttattgaccaacaacgcatatcaaaagaaaattgagaggtatccatgaaagtttctaccattacattaggctgtaaagtaaatcaatacgaaacgcaagccatgctgaatcaattgcttcagggtggtttttccgcatgccaaacaggcgaagatgctgatattattttactgaactcctgtaccgttacttccaccagtgaccacaaagtaaaacagacacttcataaagcccgtcgagagcatccgcatgcggttatcgtattaaccggctgtatgcctcaggcattccctgaactggctgaagacctgaccgatgcagatattgtgcttggcaacagcaatcgttcttctttacttcctcatattttgcaatatttatctacgcgtcaacgaattattgacattgtccctcaccaaacaaaagaaaaatttgaaagtatgtccgtagaaaatttttatgaacgtacccgtgcttttattaaaattcaagacggatgcaatcgcttttgctcttactgcattattccttatgcaagaggaagagtacgctcaaaaccattggacgatttaattgctgaagtcacccaattatctgaaaaaggatataaagaaattgttctgacaggaattaatctttccgcatttggacaagatatcaacttacatctttgtgatgctgtggaagcagtttgcgccataaacggaatcgagcgcgtgcgtttaggctccttggagcctgaacagctcagtgaagatgtcattattcgtctttccaaacaacaaaaactttgtccgcaatttcatttgtcattgcaaagcggttgtgatgaaactttaaaacgtatgaatcgtcattacacgacagaggaatacagaaccattgttcaaaatcttcgtaacgcatttgacaatgctgcaattacaactgacattatggtaggattcccgggtgaaacagaagaagaatttatgcaatctctggaatttgcaaaagaaatttctttttccaaagttcatgtattcgcatattctcagcgtcccggaacaaaagcctgcaatgcaccgaatcaaatcacaaaaaaggtgaaagaaacacgcagcaaacaaatgatgcacgtaaccaatcaaacaaaacaagcatttttaaaccaacaatgcggtacgatacaagatgttttggtggaacgcgaaataaataccaatttatatgagggttatactgcaaattatacacctgttcaattccattcagacaaaaatctgtgcggccaacttgttgcagtacacattacaaaagcaaacgaaaatgattgttacggaataccgacaactgcatgaataccattttcactatatcacatatcaaatcataaataccgcgaaaaaaggactttcacttagaaaagtcctttttatatagcaatcgcattaatttaataattttactgcattttgtacttcttgttctgtctgctcatgatttagataatcataggaataaaacataaaaccatccccttgagcttctctccccgcctgaatttggtcggctataatggtatccgatttctgccaagtacctccgtctacatcagaacctgctttatataatcccaaaccgaaatataatttaatggatggattggtaaccaaatctctccattcttttaccgccgaaccaaacggcagcacttgatgctcaaaatttacatataattggggacatatgtaatcaatgtatccctgcgtactgcaccatgttttaacatctgctcccatattcaaacaattctgtaaattgccttgcggagaaattccaaatactacttccggttttgtttgtttgacctctgcatatacttgggaaaccatagcgttaatatttgcctgcctccactccaataattccataggaacgccgttttggcttgcttcttctttataagcatcgtattccgcttggtcaaagacactgtcctgcgttggataaaaataatcatcaaattgaattccgtccacatcataattctgaacaatctctttaactccgtctgcaatatactttcttacttccgtatatgcaggattaaaatatttgccactttcatattcgactacccacctttttttagattcatcttgactccattgtgtataagggttattctctgccagttcactcggattggtattgagttggattctaagcggattcacccatgcatggatttccaaaccgttttcatgtgccgctttcaccatatattccaaaggatcgtaaccagggtcttgcccttgtgtgcccgttaaaagatgtgaccatggaaataaagaagaacgataaaaagcatctccaaacggtcttacctgaacaatcagtgtattcattcctttttcctttgatgttttcacaatctcatcaaatttcttctgaaaagcagcctcacttttatcactttcactgctcatagtcaaactcataaacggtacccatactgcccgcatttcttcctcttcttccgctgtattgctgacaataggttctgtattcgtttgttctgttgctatactgcttatttgtgaagatacagtctgttcctcattattcacaaaaagaggcaccaattgttttacaataatagagataaccaatacgaaaaccaacacaatggctgctgtaatctttggatagttcttcattaacttaatcaaaatgcattccccttatgtttcaattctgcaatacttctgatacgttcatagttaggacaaagccttatgctatattgatagtaacgctttatttaaaatatgcgtaaaagctgaaactttggagaagtaaaaatgaaaattttttggacaactctcatcatttatttggtcattatgaatatagctgcaatgagtatgaccattattgataaacgacgagcaatgcaaaaacattattacaaccgtatatccgaacgagcattgcttttcactgctctatttggaggtgcaccattgatgtatcttacaatgctgagtattcgacataaaacaaagcataaaaaatttatgattacactcccaatgatttgtatcgtatgggcgactatcatcattctattattattaaagccacctctgccttattaatataaacaaaaaagagctctgccacgtggtagcagagctcttttttatgataattgttccaatcgttctctaaatagctgtgcggcatattttgcatccaaatcattgggatgcaaagctgcaactttgtgtcttaatttcttttcaggcgttaacgcatgcggattatccggcggcaagcttttaaaacgttccaatagcttagggtctacgggaccttgacataaaaagctgccgattaatgtgcacccttcccctaacatggcgttggcattttgcatagattgggagccatgtgacgaataagcatacgcacctaacgtgccaaacagtccaacaggttttcctgtaatttgttcaatacaatgtttcgcctcttcattcggctgcgctttatctacccagtaaccaatcagatacgcatctgcttgaggcaggctctccatagttttgatatctgtaattgtaatctcaaaatcgcttagttcgttggcaatactatatgccaacttccgtgtatttcctgttttggaagaatataaaatgcttactttcacaccgaactacccccttaacattctcaaataattgtatatttcttcaacgacaaaatcagttccgtactcaccgcacagaggcagatgatttgctataggtgtaaatccgggtgacggataagatacacgcagtttatagttattttcttttgctacatgtaatgaaataccgtctgcagcaataaaggtatcttccaacgattccaattgctgaattttgattgtttcatcttcacaatatacaatggtttcatcaggttcatttactgtttttagggagtgagaacataacttgatagttggagtcatacccagttcgccctcaaagaattgagataatccctttgccaaatgataattgcctaccactgcaaatttcagtttctgatttggattcattcttgaccacattttaatgcgtctcaaatccatacttttttcttgtatgtccgcaatcaatttcggagaaacagattctccaatagaggcagccacctgttccagccattttaatgtgccttgatatccatacggcatacctgtgacatatggggtttcacaacgttcctccaatatttttgctgccggtaacgcctcatccctgatgacaatattcactgcagcagaacctgcatgacggaaactatccaatgtactttcacacggaataatttcgtgtgcagtccaaccaaaagcttcttccattaaacggcagacttcctttacatcagacttcatgcgataactgtccatacctgcacccaaaatattgaaagtgcgtggttttacttcctgcgttttttctgccaacgcttttgtaatggaagtcaaagcaagttgtaagccatagctgtaatccccaacaaaaccgccttggtcaaagggaatcaatttagcagacacatcgttctctaccacacggcatatcccgttgatatctgttgcaatgacagaagtaagagaagaccccatcaaaaacatacaatcaggatgtctctcaccatcaagttcaataatcgcttcttcaaaacgagcagtatcacccatgatgatattatcttcatcaatatgcgtacaatataaattaccgcgcattggaattccaaattcagaaatggactccatactatagtgggtagtaccggaaggacccagttccaatattacgccgtctttaatcgtaagcaatgtccataacaatcccatacggtcagacggtgttggcaaatatcttacaattcctgtctcagccacgttttacgcctccctgtttcatcatttccatcattgcacgcatgctttccggaatttggttcggcgctgatgctgcatttacaaatacggaaaccacttcttctgttaattcaaagcctaattttttagcggctttgtccaaagtaagctgtgtaattcccttttttatcaaattcattggattttcatgtccaatataaaaggttggttttaaaatatcgtacaatggctgcaacggtgtaatatttgcagactttgttatgtacgggtcataccctgcatttttaatctgctcaatataacattgttgttcttcaggtatctcttttgtttgaaccaaaagaggtttcatacctaagctgaccaaaaaagcaatacattcaaatatgggtaaagttgtattaccgtaaataaaactttttccgtctaacgtctttttggcttctgctactgttgccaaagcatgctgatatttctcttccaattctttgggaaatggttttcctaagtaattgaataaatctttgtaagcatgatatacagcatcaggactacaaaaattataaaattcaatgtaaggaatcccaaagcgtgtttgcattttctttgccaacggtaacgcaatggcattggtaacaacgtttacctttgctgctgaagcattggccacatcagccacggtacattcatcagaaggtaatttcatatgaacgcaaatatcatggtcttgtaatacatggacaaattctgttttttccaactctccaaaacggtgacccagaatattgattccatctacttgttcatcacaaggttccattaactctgcacaagcagtcaatacgcgttccattccttgcatgtgactttcacagcggaaatgttcagtatgtactgtaacaatcggaataccaagttcatctgaaagtacatcaccaaccgaatccacatcgtctcccgtaatttcaaccacacaagtagtaactaggaagatagcggaaggtttgcgttcctgatacatttgacggatacctgcttccaatttctttgcgcatccaaatgtaacatcatgttggtctaataccaaagagacacaacgcccatccataccgccaaagctgtcatatcctaaagagaactttttcgtataataagtacattcatcggtacctattacaatcataagtgcatccgttacaccttttaaaatcagtgctgaaccaaataaaggacagtgcgcaccgggaaaaactgtttttgccagaggttttacatctttgattgactccacttgagataatgttttaagtgactctaactttaccaaaacaaaaagtcctttctgtaattagtttatatggcatagtccgtcataacatataatagggcaacgtctgccttcaatgggaataattctgctttccacaccgtaaacatctcgcagcatttcaggcgtaattacttcctgcggagtaccatgcgcatatttttttccatctttaatcacaacaacttggctgcttacttccaaagcttgagaaatatcatgcaataccatgacaattccaatccctgtctctttgttcagcttttgcaccaattccataatttcaatttgatgctggatatccaaataagttgtcggttcatccaaaaacagcatttcaggtttttgcgccagtgctacagaaatccaaacacgctgtttttcaccgcctgacaatgcaaaaatgctgcgttttctcatatgagaaacactggttgcctccatagcccaatctacaatttttttatcttcatcagataatctttgaagaaatttttgatatggcattcttccaaagccaaccaattcttctacggtaatgtccggcggcatggtttgctgctgagataaaatagcaatttttttcgctacctcttttgttggcatagtatgaatgctgtttccatcaatttcaatcacacccccacattttaaaatacgcgtgagtgcttttaaaattgtagattttccgcatccattgggacctataaacgttgtaatatcatgtttatgaattacaacatcaaaatcgggaaccacaattttatcatcataaccaatttttaaatggtttgcacttatttgcataaaaggttctcctttccaatatggtcattatgctcttgcttttctttttctgcgcagcaaaaagaggaagaatggaccgcctactaccgacattacaataccgacaggaatttcaattggagctactatggttcgtcctatggtatctgctgcaagtaccacaaacgcacccagcaacaaagacgccggaagcatcaccttatgattggaaccaacaagcattctggtaacatgcggaacaatcaaaccaacaaacccaatcatacctacgacagcaacggtagaagcagctaaaaatgcggataccgcggaaagcagtacgcgagtcaaattgacacgggtacctaagtttttcgccatatcatcgccaagctgcaatacatttgcacctttgatacacaataatgccaatacaataccaattgcgccgtaaatacccatggtctgtacttgataccaagattttccggaaagactgccgtttaaccaagagagcacaccttgtaagctgtcagagttcatgagagttaaaaaggaggtaacgccgcttaacatggtattaatagctacacctgccaaaataattcggacagggtcagcaccccttttccaagacaataaataaatcagtacacaagcaccggccgcaccaacgaaggaaaaaatcggcacagaagcggtagctgtgggaaataccaaaaagatgatagttgccgccgtactggcgcctgatgaaacaccgataataccggggtctgcaagagggttttgcataaccgcctgtaataaagcgcctgcagcagccaaacacataccaatgataatcgccagtattactcttggtaatctaaggtctataataattgtatgtactgaactgttggcatcaaataaaccgttaaaaatttctgctgttgaataatttacactaccaattcttaaagctaaaatagctaaaacgaaaattaaaattggcaccacgataaaaaaaacactgactttgattgcatgtttctgttttttattcatttaaaacaacctatttctaattgtattgctctaattggttcatcaaagaacgaatgtcatcaataatgttaataccggaagattttgcataaatgcttcctaagtaaacaactttatcattttgaacggcacttaattggttccaagtctgagggttatttgcaaattcttgttcgtaagaagtttttaaatcatcacctgttttggttgttggagaaacagcaaacaacaaatcaggatttgcaacgattaagtcttccatactcaattgtgcatttgaagtagcttgaccgtctttatccgaaatgtttacataaccaagtttttctaacatatcgcctaggtaaccgccgctgccttgcatatatgatggtggataagagaagaggataccaacagatttaccgccgcttttctctttaaatgctgccatatcggtttcaaggtcagtaaatttcttcataatagcatcagtttcttcttttttattaaatgcttcacctaaaatttgtacttctgttttgatatcatcatattgcactgttggacctgcatttacatagtaacaagcaatgccttggctttctaatgtattgccgtatttttctttatttgtgctggaaagaataacaagatccggttttaaagcaatgatgctttccatatcaatttcattcatgccgaatggaagacgttctgccttcaaatcatccggccattcagtaatagaggagtttggaatagcaaccatgtccacacccatttcgtacaaagtcataacaggacccgctgtcataacaataatacgttccggtgttttttccatttttaagctttcaccaaattgttcttgtaatgattcaggatatttgatttcaaatccttcggattgctgatttgtagcagaaacagcagtagaagttgtatctgtccccgattctgttgagccaccggaactggaacaacctgaagctaccattaaaattgcagctaatgcagccgcaacaccaataacaccttttttcattttcatttctatttccccactttcatcatatctcttgccaaagcacgataaatttcacacatttcagattcaggcaatgcttctaaaacagtgcagccttgattttccgcaatttgaatatctccgcatcttggaatggttgccacaattgatgtacctatttcttcacatgcctttcttactatttcatcttcgttttcaatatttttcttatttaaaattaaaccttgtaatttagcataacctcttttgccaaaccctttaattgcagttgcaatattattggctgcaaacagagacatcatctcacctgatgatactacatacacatcctgcgcatatccgccgcgaattggcattgcaaaaccgccgcaaactacgtcacccaatacgtcatacagtacaacatcaggctgatacttttcaaaaaattgaagttcttccaatttttcaaatgctgtaataatgcctctgccggcacaaccaactccgggagtaggaccacctgcttcaatgcatagaacaccgccgaatccggtaaatacaatatcctctactttcaaatcatccccctttgcctttatttgttccaatacggtgggaatccctttgccacccatcaaattttttgtggaatctgattttgggtcgcaacctatctgcaccactttataaccttctttgctaaatgctgcagataagttggacgttgtggtagattttcctataccgccttttccataaattgcaattttcttcaaagcgctccccctaccaaagttagtcttagctaactattgatgaaaataaaagagatcctccaaacgatttagaatgattgatctcatcagttagctttcgctaacctaaataatagcaaattttatttcccatgtcaatatatttcccaaagattttgtacacattttcatattgtataaattgcatatttcggtctcattgtgtcaaaaaacgcaaaaaagcaagggagaagttttttcacttctcccttgcttactaaagctatgaataatagagcagctacagctatttattaaagagaactctatttgcggttatctctgctttttacctttggaaagcatatataaaagcactcctgccgcacatatacttactgctgcaataactgcaaccatactgtttgtatctcctgtccggggactctccattcctcctgttccttccatattccctgtttgtggagtttctcccggtgtttgcggctgttgactttgagcaaataccacttttaccgtcactgccgctgacggcatttggaatgtatattgat

SEQ ID NO: 3976 - DNA, 4044 bp, Unknown
  16S sequences of unknown bacteria
gcattggatatcccttttcgttaggacaacggtttatatgcgcggacaaacactagcacgccctgaaaaatgggtctggcctgctggccacctcctttctcggcgccgagaaaggaggcaaagaggcgccaagggagtccccccttggaaccccaggccgtcagccggctttctttttaggaaagccggcaggagcgctgacaccggaacgtaagggaatacagagaggggcccgagaccccgggggactgggctggtcataaatctatacgtatacaccgtacttatcgacccgtcacattttttcaggaggggagtatatgaggaaaaaagcggcgattgtactgatagccgtttgtgccatatcggtgatagccaatatcgttttactggtccgtttgcatgatgtgaaaacgaaatcggtttatgaagaggagctgacggtgtccatcgtgagcgcccagcgccaggcacaggactatttgcagaatccctccgccatggcctatcagtatcttgtcggagacctgtgcgtgattcagagaatggcctcgtccctgcagagccgggactatgatgctgtgcggcgattatacgatctctgtgttacccgccccgcgttcatacaggagcatatggacgatttgatcgaaatcctgaacatcatggaagggtcttacacccatccggatatcagcaatcgaattgaccggcttcggaatgaggcggaaaacgggggatagccctatttcacacagatggaaaagatgaaaaaggatgaccgcgggtcatcctttttttatttctcgaagtcttttggaaatgcgtcgagcagacgctcgaggtttcggacggtttcctgatccataaaatgctccacctgctccaccagggataactggccgcccgtgtgattgagccgctggaaaaaacggaggagcacatcgtgccgccaaagaagataggcggcgatttcatccccttttttggtcagggtgatgagtccgtatttttcaaactgtaccaggccgagctcccgcagccggccgaccatcttagagaccgaggagggacggacattgagcttgtcggccagggcgccgacccgtacatacccgtgttcctccatacagcggccgatcatctccaggtaatcctccatcgactcggtgacctcgcccacgttgtgcatctggtagcctttgagtgtgtggaattccatgccgaaattgtcgcccaaaaaatccgcctcctttttgtgtccgggaagagcccgtctgcataagttggtagcaggaaacagaatttccgggtgctaacaacacctacgatacagcttatgtgaggagatgaaatttatgaacggcagagaaccggaggcggtgcggctgagcatcgtccccgagggaaagaccgtgaaggtacgggagctgctgaccaccggcagcatgcgccgccgcctgctggatatgggactgatcgaggggacccgcgtctcctgtctgcaaaagagcccggccggggacccggtcgcctatctcatccggggggccgttgtcgcgctgcgcagcgaggattcctcccagatcctggtggatgggcttctgaactgaacccctccccttttacatccgaagcccgcgggcttcccctatcgaattgcgaacaggagaggataaacatgggtttaaccgccaagtcgacgggaaaaaacgcagcggacgggggccttgtgattcacaaggcccccggcggcagggtgatcgccctggccggcaatcccaacgtgggaaaaagcacggtcttcaacgagctgaccggcatgaaccagcacaccggcaactggccgggcaagaccgtgacaaatgcacagggggagtgccggtttcagggcacggcctacaccctggtggatataccgggtacatattccctcatggcgcattcggccgaggaagaggtggcgcgggatttcatctgtttcggggagcccgacgccgtggtggtggtgtgcgatgccacctgcctggaacgcaatctcaacctggtgctccagacactggagatcacccgccgggtggtcgtctgcgtcaacctgatggacgaagcgaagaaaaagcatatcagcatcgatttcgaccagctttcgaagaacctgggggtgccggtggtgggaaccgctgcccgcagcaaaaagggcttggatgacctgatgaaggcggtggaagcacagagtcggatcccgctgcaggaggcgttcgtctccccggcgtttttaacgtataccaagccggtggaaaatggcgtctcgctgctgctcccccttttggaagagacggtccgggaccggctcaatccccgctgggtggcgctccgccttctcgagggggacgcggaaatcgttcgttccatcgaccggtatctcggcgtttccctccgctccctgccggggatggcggaagcgctggaagcggcggcggattgcctcaaggaaggcgggctcgagccggaacggctgggggatgtcctggtatcctgcatcgtcctgcacgcggaggagatgtgcagcgatgcggtgttcgtcgagtcggaaaagtatgcggcccgggatcgcaagatcgaccggatcctcaccagcaaggcgaccggcatcccgttgatgctgctgctcttatgcgtgatcttctggctgaccatctcaggggcgaacgtgccgtctcagcttctgtcggacggcctgttctggatccaggaccggctgaccgacctgttcaccgcccttcacgctccggaatggctccacggcgcgctggtgctgggggtctaccgtgtgctggcgtgggtggtgtcggtgatgctgccccccatggcgattttcttcccgctgtttaccctgctcgaggacctcggttatctgccgcgggtggcgttcaatctcgacaagtattttaaaaaggcctgtacctgcggcaaacaggccctcaccatggcgatgggcttcggctgcaacgccgcaggcgtggtcggctgccggatcatcgattcccccagagagcgcctgatcgccaccataaccaacagctttgtcccctgcaatggacggttcccgaccctcatcgccatcatcaccatgtttttcatcggcgcgagcgcgggattcgggacctccctgctctcggctgtgctgctcaccgcggtgatcctgctgggaatcctgatgaccctgctcgtctcccgccttctctcgaaaaccatcctgaaaggggtgccttcctctttcaccctcgaactgccgccctatcggcgtccccagatcggcaaggtgatcgtccgttcgatttttgaccgcaccctgttcgtattggggcgggcggtcgcggtcgcggcgccggctgggctgctgatctggatcatggccaacgtgatggtgggggatatgagcctgctggcgcattgttccgctttcctggatccctttgcccgccttctcgggatggacggcgtgatcctgatggcttttatactcggcttcccggccaacgaggtcgtgttccccatcatcatcatggcctatatggcgggggggacactgaccgatatgggcaatctgtcggagatgcacaccctgctgacggcaaacggctggacccctgtgaccgcggtatgtaccatgctgttttccctgatgcactggccttgctccaccacctgcatgacgatacacaaggaaacggcaagcctcaaatggacggcggcgtccttcctcatccctacggccgccgggatgctcctctgttttctggtatcctccgtggcgaagctgtgcggcgtcggctgacgtggagaaaatgaaagaacaaaccgggaggcgccgaaggcggcctcccggttatagctttaccgtcgaagcggcgtatggtccggtgcttttcaggcgaatatgtatccagcggcgcggagagcatcaagcgggcctttataaacaggaggagtgaaggggaaccatcggccggatccctcttctttgtcagtataatcatcaca

SEQ ID NO: 3977 - DNA, 22215 bp, Unknown
  16S sequences of unknown bacteria
aaaatcgagattttaactcgattttatataattgcatttgctaatgcaattattcagcagacattaatataattcggatttttgaaattataatataaaaagaaagtctgctgctcccaaggtatatgaacagcaggctttcgctttaaatcaacgctattatcgccgcaaggttgccgcgcttaagaggagaagcacggtgggaatgcagctccctgctgttacagcaggtgcatatatccgatgcgtctatattattcgggtctatccccgcatggatcagtataagcttgtttgccgtaaccaaatccagcatatattttccgccgctcttttcctcggctatgtcggaaatatttatataatcaagctttttgaatccgtttattaccgggtcatccacctcgtagcagcacttgcctatgcagggacctattcccgcaattatattttcggcacggcagccgaattcgtcaatcatttttttaacggtcgccgctccgatctcctgtaccgtaccgcgccagcctgcgtgcgaggttgcggcaacgcgtcttacggggtcgcagaacacaagcggggtgcagtcggcatactgtgttacaagagccactccggggcggtcggttataagcccgtcaacatccgaaaacggttccttgaatatacccgtgccgcaatcctcctcggttacggctcttacatttgcggtgtgagtctgatgggtcaagacaagcttatttatgtcaattccgacagccccgcagagtattttataattttcgagaacattttcgcggctgtcgcccctgttgaagcttaagttcatcgggccgtaaatgctattgctcactccgcccatacgcgtggaaaaaatatgtttgaccgctccgcaggcggcaagtcggggaaactgaatatatgtcaatccgtctttttttataatatcaagcgttttactttgcagcaattgtatcatcctatccgttcaagtaatttttgagaattgctgataaatttatcggaatattccgcgccgaatctttttttgattgcttcaagtgcgggccgcatcatcggcgggcgtttagcgacagagtgcgcgtccgtgccgatgaaatcgacaagctgcttctttataagcttattcaccgttttagagtattcccgcgaaaaaagcgaggaggcgtttatctgcgcagggatttcgttttctgccaaaaatttcagcagctttttgtaattgagaaacttatgatagcgctcaagatgcgcgattatcggtgttatgccgagatttctgcgcagatcctcaatatccttgaaaaattcatcgtctatgcagttatccgaaagctcgagcagcaaataatcggagccgttcaggcagaaattataaaccgattcgctccttccgatgcagctgtaataaagcacctcgcagccgagcataacgtacggcaggggagcgctgtcggcggcggctttaagctgaccgaaagcatatccgacccttgcgcggtattcatcaagcccatcgcttgaagcataaaaatgcggcgtcgccagcacatgggtgataccctgctgccgcatcattttaagcagttcgatagattcctccaaatcttttgcgccgtcgtcaactccgggcagcacatgcgaatgtatatccagtaaaattttaatcacatcccgaaggtattatacaacatcggtgtaagaatagcaaccgataaataatattggtacttgtaatttttaagaatacttgttatactgttagatacaggcgattatcgcattaggaggaattttaatggcggcgggattcagaaaaagcttgttcggctttaattgcgcggacgtaatggaatacatagaaaaatctcaaaagacctttgttaaaaacgaaaaggatctgaccgaacaggtggaaaagctttcaaaggagcttgagctttcaaaccaaaactgcgcggagctgaacagggaaaaggaagaaatttcaaagaagcttgaggagttcaacgagaagtacgaggagataggaaggctttccgaaaacataggcaagctttatcttgtggctcaggcgaacgcgcgcgcgattatggaaaattccgaaaaaaatgccgggcttgcggcaattcaggtcgaaaaaaacctttcaacccttgctgacgcacattcctctcttgatgagcttaagaagaatatagttaagactaccgatgaatttataggcgaggtcgacggtctgcttgaatccctcaatcaaacaagggagcatataatcggaaatacagtttcgtctgatgagagcaaggctcgctttgatgaggtttatgccgaaatagtaaactcataacaattcgatcgtgtcgaaaaaagttgacaccgtcttgggcgggaataccgccccggtgcccttgaaaaaaccgttgaacaagcgttttttcgttcacaaggtgtttttccgccgcacatgcgtgggaaaaacgaaaaatgaggcgttaccgccgcaagaacaaatttccggttttttcgacagaatgaaagctgccgctgtcataaaaatgacaacgacagcttttgctgtatatggtattatttctctttgaaattgagtatccgcagtataaccgggcttaaaatcatgtttgaggcaagctcgaacaggaaatttccgccgaccatacctaaaaatacatatgatacggtattggtaaatccaagatccgcgccccacgcctttatggcatcaaggaagaacagcaggcagcctataaggaaaacgcccgtgttcacaagcgggcagacgaccgccgcggcaatgaccgccgcatatttattgtattttgcaagcagcttgtaggttagccccgccgcaaagccgcatgccgcgcctttgagcagcaccgtcagtaccgtgccgaatacatttgcggcaaaaaacgccgttgcgtcgccgttcagcagcactaccgtgccgaacacaaggccgagccatgtaccaatcttcacgccgcatttcgccgcgcctataactataggtatgagcaccagcgaaacggaaaacggaccgaacttgataaatccgcccaaaatctgcagcacaacgacgattgccgtcagtattgcgccgagtacaaggctttctgtttgttttttttgttctgttgacataattcattacctccgatactctctctttatgagtagagttccttaataatatatattatccgcaaaagcggttgttttaattgtttttttcgtaaatagctttcagtccctcaagtaaaagattttcattgtatataatgttctttctgcagtgggctattatttcctttgaaagtccgcccgttgcaacaaaggtcggcgtttcgccgagctcatcttcgattttgtcaagcagaccgtctatcatggaggcggtgccgtaaacaagccctgactgcatacattccacggtgtttgtgccgatgaccgattttggcgcttctatcgggatcgacggcagctgtgaggtattcgcggtcagcgcttttagagtgagccgcacgcctgcggcgatagctccgcccaaaaatgtgccgtttttgtcaagcacgctgattgtggaggcggtacccatatctattacaacgcagggcattgtgtattcttcgagcgcgcctaccgcacccgccacaaggtctgcgccgagctgtgcggggttatcgatttttatattaagcccggttttgactccggggcctaaaataagcggaacaatatggcacagcttcgaaaccgctccgccgacgctttcggtcaccgcgggtacgacagaggatataatgcagtcctcaatatcctcaaagctttgaccgtaaagtgcgagcacatccttgatttcgattgcatactggtcggaggtcttgccgctgtcggttgagagccgtgcggtaaaggaaagaatatttgaattatacgctccgagcgttacattcgtattacctatatctattgtaagcagcattaaaatcactccttcaaggctattatacaggcaaacgcaaataaaagcaataattttattgacaagcagggaaaaaattgttataatacagtttgctgattataaaaattagctccttgctccgtttatacggggccaaaagtccaaagggaggtgcaaagaaatgacaaacaagtacgaggctgccattgttttatccgttgcgcagggtgaagatgccactgcggctttaaaggaaaaattcaatgaccttatcgcaaagcacggcacaattgagaatgttgacgactggggcaagcgccgcttggcttatctcatcaacgacgaagcggaaggctactatgttttcttcacatttgaaagcgagccgtctttcccggcagagcttgagcgtatagcaaagatcaccgacggtgttctccgcgctatggttatcaagaagtaaggaggaacgaaaatgtttaatttatttaatttagtggttttagcaggtcgcttaactgccgaccccgagcttaaaacaacccagagcggactttccgttacttccttttcaatcgctgttgacaggcgttttcgctcaggcgaagaaaggcagactgattttataaatatagtcgcttggcgccagcaggcggaatttgttgcaaaatatttcaaaaagggtaaccttatcggtattcagggctctattcagacccgcaaatataccgataaaaacggtaacaacagaaccgcgtttgaggtagttgcagacaatattcaattcgtggaattcaagcgtgattccgcatcggcgggcaatgcccccgcaggcaattccgaaccgacccgttcctacagcaacgcaggcagcaatgattttgccgagctgggagatatgtcggatgacgatctgcccttctgataattgattttatctcattcctgtatataggaggtttgttagaatggaaaacgagaaaaacgacagagcaatgcacagaaaagcacgcaaaaaggtttgccatttctgtgttgaccgtgtggaagctatcgattataaggatgttgcgcgccttcgcaagtttatctccgagcgtgcaaagattcttccccgccgcgttaccggcacctgtgccgctcatcagcgcgagctgaccaccgctatcaagcgtgcgcgtcagatagctcttctgccttatgtaaacgattaaggtttaagcgtgtcgaaaaagtcgacacgctcccctacgggaatgccgctcgctcgaaaatcacagattttcggactgcactccctactcttgcggtacccaaagaaaatattcgcttggagcgcgaattttctttgaccgcggcgccataacaccctcctttagtccgccacaggcggcagtcggttgttatgccccgccaataccacccctgtgcccttgaaaaaccgcttattcagcggtttttcgcttacaaggtgtttttccgccgcgcatgtcagcggaaaaacaaaaaatgcggcgtgaacgccgcgaaaatataatttggagtttatcgataaactgaaatcccccttgaacgagggggattttttgtatatctgacatctaaaatctaatgtctgatgtctgcattcactccccaaacgcccaaaattatcagcgcgcaaagcaggtattgtgtcggagtaaaatgctcgtgaagtattgtcacgccggctatcacggtgacaacggttattatgtttgaaaaagacgccgcccttgttgcgcttataacggttgttgaatagttgtacagcataaaggccgcgaccgaggacagcacagcaaggtaaaggattgcgacccaaaaactataagagccggcagcggcgataagctccgatatgtacttgccgcgcaaaaccgctattgccgccgcattaaaaccgaaagcaccaatcaaaaacataaaccacgttctttcaaagggtgaaaagtgctctgattcgcttcgacttaaaatattgaataccgccgcgcacaaaaccgctgcggctaaaagaagtattcctgttgttcggttttccttgccgtcatttgaaataatgctcatgaccgaaacgcttacaagcgatacggcggtacaaacgccctgcaataaggtcggcttttcgcctgaaaacagcaccgataaaagtataaccgctacgggcacgagcgcgattatcacgcccgataatgcggatgagacaagacttaagccgtaaagctcgaaaatgaaatacagaagcggctgtgcaagcgccattatcaaaagtcttttcttcggcttgcctttaagcgataagcggaatttacctgtaagtatcaaaagactcatagcaataaacgcaacggtaaaccgcaccgacagaatcacgagcggatgcgcagcgctgagagcctttttggaaaatataaagctgcaaccgaaaattatatttgccgcaagcgccgctgcggttcccgcggcatcatttttctttttcatatgttcattttctccgttttttagatgagtttaacattaatagggcaagaagtcaagaggaataaaagcacttttggtggaaaatctacaatttgacgcccctgattttcgtcacctgtaatgattttgtaacttttttatgtatttttgcgattatcacttgaaaaacggagagcaattgtgtaaaatatagttattagtatttttctaattattttaagggatgtgtataatatgtcaaaccgtctttttcaaggcgtaatccatcagatgaaggacgcggtagaccgaaccttcggcgttattgacgagaattttaccgttatcgcctgcagtgagctcggcagaataggggagaatgtcgacccgttttccgttcccgctgccgatgtgtatgtaaacggcggctacaccttcaaaagcctcggcacaacgcagggcacaaattacatagtttttgttgagggagacgatgctattgcctcaaaatacgcggctgttctgtcggtttcctttgcaaatatcaagttttattatgatgagaagtatgaccgcagcaactttatcaagaacataattctcgataatatcctgccgggagatatatacctaaaggcgcgcgagctttactttaattccgatgtttcgcgcaccgtaatacttattcgcggggttgaaacgcatgatgtttcaatctacgatgtcgtgcagaacctcttcccggacaaatccaaggatttcgttataaacataaacgagacggatattgcgcttgttaaggaaacaaagccgggaatcgataccaaaaccatcgaaaagctggcttccaccattgccgataccgtttcgggcgagttctacgctcaagttgtagtaggtataggtacaacggtcgatacacttaaggatcttgcacgttcctttaaagaggctcaaacggcgcttgaggtcggcaaggtattcgataccgaaaagaccattatttcttacgataacttaggtattgcaagactaatttatcagctgcctacaaccctttgcgaaaccttcttaaaggaagttttcaagcgcggctctattgaaagccttgaccaggaaaccctgtttacaattcagcgcttctttgaaaataacctcaatgtttcggagacttcgagaaagctgtttgttcaccgcaacactctggtctacagacttgaaaagataaagaagataacaggacttgacctgcgtgagtttgaccacgcaatcatctttaaaattgcccttatggttaataaatacttaaagagcaaccccattaagtattaattgaaagaatggaactgtcagtaaatggaagaattactccttaaccgtgaagaaccggcgaattccgcgccgataatagaattccgcggcgtttcaaaaacctatcccaccggtacgcacgccattgaggatgttaatatcacaataaacaacggcgagtttgttttcgtagtcggttcgtcgggtgcgggcaaaagtacctttatgaagcttattatgcgcgaggaaaaggctaatacgggaattattaccgtaaacggctttaaccttaccaaaatgccgcgtaagcaggttcccatgctgcgccgcactatgggcatagtgtttcaggatttccgcttaatacccaccatgaatgtttttcagaatgttgcgtttgcaatgcacgttgtgggcgcctcgggcagagatgttcgccgcgaggtttcaaaggcgctttcaaaggtggggcttggtaataaagcccgctcaatgccggcgcaactttcgggcggcgagcagcagcgcgtcggtttggcgcgcgcgcttgtaaactcgcccgaccttattattgcggacgagcctacgggtaacgtagaccccaatatgtcttatgaaatagtatcgttgctgaccgaaattaacaaccgcggcacaaccgtgcttatggttacgcacgaccacaaccttgtgcgagatttccaccaccgcgttattatgcttgacggcggaagaattgtagcagataatgccgggggtgatttctgatgaaaatgggaagtatgaaatacctcgtcggcgagggagtcaaaaacacctgggttaaccgccttatgtctttggcatcggtcggcgttttggttgcctgcatggttataatcgggcttgcaattcttatttccgaaaacgtgaataaagcggtaggaaatttggagcagcaaaacgttgtaatggcatatatgaaggattacagctgggcgctttacggggataaggatacttcgtccgttacatcctctaacagttccgcagcagctgcctcaacggatagcagcacttcgtctgcagcaagcagtgcgtcaagtgcctcaagcgaagaaaaggctgatgaaaacggcataaagcagagcgattatattgttcacagcgaagaagaggcgaaagcgctttgcgatgaaatagcaaagctcgataatgtagcgtcggttacctatgtttctccggatgaggcgcttgaaagcgttaaaaagtcaatgcttgaagggcaggaaagctatttttcgttccttgatgagaaaaatggcaacccgatgtcgggcgcggcaaaaattcagatgaaggatatgtcccgctttgacgaaacggttgagcaggtaaagaaattcgacggtataagcgatattcagtcgcagagcgaccttgcggaaaaaatcaccgccattaaaaagggaataggtattgcgggcttttggataatcgcaatacttatggttatagcgcttgttatagtttccaacacaataagggttaccatgtataaccgcaagctggaaatcagcattatgaaggcggtgggcgctaccgattcgtttgtaagaataccttttgtagttgagggtatgttaataggcgtggtttccgcgcttatagcggaggggcttttgtacttctgctaccgcgtggcgaccgaaacgattataggcacgctcggaacaagtgatattgtgcattattccgatgttgcaggctggcttttgcttgtattcattggcataggtattttggcgggtgttctcggcagtgttattatgataagcaaatatctccgtcatgagggcagcgaattctcggcgatttaggaggaaaaatgaaagcaaagcttattaaaattttatctcttataacttcaattgcgcttgttttttctgttgcggcggcgtgtcctgtatctgccgcaagcaaggagcaggaaatccgcaatgaaattagtaaattgcagcagcagcaaaaagaacagcagcaaaaaattaatgcgctgaaaaaggacgcaagcaagcaaaaagaattaaagactgcaatcgagcagaaaatggcgcttgttgctaaggagattgcggcgtgcaacagtcaaataagcgaaatcaattcgaaaatttctgccaacaaggcggaaatcgaaaggaaaaacaccgaaatcgagaatagcaagactgcctttaaaaagcgcttgcgcgctatatatatgagcaatacgggcagtcaggttcaggtgcttttgggggcggatgatttctcgcagtttttagagctttcgcagcttaccgccagtgtttccgcaagagacaagaaaatgatagaggaaatagttgcggcggttaaggtgcttgaagaaaagcagaaggagaacaataagctgcttgaagagcaaatgacggttaaaaagtcgattacccaaaagcagcaggagttgaaaaatcaaatcgccgaaatacagtcggttatttcgcagcttgacagcgacacaaagagcgcgcagtcggacaaggacaaaaccacagcggctctgcgggcaaagcaaaacgagcttaacagcattgtaaacggcggtgcgggcggaaaggttatttatgacggcggtccgtttttgtggcctaccacatttacgaaaatttcatcgagcttcggttaccgctggggcaccaatcataatggtgttgatatttcaaacggcacatacggcgctccgatttatgcaattgccgacggcgtggtttatattgtcagaaccggctgcccacacaattatccaaagcagtacagctgcggctgcggcggcggctacggaaactatgttgcaatagaccacggcagaggctccgacggcaattcctacaaggcttactatgcccatatgacaagcgttgcggtttcaaacggcgcgcatgtaaaatgcgggcaggtaataggctatgtgggctgtaccggtcattcaaccggaccgcacctgcatttcggaattctgcttaacaattcgtgggttaatcccatgagattttatacaagagtaaattaattttcagccgtcaccggcttatcggttttccggtaggtggcggcttttaagttttcgggaggcgggcaattatcaaggcgaataaaacagcgtttagaataatcacggcggcggcgctggtattatggatggcgcttatattccttttatcctcccaaaacgccgcggtatcatcggggacgagcgggaatgtaataaggcttatcgcaggaatttttcgccccggctttggtagcctgcctgcggcggagcaagcggaaattgttgcgtctttgcaatttttggtcagaaaatcggcgcatttcagcatatatatgattttaggcgttttaagctttcttgcggttataagctatgaaaaattgcttttcgctatgcggctcacaacaagcagcggtatttgccttttatacgccgcaagcgatgaaattcatcagcttttcatacccggcagaagcggcgaggtgcgcgacgttatgatagatttttcgggcgcggtgctgggaattgctttatcgacgcttgttttccttttgatttgcaggataaaaaagaaaaggactgaaaaaaatgaagaacgaaaaattcggaattaaatatttctacacgggtcttacggcgtttttggtaattgccgcctgcgttgtctttttctttcttatgtaccgtttgcccggtattttcgcttttcttaaaaagctgctgggagtaatagagccggttataatcgggtttataatcacttacctggtaaaccccattgcaaacgctattaacggcgggcttttaaagctttcaaagaaaaatattaagctgcaaaacaatatttacaagagggttgcgcgcggcgtcagcgttttcggcgcattggcggcatttaccgccgtattgattttgatattctatatgatagtgccgcagtttattgacagtatttcaagcatggtaaaggttttgccgggtcagctagaagactttgcccaaagggtcagcaccgaatttgagagaaacagcgatttgcaaaaggttttaatgtcggtttatgagtacgagaaaaagtggctgcaaaatgattttaccgcttatgtaaactccatggcggcgtatttcgcaagcggagtttggagcgttgtaaactttattaaaaactttgcggtgggatatattttcgcgctttacatactttataataaggcgcttttaatgcggcagttcagaaaaataatgttcgcctgcataaaaaacagcgtggttgagcgcattttgcgcacgggcaaaagggttcacagcattttcagcggctttatttacggcaagctgctcgattccgccatcataggcgtactgtgctttataggcgttacaattttcaaaatgccataccccatgcttgtagcggttacggtgggggttaccaatgttatacccgttttcgggccgtacctcggcggcataccctgcgccgcgctgatacttttaaccgacaccatgaagggcgtttattttataatattcataatttgcctgcaagcgtttgacggtaattttttaggaccgaaaattttgggcaactcaacggggctttctgccttttgggtggttttcgccattgttgtgggcggcggaatgttcggtgtgcccggaatggtgataggcgtgccggcgttcgcggttatttattaccttaccggaagctttgttaattaccgtgtaaagaaaaagaatctgccgcttgaaaacgagttttacgattcaaaggttcttgaaaagctaaagcccgaaattgccgatttacgcgagcagattccccttgaggaagaggacaccgaataattggagagtgagttttaatgaggaaaaagcttttgcttgaacagaatattcagcttttcgacaggcttgccgccgccgagggcgaaattaaaaggctaaaaaacgagcttgaagaagaaaaacgcagggctgcggcgcttaaagaggaaaacgcgcgcctttccgcaaacaagggctcgactgccgcaccgcttaaaatacttgaatcaaaggttataaaacaggcgggaataacgcccgataccgagtacggcgcggcggttataggcaaaacggtggttgcggcggcaaaatgctgcgagcagcttaaaacccgcgacaacgcaaaggagcttataaatcttattttgggcagaaccgaggttgcaaaggcggaaatccttaatattgtaacagctgatacggcggatgaggaaaaacggcggctgatagacgagcaattcgccgcggcggaggattactttgcaagcgttacggcgcaaacggaataaaatggcatataatatataatgccgaattcggaattcgtaatgcggaattgaataagcagtatatactttgtaaataagtaaaaatgtgtaacgtactaaagaatacccctcagtctcgttacactcgccagctcccctctatttcggcaaagccgaaaagaagggagcctaaaaagcctcccctgtataagtggaggtggtagccgaatggctgacggaggggttgttacaacctttaaataatatctaatttggggtgaatgttttgtttaaagaaataaatgcgaaagatattaaggataattttattaaaaccattgccgacgaatgggcgcttatatctgccggcacagaagataaatataatatgatgaccgcctcttggggctttatgggtgaaatgtgggggtatgactgcgttgccgcagttatccgcccgcagcgctacacaatggagcttgtggataaaaacgattattttacactcagcttttacggcgataacaaggcgatacacaaggtttgcggctcaaaatcggggcgcgataccgataaaaccgccgaaacggggctgacccccgtgtttgacggcggtgcggtgtattttaatgaggcgcggcttgtaataatttgcaaaaaactgtatgttcagcagatgaaagaggaatgctttaccgataaagagccgctgcgctggtacgataacgatttgcacaacatagtaataggaaaaattgaaaaggtattggttaaggaataaaaatgttcggcaaaaagacaaatgaaatatggcttattgcagggctcggaaaccccgggctgcaatatgccgaaacgcgccacaacgcaggctttatggcggcggacaggcttgcggaaaagcacaatatggcctttaacaagcgcaagtttgacgcggaatacggcgaaataaatttaggcggctgccgcgttattctggcaaagccgcaaacatatatgaacgactcaggcagagcggtagccgctattgcacggttttacaaaatccccaccgaaaatattataataatgtttgacgatattacgcaggcggtcgggaaaattcgtattcgccgcagcggcacgcacggcggtcacaatggaatacgcgatattatagagcttataggaacggacgatattaagcggataaaaataggcgtttccgagcgccccgaccgcaattatgatttgaaggactgggttctcggcaaaattccgaaggagcagcgcgcagaccttgaaaaggcgctcgaaaaggcggcaagcgcggcggaggaaacaatactgcacggaattgacagcgctatgaacaaatacaacggttaatatgaagctgataaacgaagtactgaaaaaagatcccaattacttatcactcttaaatgaggttgagcgcggcaggctgccgatagtctgcacgggactgtcgctcatacacaaggcgataatcgcggcggcactgcgcgagcacatgaaaaagcgcgtggttttaatcacccacgacgaggcgactgccgcagagctttgcggagacataaacgctttggggcttaaatgccttaattttcccgcacgggatttatgtataggcgatttaagcggctactcaaaggaatatgagcataaaagaatagacaccctgtctgccgtggcggatggggcttttgacctgcttacaatttcgcttgacgcggcggtgcagtacaccgtaaagcccgaagtgctgaaaagtgcgcgctttaccttaaaagccggggacagcgccgatacatctgaattagcggaacgccttataaacgcggggtacacaagaagtcagctttgcgagggctcggggcagttttcggtgcggggcggaattttcgatttattccccgtaaattccgaaaagccttgtcgtattgaattttggggcgacgaaattgacagtatttcatactttaaccccgaaacgcagcggcgcgaggaaaacgcggacgaaatagaaatatcccctgcagcggaggttatgtttgacccgctgaaattagccgcgaaattaaaaacggaaataccgaaccccgctttaacgcttaaacagcgcgatattttggcaaaggatgcggagctgcttgaaaacggcgttaaaattccgcctgataggtacattccactgcttgataccatgggcgcggtgtttgattatttcggcgattcgcttttaatgctcagcgaaagcggaaatatggcggaacgctttaaatcaatggaaattcagctttcagccgatacggaaaactaccttgaagaggggtatttgttttcaaaaaccgcaaagctgcagcttgataaaaccgaatttttcggtttcgcaggtaacggcattattgccgaaaacttcccgcgcgggtcgtatgagataaagccgaaatcggttataaactttaattacaagcgctcaaccgcctggggcggggatattgaggtgctgcttgaggatatttcatatatgcgggatatccgcggcaatgtagttattttggcgggcgagcaaagggcggcgcaggtgttaaacgccgaactttgcgagcgcggggtgcaaagcatttatacactgagcgccgataccgcgcctgcgggcgttacggtaataccgggcgggctttcggcaggttttgaaataccctcgcaaaagtttatgctaataacccacaggtttatagcgcccgagggtaaaaagcacaaacgcaagcataaagcggggcaggagataggctcgctcgacgagcttaaaaagggcgattacgttgtgcacgaagcgcacggaataggcatatttgacggcattaaccgcataacccaaggcggggttacaaaggactatataaagataaagtacgccaaaagcgatgttttgtatgtgcctgtaacgcagcttgatttggtttcaaaatacatcggcgctgccgaaaacggcggggtgagacttaaccgcctcggcggcagcgaatggcagaagacccgcaagcgcgttaaggcggcggttaaggatatggcaaagcaattaactgcgctttacgcaaagcgtatggcagtaaagggctatgctttcagccccgataccgatttgcagaacgactttgaacgccgctttgaatatgaagagaccgacgaccagctgcgctgcattaacgaaataaagcgcgatatggagcgcgaaacgcctatggacaggctgctttgcggcgatgtgggcttcggcaaaaccgaggttgcgctgcgcgcggctttcaagtgcataagcgagggcaagcagtgtgcgctgcttgttcccacaaccatacttgcaatgcagcactataacacaataatccgccgtttcggggaaatgcccgtatcggtagggctgcttaaccgctttgtttcgcctaaagagcaggcaagggtaatagccgaccttaaatgcggcaggctcgatatggtggtaggcacgcacaggctgatttcaaaggatgtaagctttaaaaacatagggcttgtaataatagatgaggagcagcgcttcggcgtggcgcaaaaggagaagcttaaagagcagtacccgtttgtggatattttgaccttaagcgccaccccgataccgcgaacgcttaatatggcgctttcgggccttagggatatgtcctcaatagacgaggcaccgggggacagacaccccgtgcagacctatgttcttgaatacaatttaggcgttataaccgacgcgataaataaggaaatacgccgcggaggacaggtttattacctgcacaaccgcgttgaaagcattgagcgctgcgcaggggtgcttaaagccaagctgcccgatataaatataggtatagcgcacgggcagatgagcgaggacgagctgacagacgtgtggcggcggcttgtggagcacgaaattgacctgcttgtttgcacaacgattatagaaacgggcgttgacgtgcctaatgctaatactcttataatagaagaggctgacaaaatgggcttggcgcagctgcaccagctgcgcgggcgcgtggggcgttcgccgcggcgggcgtatgcgtatttctgtttcaggcggaatgttcaactgtccgatgtagcgtcaaagcggcttgaggcaatacgcgagtttaccgagttcggctcgggctttaaaattgcaatgcgcgacctggaaatacggggagcgggcagcattttgggcggcgagcagcacggcaatatggaggcggtggggtacgatatgtacctgaaactcctatcgcaggcagtgaacgaggaaaacggtcagcccgaaacaaaggatatgccatgcacggtggaccttaatatttcggcgcatatacccgaaagctatattgaatcattacccgcaaggctcggaatttacaagcggattgcagccataagaacggacgaggacgtaagcgacgttatagacgagctgtgcgatcgtttcggcgagccgccgcaggcggttatggggcttatagacgtggctattttacgcagtaaagccgcagctgccgatatttgcgagattacgggcaacgccaacaccgcaatactgcgcataaactcaataaagcccgaggcggtagcaaagctttcggagcatttcggctcaagattttcgcttaacgccgcgtctacgcctgtttacacggtgcgaatgcgtgcggggcagaagatgtcagacttggctgcagagcttgcaaaagcactttaatgcaaaagtttacaattttttgtagacatttgaacttatatggtatataattaatttatatgtatttttactctttatggaggaatagaaaaatgaaaaacatcaaaagaattattgccgctgttttggtttcggtaatggcgctcggctttaccgcctgccataaaaaggacgaaacggcagtaacagtcggcaaggtcaattttacatcggcttattatatgtgcgcgcttataaatgccgattccgaggcaaagtcaaaggtgaaggaaagcctgtctgacagtaaatcctcaaccgatatcgattattattcaaaaaaggttgaggataaggatttcgttaagtgggtagaagataccgcgcttgaaaaccttaagaagattgcggcttataaaactctttgcgaggaaaataagcttgaaatttccgaggatgacaaaaagaacgccgaaacctatgcaaactattattggtcaaattacggctattcctcttactttgagccgaacggcgtaggtgagaatacctacaagcagtacatgctcgattcctattattcaagtgtttactttgagcacctttattccaagggcggcacaaaggaaatagcagccgacgaggttaaaacaaagctttatgataatttcgtaattgcagatatgctccagggcagtttttcgggcaagactgatgatgaaaaaaccaagattaaaaataaatttaatacttacctggaagatttaaagagcggtaaaaagacctttgaggcggtttataaagaagaaaacggctcaaccgacgacagctcaagcacctcaaccgacgaaaagcagcctaaagataagtatgccagcattttaggcgctaaggatacttcttatgaatcggaccagtacgacaccgtaaaggctatggcaacgggtgaagttaagcttattgagcttgccgatgatgcaggactgatacttgcggtgaagcaggatattaaggcagacgattactatatcgacacgcttgaccttgcgacccgacaccttattgccgatgatgatttcgataaggaaatcaccgattacgccaataaaatggaatgcaaggtaaacaattacgccgtaaagcagtttaaggtcaagaagatcaaagagccgagcacatcgtcaaacagctgataacagggaaaaagactcctgcggaagaggcagtgcaaaagtcctctgccgcgggagttttttcgatcggtatacaccgaaaaggagcggcaggaaaattgaaagcgaaagaaaaatcgcaggaaaataaaaccggggatatcccgcgcggcggcagacttgccgattatgtatatcactatctgtcgcctctcggcggaattaccttatcaagcaacggaacagagcttaccgggctttggtttgacgggcaaaaatatttcggaaatacgcttgcaaaggaatatgcagaacaggcgctgccgatttttgaacagacggttcgttggcttgatacatactttagagggaaagcgcccgattttaccccgccgattttgatgaaaacaacgccgttccgtaaagcggtgtggaaaattatgctggaaattcctttcgggcaaacaatgacctacggcgaaattgcggacaggcttgtaaagcaatatgggctttcaaaaatgtctgcgcaggctgtaggcggtgccgtggggcataattccgtttcgcttatcatcccgtgccaccgtgtggtcggcacaaacggcagcttaacaggatatgccggcggtattgataaaaaggtgcggctgcttgaattggaaaaagcggatatgtcctcgctttttgtgccgaaaaaggggacagccttataattttatcaacggaaatacctccccgagcattaggagggtgtttttaaaggcctgtgtttattctttaattatatttacaaatcacacaacagacaagatttcttttaaaacttcttttttaaaggtttttaattattatttgtattgtctttttttcctcatagtgtaaaatcagaatagataataggatagtttttgtgaatctgcattttaaaacgccgattatcgaacggttttatttgttttatcttacgcttttactttggcaccgcacttgagaagattttaaaaaataatttttttagaaattcacggaggttatactaatgaatttctgaattaaaatcacagctcttttcacagcagcggttctgattgtatctgccgccggctgtaggcagtacagcggcaaagaggaaagcggcgcgcccgctgtttttcggataattcgggcagcagccaaagcatggatgaggtattgcccgaaaatcaaacggtgaccgagaaatttgaggatacaaagctcggcaagtataagaaagacggcaaaaaaaggataaaataatcttatttttttaagtgtaaaggagtatcactatggaaaaaattacgacagacgattaaggcaaacgctttttccggtgcgtgtggtgaagaccttcggaaacgttttaaatcatgaagctctgcttaaggaaaagccgcttcaaataggcttgaatgagcctgactgcaccgtttttgaaaacggcgagacaggggaaaatgccgccgttttgcttgatttcggcagggagatcaacggctgcgtcagaattcttaccttctcatcgcattccgataagcccgcaagcgttaatataacctgcggcgaatcggtatcggaggcattgagcgctccgggagaaaaaaattccacaaacgaccatgcggtgagaagcgccgatcgactgcttccttcctacagtgatatgacctttaacgaaacgggcttccgttttgtatgcctgcgtctgaacggcaagggaacgcgcctttcggtaaggtctgtagcggcggtttcggtttacggcgatattccgtatatcgggagcttctcctgcagcgatgaaacgctgaacaaaatttatgacactgcggcgtacacctgcgggctttgcctgcagaattacatatgggacggaatcaagcgcgaccgtcttgtatgggtgggggatatgcaccccgaaatgcttacggtgcgctcggtcttcggcagcataccgctgatggaaaaaacgcttgaatacattaaggaagcaacaccgctgcccggctggatgaacaatatgccgacctattccttttggtggctgataatagtaagggattggtatttttataccggcagcaaagagtttttgcataaaaacgcggaatatataatatcgctttccgaagggataagctcgcttgtatcacaggacggctctgacagtataggctattatttcctcgattggcaaacaaacggcaccgaagccgcgaaatacggctcgcgcgcactgcttgctatggcgcttgacgctgcaggcgagctgtgcggatatctcggaaacgggggcgctgcagcgctttgcaaagagaaggcggatattttaaagaaaagcgaatggaagcactgcggtgcaaagcagactgcggctatggcggcaatggctgactgtaccgataaaaacgcggcggcggagctgatactcaaaaacggcgcggagggcttttcaacctttatgagctattatcttctgaagacggcggccgaaaaggatatatccgcagcgctcggcatcctcaaggagtattacggcgcaatgctgaagctcggtgctactacattttgggaggattttgatattgcatgggctgaaaatgcttctgcgatagatgaaattcccgaggaaggaaagaccgatattcacggcgataacggcgcattttgctataagggctttcgccacagcctgtgccacggctggtcgagcgctcccacggcgtttttggcggaggaggtgctcggaatccgcatatcggagccgggctgtaaaaagatccgcatagctccgcggctcggaaatctcgaatgggcagaaggcaaatatcccacaccgtacggtgcggtaacggtaagctgcaaaaatctcggcggggaaattaagaccgaatggacgactcctccggagataaccgttattaccgagtaatattaaaataatgtctactgaataattgcattagcaaatgcaattatataaaatcgagttaaaatctcgattttatgggtcaaaacctttgttttgaccgtcagtatccattgattgtcgcctgatttta

SEQ ID NO: 3978 - DNA, 9466 bp, Unknown
  16S sequences of unknown bacteria
gtttcagccttgtcaatatcttttttcttctcttcgttcatttttctttccattcgccggactcttccgacgatttcctgtatttcaattaatatacagttattttatcttccatactattacctgtcaattaatttccatcattttttgttaagaactatgtaaccgcattttcccagtcttttttaaattgctcgatgcctttatcggtcagcggatgatgaaacatctttttcaaaacgctgaacggcaccgtcgctatatccgcccctgcaacagcacattccagcacgtgcataggggttcgaatgctggctgcgataatctccgtaccgatgtcgtgaatcgcgaaaatagctacgatatctttgatcacctgtatcccctcgtttccgacgtcatccagacgtcctacaaacggactgacataggacgcccctgcgcgagctgctaaaagcgcctgaaccgccgaaaaaaccaatgtcacatttgtcctgattccttcttttgacagaatatttacagctttcagcccttcctgggtcatcggaattttaatcgtaatattggaatggattttcgccagttcccggccttctgaaatcatcccttccgcatcctccgaaagaacttcggcgctaacggaaccgtccacgatatcggtgatttctcttacgactgttttaaattctctgccttcttttgcaatcagactcggatttgtagttaccccggacaatattccccaggatgcggcttctttgatctcttctacattagctgtatcaatgaaaattttcatctctgctctcctcctttttcataccatttcacaacaatatattttaaaaagagcggacagcaatgccgcccgccccgaaattccgataaaatttttctatcttaaatttacagcaaaaactacaaatcatttcatttgtatcttctctgccgcattttgtgtcttcttaaatatatatgtaccgtgccgtctcctcagaatcttttaccgcttttccgccggatctttcttcgatgaaacggcaattttcaaacaccgtccatccttaagatgctttgattattcgtcttgcaaaatccgtgtccggcgaaggatattaagaattctctttagagaccctgggcaatcatggcttccgctacctttttaaaacctgctacattggcgcctactaccagatcaccttcacagccgacttcttttgcagcctcagcgcagttcctgtagatatttctcataatatcgtgcagtttttcatctgtttcttcgaatgtccaggagaggcggatgctgttctgagacatttcgagaccagatgtcgctacacctccggcattggaagctttcgccggagcgaagagaacgccggctttatggaaagccgctactgcttccggggtagaaggcatattcgcaccctctgctacagcttttacaccgtttttgatgagaatctcagcggaaactccgtccagctcattctgagtcgcgcaaggaagtgcgatatcacaggcaacattccagatgccggtacttccttccacatattttgccgtcgggacgtaatcgagataagtcttgattctcgctctctttacctctttgatctctttgattaccttataatcaattccgttttcatccacgatatagccgctggaatcactcattgcaaccactctgccgcccagctgcgtcgctttttgatttgcataaatcgcaacgtttccgctgccggaaatcacgactgtcttgccttcaaaagaactgccgtttgccttgagcatctcatcggtataataacagagaccgtagcctgtggcttccgtacgggccaatgagccgccccattcaagccctttgccggtgagtacgccggtaaattcattcttcaatttcttatactgcccgaacatataaccgatttcgcgggcgcctacaccgatatcgccggccggaacgtctgtatctgctccgatgtgcttagagagttctgtcataaacgcctgacagaaccgcatcacctcggcatccgatttccctttcgggtcaaaatcggatccccctttacctccgcccataggcagaccggtcagagaattcttaaagatctgctcaaaccccaggaatttcagaatggacgcgtttacactcggatggaaacgaagaccgcccttataaggtccgatcgcagaattaaactgtacgcggtaacctctgtttacctgtatatctcctttgtcatcttcccataccactttaaactggatcaatctttccggttcgacgatacgttcgatcacagcatttttttcatatttcggatccttttctaccagcggctgcagagattcgagaacctcaaagaccgcctgcagatattcgggctgatatggataacgttctgcaagtccgtcataaacacctttaagatatgtattagtgagtgccatattgttgtctccttttcatgttaatattcgcagtctcgatctgacgtcttttcagttgaaaatcaaccgtcagcctcggcacagtttcattatactcccaattccgcctttgtgtagaagcaaattcaatttcgcatactaaaatacattttttgaacattgtactgaatttttatcggtatttcataaattttcattatttatttttgttttttctttttattcgctctctcatatgatttaattctgaacataagtccgtaatcaagttgataaatcagaaaaacgtgcagatgatcctctcctctgcacgtttcatttttttctatattctacttaagaaggcttcttcttacagagacaacagagccttgtcgttggcaaacttttcaccgctgacctgttcgaatttttcaagcagatcttccacagtcagcttctttttttcctcttcaccgatatcgagaatcactttgccttcattcatcataatcagacggttgccataagcgatagcgtcattcatgttatgggtcaccatcatacaggtcagatgattttccgcgataattttctccgaaatctccagcactttcgccgcggtcttaggatccagcgccgctgtatgttcgtctaacaggagaagattcggtttctgaatcgtcgccatgagcagagtgagcgcctgccgctgccctccggacagaagcccgaccttggaagtcattctctcctccaggccgagatccagctgcttgagcagcgctttaaactgttcccgctctttttttgtaattccccaacggagccctctgcgctttccgcgccttacggcaagagccagattttcctgtatctccatagtggcggcggttcccgtcatcggatcctgaaagacccgccccagatacttcgcgcgcttatgctccggcaggcctgtgacattgatgccgtcgatgataatcgaaccggaatccaccggccatactcctgctacagcgttgagtgtcgtagatttcccggcgccgtttcccccgattacggtgacaaaatcaccgtcgttgagagtaaaggaaaccccgttgagcgcctttttttcatttacggtacctttgttaaaagttttatagatattcttgatctccagcatcttattccgctcctttcttcgcagccttcataaaagacgtgctgtacttgcttttcagatacggaaccgccaggaaaacggctacgacaatcgcggagaaaagcttgagattctgcgaggacagaccgatccagagcacaaacgtaatgaccagatagtaaataaccgctcccatcgccgcaaaaaacagcttcagcgcgaagttcattctctttcggaagacagcatttccgataacttcgccgatgatgaccgccgcgagaccgataacgatagcgccgcggcccatatttacgtctgcgttgccggaatactgcgccaccagagctccggaaagacccaccaagccgtttcccagcgccaagcccaccactttggctttattcgtactgattccctgtgctctcgccatttcctgattgcagccggtagcccggatcgtaaagccctgctctgttccaaaaaaccagtacaaaagagcgataataacgatcaggaatatcgctcccactacgatagcctgcgaaatatatctcagagagacgaccagatcgaaacgatcgacactgactgcctgatttgccttgcccattatgttcaggttgacggaatacagagcgatctgcgtcagaatccccgccaagatatccggaattcccaaaagagtatgaagcaggcccgtgaccagaccggccaggagccctgatataaatgaaatgataagtacgagatacggcggaaatcctgcaagtatgagcatgaccgctaccgcgcccccgagaccgagagagccgtctactgtaagatccgcaaaatcaagaattctgaatgttatgtataccccgatggccataatgccccagatcagtccctgtgccacagatcccggcatcgcccggaacagatccattatttcaagaccaagcatattttttcctccgtcgcaaaaaccagcgataagtattattacttaccgctggctacagttcagtttttaattcgtaaatgagttactgagattattcttctgtgatcgcctcataaccgtcagggatagtgatacccagagcgtcgcagatcgtcttattatatttcttcgttacattttccgctgttttaatttccatcgttgcaggatctgcaccgtttacgagaatatcataagccaagagacctgcttcataaccgatatcataatagctgatcgtcagtgtagcgataccgcatcccttgcagataccttcctcaccggcaattacaggaaccttcgcaggctgtgccacattattgatcgcttcggtattctgagccatcgtattatcggtaggaatatagatgcagtcggattcgctgaccgcttttgtcgttaccgcctgaatttcgttggaatcagccgcagcgtattcggtgtatttgagacctttttcatcgagatatttttctacttccttgatctgatatacagaattcggttctgcggagcagtacagaagtccgatctgttttgcctcaggcacgagttctgtaatcatggccacctgctgttccagcggagccaggtcagaagtgcctgtaatattcgtacctgaaacacctttccagtcctctatatttaatgcggtagcataatccgtgatgctggtggccacgataggaatttcgcttgtagcttgagatgctgactgtaacgcagtcgtcgcatttgccatgattaaatccacattagaagagacgaatccctggctgatcgtagcgcagttcgcagcttcattctgagcattctgcagatcgaattccacaccgtccttaccgagtttgtcggtcagcgcctgctgaaagccctttgtcgcctcatcgagcgcaggatgttccagctgctgaacgatacctacgtggtaaacatctgcatttccggtatccgcggaaccgcccttatcgtcagaagaattgccgcagcctgccagagctgtcagaagcattgccatcaccatcaagacggctgtaatttttgttgtctttttcatgcctttcacctttccttaaacgtaatatcccaaaactaaatgtggttctatttaccgtatccagaaaatatgatttcactattttactgttatgcgataaagcagagaggcaaaaataaaacgcctgctgctgatcgaaacaagcaggagacaggcgttaaaatccccggtcagattaccgtccgttctgtcttctcttacatttaattttgtatctattataaaacttcatttcactcacgtcaacaggtaaattatttccccctgtgatttttaaaagcccggagaaaatcactctatttctgttttttcgacggataaatgacaatttttcggctttcggtcgggaagctgagccagaatgatagctgcaaacatcaatatgcacccaaaaatttctctcggactcatgacctcacgaagaatcacccagccggcgacagcagagattacagactccagactcaggataagagaggctaccgtaggattcatttctctctgccctatgatctgaagggtatatgccacgccgctggaaaaaattcccgcatagcatacaggcagccatgcatcgagtaccgcgccgaaatccggcttctcaaagactgccataaagacagccgacagcaccgcagaggtccaaaactggatacaggacattctgacgccgtccgtcttcggagaaaaataagatatcgtcagaatgtgaacggaaaaggcgattgcgcaaaggaaaatgataacatctcctttgttaacggaaaatcccccgccgctcatacacagcagatacaatcccgcgacagcgacgacaacgctgatccagagctttatccccgccttcttatgcagaaacagggaaaggacaggaaccagaatgatatacatcgctgtgataaatccggcctttcccaccgtcgtgtactgaataccgatctgctgcagattgctggatataaacagtatcacaccgcaggaaacacttccggtcaggagagtctttcgctgcgctccccggctctccggcgcttcctgcccggagacagagtccttcgttctgcttccgccagctctccgaaaaactgcgatcaccggcagcagaaaaagccctgccagaagcgatcttgacatattgaaagtaaacggtcccatatattcggtccctacgctctgagctacgaaagccgtaccccagataaatgctgtgagcaggagaagaaccggacctttaatattactggatccctgattattcaacgtcgactaccttctcctgtccgttctccctgtatgtatatacagtaaaaccgctgtagcttaactgcccgtcttcgccgtcgcccatgcagctcggcgaatactgagcggcagaaggggctcctatcgcagcgatcagagaagatgcgctctttccgatataagactgcgcggtggatttggaaggtaccttggcggcaccggcatcagaatttgtatttccggagtccgaaccggaattcccggtatttcccgtatctgcggaattgtttgagcctcccgaaggcttcgcatcggaatctgccggtttcgatgtcttatccgcaccgccggaagacgctgcagacgaagtgtcctctttgtcctgatccggcgttccggagacgtcttccttatctgcgctcatcccgtcatccggtgtctccgcgctcaattcctcctgaatattggcatctgacgatgaggaatcgacttcctgatcgctgccgcatccggtaaaggtaaataccagtactgctgtcaatacgagtttgagaattaatgatttcttcatttctgcctccattttttctgattttgctcgttttgcttcaatttactcccagattgtttcacaggaatttctgtagaatttcccgtctctgcaaaggataacagaaaaatctcttcccttcaagatgtcttccggaagatacgcagtgaaacaagcgtccgtctgtctctcctccagcgcggatcccacagggcaggcctcgtaaagcattccctctgtctctataaaaattctggtattctcatcgatattttccgcatcatacgttccggaaatcagagcatatccgggcaattccgcagatatggaaacatccgcctgtacgtcagtctctcctgttccggcaatccgcaccgcactctcagagacgccgttttccgacttcatatcgtcattatacgatatggcgggcgcaggcataaccggcgctttaaccgccagatttttcagattccgctccacgatttccactacgacataatcaaaatccccctcggaaagccagtccatccgataaggcaccagcctcgaaaaggcgcaataagaaaaggtatccgccaaaaaaggatatagagcatttccgaaagaatcccggaacatcaggagatttccctcatcacttccggagttgatcgtctcgattttgatccggtccggctccggtctgctttcgctgtaataatcaaacgcgccgtcctgcaccgcgtctttcgtcagactgtcatctgccggtccggctgcgcggccggcggaagatcttccttcggaatcgaagatatcctctgtagaaggaggagcgggcacggtctgatcatttatcagatatcgaaaagaaaatttcctgtcaaactcgatattttcatccgttttttttcccgccggataaagcatctcatacaaatcccctttgtggttcttcaccctccggtaaggcccttccgtccacggccatatatctacgccgagatgttccgccagtccctccgcagcgacagcagcccccatattattccagtgcgaatcgagacgatgataataagattcgccatccgtcccggaggacaacacctgtgtcagatctgcataacagatattctgctctttcatcgcccgctccagtttctgaagatttttttcctcttttctcacttttccgatatccggcatcttttccgacgccggcgtgagagaatttttattaggcgctacggtaaacagaaaggaggtcccctgctccgatgcgtaatcctgcatcagagtcaatgtcctaacgatcccctgaatactgcggtcgctgagtgtgctcctgtgaagaaaatcatccgaagtatccttataaaacagccatccgtcttctcccaggatcacatcttcagcagaagattcctgaaacagagccgcctgtatggccgcatatccggtgatcatctcctggcgaaacgcaaaacgatcggcaaaataagaggtgagatcagccgtaatttccgaattaaatgttccgtcttccaagatcagcttcggccgctgcgccagaatctcgtttgccgccggctgagactcgcctttcagcagcatccccgccgaaggtacgaggcagacgataaaaaacgctgcgataaatatgtaatatgcgattttctttttcatctgtaaatcaccaccttaaaactggaaatagataaacggattgaaagtcgcctgcgacagatttaatatatcgtaaataaacaatataaaaaccgcagcataagatacgcttgtccacagaacttgcttctcgacggaaagactcccgattcttccccggattctcggcagccaatcaacagataacacgatggacaggatgatcataacgatattggtattagaaagcagatcgtgaagaatctgatctgtctccggtgtaaatccaaacccagcaaacatctgtgaaaacataattcccgcctgcgacagtgtctccgcccgaaacagcgtaaaaccgagtaagatcggaagagc

SEQ ID NO: 3979 - DNA, 11467 bp, Unknown
  16S sequences of unknown bacteria
tacaggacacagtcgaaaaggtcctcgtgaagcgcggtcacgcccgcaccgcgaaggaatacatactctatcgcgccgagcgcaccagagtccgcgagatgaactcgaagctgatgaagacctatgaggacctgaccttcaaatccgcgaaggactcggacatcaagcgcgagaacgcgaacatagacgccgacaccgctatgggcacgatgctcaaatacggctcggagggcgcgaagcagttctatgagatgtatgtactcgacccggaccacgccaaggcgcatatcgagggggacatacatatacatgacctggatttcctgaccctcacgaccacctgctgtcagatagatatcatcaagctgttcaagggcggattctctaccggtcacggttttctcagggagccgaaggatatccagagctattcggcgctcgcctgcatcgctatccagtcgaaccagaacgaccagcacggcggtcagtcgataccaaacttcgagtacggaatggctccgggagtgacgctcacctacgcgaagctttacaggaagaaccttgagaaggctctcgacatgatgtgcggcgacgccgactccgagaaggacgcgtctgacattcttgccgaagtcagggaaaagaccggcaaggagccggctctcgcggaggacattattttctcgcgctctgtcgaggacatcatagcgaaaaagtacggcgaggagaccgcgaagcgcgcggtagacgacgtccgccgctataccgtcaaggagaccgagcgcgcgacctatcaggcgatggaagcgctgatacacaacctcaacacgatgcactcccgcgccggcgcgcagataccattcagctcgctgaactatggcatggacacgagcgccgagggcagacttgtcatgaagagcatactcatggcgaccgacgccgggcttggaaacggcgagactccgatcttcccgatacagatcttcaaggtcaaggagggcgtgaactacaaccccggcgacccgaactacgatctgttcaagctcgcctgtcgcgtctccgcgaagcgcctcttcccgaacttctcgttcgtcgacgcgccgtacaatctgaagtattacaaagaaggccatccggagaccgaagtcgcctacatgggctgccgcaccagagtaatggcgaacgtctacgacccgaccaaggaaataacctacggcagaggaaacctctcgttcacgtcgatcaacctcccgagaatcggcatccgcgcgaagggcaacgtcgactggttcttcgaagagctcgaccgcaagatcgcgctcgtcatcgatcagctcctcgaccgcttcaaaatacagggcgaaaagaccgtcagaaactacccgttcctgatggggcagggcatctggcttgactcggataaacttggaatcgacgacaaagtcggcgaagtgctgaagcacggaacccttacaatcggcttcataggtctcgccgaatgcctcaaagccctcatcggcaagcaccacggcgaatccgccgacgcgcagaacctcggactcgaaataatcggtcacatccgccgccgcgccgacgaagcctcccgcaaacacggtctcaacttctcggtaataggcactcccgccgaaggtctctccggcagattcgtccgcatagacaaaaagaaatacggaatcatagaaggcgtaaccgaccgcgaatactacaccaactccttccacatccctgtgtacttcccgatcacggcggcggaaaagataaaactcgaggcaccgtatcacgaactcaccaacggcggtcacatcacctatgtagaactcgacggcgaccccctcgaaaacctcgacgccttcgaagccgtaatccgccgcatgaaagaatccggagtcggctacggctcaatcaaccaccccgtagaccgcgaccccgtctgcggctacaccggcataatcggcaacgaatgcccacgctgccacagaaccgaagccgacggcaaaggcaaattcgaacgcatccgccgcataaccggctacctcgtcggcaccctcgacagcttcaacgacgccaaactcgcggaagtcagggacagagtcaaacactccgtggattcaggactcgtggagctgtaaacgcttataagccgggggaggggaggacgctttgaaaagcgtcctcccctcccactggcacccccctctcctcccgtaaactttatatatttatgaaaataaaaactctcttccgctctctcacaaaattcgaaatctcgctctggctctcatctgtcgccgtcatcatcctctgctccgctctcggcggagtggagccgatctccaccgcggcgtcgctcatcggtgtcacatcactcatattcatcgccaaaggcaacgtcgtcggacagatactcaccgtcgtcttcagcgtcttctacggaataatctccttcggcttccgctactacggcgaaatgatcacctacctctgcatgaccgccccgatggctgtcctcgccgtcttcacctggctgaagcatccctccgacgccggagcgcacgaagtcgaagccgcgaaactcacaaagacccgcgccgtcataatgatcgtattcaccgtcatagtgaccggtgctttctggtccatcctcggatggcttggcgccgcgaatctcgtcgtcagcacggtctcggtcgccacaagcttcatcgcgtcatacctcacatggtgccgcagcccgtactacgcgatagcctacgccgcaaacgatatcgtcctcataatcctctggacatacgccgccatgagcgacatcagctgtctcgccatgacaggctgcttcgccgccttcctcgcgaacgacatctacggcttcataagctggaaccgcagaatggcggcgcaggaatcggcacgcgccgcgagaagcgtctgaacgaaaaaaatcacgccgtttgcggataactttcactcattgtacttgacatcgcgccggttttctgctattatattataaaaatataaaaagccgctcgccgcggcttttcaaaggtcaatcggttagcacggtctaaccgcatgatacggaggaagaaaaataatggaaaagataaatctgacgggagttccggaaaccatgctccagaccatatacgcgagagcaaaagagagccgcacacgcggcgccgtacacgacggtatggcggagaagattataaacagactcgattatgacttctcgctcgccgacaatgaccgcgcgatgcacgacggggtcatcgcgcgcaccatcgtccttgaccggatgacaaagtcgtggcttgataaaaatcccggcgcggtcatcgtcaatatcgcctgcgggctcgacacaaggtgctatcgcgtgaaggaattctctcactggtacaacctcgacctgccggagacaatcgcggtgcgggagaggatgatgccggaggacggagaaatctcctgtattgccatgtccgctatggacgactggggagaatgcgtcagggagaccggcacgccggcgctcgtcatcatcgaggggctcaccatgtatctcaccgagccggacgtgaagaggatctttgatgttatcgcccgcaggttcgggaaggcgaccgttttcgttgagacgatgaacccgcttgtcgccaaaaggttcaaggaaaagtcaatagagggcagccacgcgaaattcacgtggggtgtgaagaacggaaaggttctcgccgggatgctcaatggattcaggtttgcggaggagcacagcctgaccgagggaatggcggaattcgctccgatctacaggttactcgaaaagctgcccgcggtacggaatatctcgaacaagctcattgttctcgagggcggcttttcgcggtaactcagatttaccgctcctgtatctctttgccggtgagatgttcgatctctatctcgaagacctgcgcggcggctccggcgtgcgcgatttcctcgctgatggtctgctcgtccgggtagtatttcgccgccagtcttctcagcagctctgccgccgccgacatgtcttccacaatgtgacacctgccgaacacgacggcactctgcacatacggcgcccacgggagatcctttatggtttcgtttccgtagactgtgaagcacaccttgtcgcaggcttttatcgaatcgaacttgtgacccgcgcgcgcaccgtgaaagcagatttttttcgcggcggcgtcatagagataatttatcgggaccgcgtacggatatccgtcgtctccgttgaccgcgaggacgcctcggcggcttttttgcagaagcgcttccgccgcttccgcgctgatttctttcttacttcttctgatttttctgaacatgattattttaccttgattaaaaaagaattattccggttttgctttccgccacttggtcggcgtcattccgaagcgttcgccgaacatcgccgagaactggacgctgttcgagaagccgcacagcctcgcgatttcggtgcagttgtagtcggtgttcacgagcattccggcggcgtgtttcaggcgacattccacctgatatctcttcggcgacattccgtattttttcttgaacatgtgacggaagtagtcatagctgtagtttcccatccgcgcgagtgaggcaaggtctatattctccatgaaatgcgtcttgatatataccgccgccttttcggtataaacggccgtctcgccatagtcgttcagccgcaggacattcagtatcagctcccggagcgcgatgagcgacagctccgacgaatatcggtctgccgagctgtgctcgtaaaacaccttttcgcagatggcgccgagtctcccgtctccatcatcgccgatgatgtcaggaaggtcactgtcgcaggaaaaaacagtgaagaagactattccgttctcgtcgtgtctctcactgtgtcttgtgtgcgggcggatcagcgtgtacctgccgggttttatttcatatttttcgtccttcagggtgagttctccgtgacagctgatgtaatagacaaactcataccatttgtgcgcgtcctcgggtacaacagttctggcggcgcgtccatcacggtttatcatgtatgttatgattccatctggcatctgttatcatctcccgtaaccattatatcacatatcacggtataaatcaagccatttcatataaaataatgttccaatttgttatattaacctctcaggctttatgctataatggttgtaccaaattacggaaaggaacatatagcaatgaaacacacaaaagcatctgtgcttgttctcgctcttataatgggtcttgtctcctgcggacagacatccggcggggatgatcagccgtcgaacgcgtcgactgacgacacaacgcccgaggtgaccaccgcgctcatcgagaactttgaaaggcgcgatttttccggtatgacctacaccgtcatggcgcggccggtgaacaaggcggatatcaatcagatagcccctgaatccatgaacggcgaggtcgtcaacgacgcgatctacaaacggaatctcgctgtttccgaatacttcggcgctgatatcgagtggcgagagtgcgcggaagccgattatatcggaactttttcaaatacggtgcttgccggggatgatgagttccagttcgcggcggttcacgtcacacagtccggcgcgctcgcgaagcgcggggtactcaccgacctcaacaagatcccgtatctcgacatgacaaagccgtggtggaatcaggcggcgcgcgagaatctgacagtcaagggaaaaaccttcatcggtcagaacgatataccgacctacatggtgatctgctcgaaccatgtaatgtacttcaacaagacgatagccgaaaaatatcaaataccggacatttacgcgctcatacgtgaggggaaatggacacttgataagctcgctgaattcgcgatgccggtgacgagcgatcttaacggcgacaacattatggatgagaatgatctctgggggttcataacgacaagcggatcgacgagcattttcctcccgtcctgcgaccagccgataatgaagaccggagatgacggaatcccgaccctcgcgctgaacacgccgaagatggtgaccatcatcgagaagctgtacaagctctgcatagagagcggggacacgctttttgcaggcatagacaaggagcttgatttctgcaagctgttcacggagggacacagtctcttctataacggttatgtcgccgatatgaatatcatgcgtgacatgaaggatgagtacggtctcatcccggcgccgaaatttgacgaggctcaggagaactatcgtactctgatacagggcagttcagaccttgtggttattccggcgagccttccggaggaaaagtacgagtttgtcggacttatgacagaggcgctcgcggctctgagctatacggatgtccgtcccgccatctatgaggacgcgctcaagggcaagtatatgcgcgacaccgattcccaggagatgcttgaccttgtaaccagaaacatagtcatcgacttcggaatggttaacaacgtagggttcgctttcccgatctggaacatactcgagtcgaagtcgtcagatttcgcctcgtggtacgcaaagcgcgaagctcaggcaatatccgagaataagaagattattgcgctgctgaccggggaagaataatattgcgctcggaagctttacccggtgcttttaacggtcagctctttggcaactcctgtcgggaaaattataaattcggaaattgcaatagcaagatgcagcggttttccggaatttaagacaattttccgcgaaaacctgaataaatcagtgtatcccggaaaaaaaccgcttgtcagaccgataagcggtttttttgactcattttccgaacagcttcttgtcgagccccgatttgaatctcgcgtcggctttctcattgtagcgctttatcagctcgatctccttcgggtcgtagggtctgaggctcgggcggaacagatcgtgctgccactttgtgatgtcgtaatcctttccgccgcccttctcaatcgtcgcccagatgctctcccagggctcgtaggtctggtactttccggcgacaaagccccagttatagctgccgatcttctcaagatagagcagcggataggtctcgtagaccgtgttgttgaatatcctgtgcagccactcggtggcgaagagcggtcggtctgtaagcttcagctgctcgatcaggtcgatgtttccgacataacttccgtagttgtggaagctgattacatccgaaagctcgagcgcgcgctgttcagcctcgcttttcgcgtgaccgccggtcattccggtccacacgtcggcgcagagcggctggtcaggagagatggtccatgcgatctcaaagaacttctccatgtgcggcacacacttcgcgccgcgtccgttgcccggctcgttgaagatattccagacgatgacccgggggtcgtgagcgtaggtcgtgatgatctcgcggacgaattcctggtatttaagcgccgtgtcggggtcgtcgaggatatgccagcgctcgtcgtagccatcgtaggtgcggtgcggagacgccttgcgtccgccgtggtatccgatgtcatatctctgcggacccattaccggcggtttgtagagcgacttcggaaccgagcagtcgttcgcgagcactatcatcgccgtgattccgtgctcatacatgcaggcgagatatcggtcgaggcgtttcatgaagccgtcgtgctccttgtcccagacctcgaactcgagaatcagtctgaatgagttgaagccgatcgactcggcgagctcaatctcgcgctttgtcgtctcgaagcgctcctcaaagccgaactcctgccactggtctatccggttcgcgcagtcgctcgacatgaagttgcagccgcgtatccaggggcgtttgttgtaccaactccatgccgcctcttttgtccatagtccgttcattttgttttctccgtttttctaccggcgcgtatttcggtcggcgattttacatagtatttgcggaattcgcgtgtgaagacgctctgtgacgagaatccgctttcgagcgcgatgcgctgcaaggtgtcgtcggtgttgatgatgcgattcagcgcgtagttcagccgcacacggcgcagatacccgacaaaagtcatattcatactctcgctgaagacctttccgagatagttcggcgagacaccgagctgtccgcgagcgctgagacaatattccgatcgagcatcacgcttgtgaagcgcaccgtgcagacgcttatctcctcgccgagctcgatctcatagccgtggacgtcggtcgggcggatgagaaacatcatcccgcgcgagagctcgaagcgcatgccgtttatgacattcgcggcgctgcccgaaatcacgaactcgagctcgtagaaatcgtggtagtgcaggcggcgcttccacgccccgcccttcttgtcaaagaagtctatcgagaattgttcgttaccctgcgcgatgtgcattatttcgccgatgagctcgatattgtaacgatcttcaagtttccttcgcattctcatcacctgtaactattatacactattcagatagtcaagtcaagcataatttcttgataatttcaacgattgattgacagtgaaaaagccggcggagaacacataccggcacgataatcaatttagggttctgaacatagccccggactcaaagtcattttgaacggggagtagagccgtacactgccttataacatctgtacgccgtccgcatactctggaatcctgctctttcgaccgcttcctcaaggctcacgtccttgtcgttcaacagatgcctgaactcatttacccgaagcgtgtttatttatgtagtcgtttatgcttatccccatcacgtcgcgaaattgcagcgacagagcctgcgacgaacaaagcagttcccttgagatgtccgagagcctgagcttcccgtggtagcgccgatttatgagctcgacggcacgggcggtcaggtcggtcatcgagtgccgcggcacaagcccagtacttccgatgaccattccggtcagcgccgagataatgagccgcagctcggtcgcccacgcctcgctgtatttctcgaacagccctgattcgctggtctgaacggcgatgtccataagcgcgagcataccatgactgtcccttatcgagatgtctgaaaaggttttgtcggcgaggagcgagttccactcgaccgcgagatcccgcggcagctgcacgcagtagtattttccgggacacaacgattggatcgagtgcggcgacatgctcccggcgatcattatctctccctctccgatcgtccgttttcgtccgtcgaccatcacgtcaaggcagcccacggcgactccgacgaactcgagcgcgttgtgaaagtgaggcggcactctttcctctttctgaatccatgctattgagtatgtatgtttatcgttgtgcgcctcgtaataactctccatgtctgactcctgtccttttatagaatttggcagaaatgcgttatgatttgccatttacattataacacagttatggtaaaatatcaagtgaataataacagaaaggaactgccctttatgaaaaaaagactattatccctggctctcctgctcgctctgatacttccgaccgcctgcggtgaaacggacggcgagacaaaaacaaacgacactaccgactcccagaccacgtccgcgcccgtcgaggaggaatatgtcttcccgcgctgggacggcaaggaattccgcgtgcttaacgccgacgatatctactcgatgcacgcgaagatcgatcccggtgtatcaaatggcgacatgctcaacgacgccgagtacaaccgctgccgcgcacttgaggacaagaccggcgtcaaattcgtcgaaacgaacaagggcgtcgatgacgagctcatcgctgaggctcagaaagcaatcttagccggcgacgacacctacgacgtgatcttcgttccggcgtgtcacctgaacactctctcctccgagggctatctcaacaacctgcttgacctcgacgggctgaagctcgaccgcgaatggtggctatccagctacaacgacccgagtgtcgtgaacggcaagctctggtcggcggcaagctacgctcagctcatgataatcgactcggtctggtccgtctactacaacgagacgatcggcgagaagctcggactcgatctgccgtaccagctcgtccgggacggaaagtggacgctcgacgcgatcggtacttacatgaaatccgccgcttcgctgaacggagacgactcgttcacctggaacaccgacgggcactgtgtctacggcatcgcgatagaccatcctcagcacatcgtcacctgcgcgggcgagcgcaccattgagtcgaaggacggcaagctcgtattcaccgccggaacttcccgctattactcggtgatcagcaagatcgtcaatgtgttcaccgaaaacgacggcgcggcgcagtacaagcgggcttcggtcggcgacgacgatccggggcattatgtctacaccttcgagcacgagcgttcgctcatgatgatcgccgaggtctcgaagaccaaccgtatgcgcgacaaggattattccttcggtctgctcccgctgccgaagtacgacgaaaatcaggagaactacatcggcaagcctttctacggcactccctgcctctcgattcctgtgactgtctccgatcctggcaaggtcgccgagatctcggacgctctggcatatctcagctataaggacgtatggggcgtcttccgcaaggtgactctcgagcagaagaacctccgcaacgaggattcgattgagatgctcgacatactgataaactcgatcgtgcctgatctgccgacgatctacaatgtcggaagtgatcttgaggtcgcggtaaagaacgtcatgatggatggcagcgactcggtcgcgtcggtcgtggcatcttatgaagacgctatcaagacgaagctcgacgaactgaacaagtaagtgcggcggcccgacccacaaaaaaacgtgtaaacgaataactcaaccggacgcgtcaggattccgtgacgcgacaaaataaggcagcgccgagactcagccccggcgctgtcttttttctttcttcgtttttacagagttttcagaaatccgacaagtctgtcggctatgatcctgtgcccgtcgtcgttcgggtgaagaccgtctggcatgaacctttcggaccctgtcaacctgattgtgtaaacatatcaaaaactaaatcataaatcccatcccatgccccaaaggaagtcgag

SEQ ID NO: 3980 - DNA, 15703 bp, Unknown
  16S sequences of unknown bacteria
cccttgtccgccgcgcggagcgcggcgctcgtatagacaagggggcgcgcaatgctcttttaggaagattaacgtacaaaaagccgaggtttaaggcaagcggctacgtcctgtaaatctttatctgtcatgataagtacttttaagccgagtttgtcatatattttttgagtatattccttgctttttaggtacttcgggttacttaattcgttatattctatatataattcgtaatcgggtaagaaaaaatcagggtgtaaagtttttgtttccccgctttcttcatcgcgataatagacgggttcttcgtatttaatgcgaattttgttattatatagccagctacaaataattgcttctgctctgcttctaacttttcttccgtcgtcgcaggtataaattaaattaccatattcgtcaagaatttctgtttctgtacaatgtgtaattcgtatatcgacggagcgatccttgtatttggcataacaggaacgacaaaaatgtttgccgttggaaggctctccacagattatacaagttaattccgaattgttcacattttcggaatatctaatagctttacttttacattcacagggtttacctgttgtatgccatttgccgcagtttgggcattgctcgattattccttctttcatttgttgtgcgtgttccctgcacagcttgtctttgcgagcattgccgtaccatatgcttgtgggattgccacaaatcggacaagttgaattttcgtttttcatgcgattaccttctttcttttatgatgattatattttataatatgagcagtattttgtcaatatttatagtttaaatttcttgttgtgatatcgcaacagatcgcgcggcgataaaagcagaaaacctttccttttatcggctcaaaagctccccgcaggggtgatatacattacatgaaggaggaaaaaacaatgaacgaaagaagtttaataaggcggtggaattatccgtattccccgaaagaaaaggaaaaggcattgaagctgttacagcgttcaaacgtgcgtttcgttgcacacagataccactgcaccgttcagacggtctatcgttggaaacggaaatacgacggcacgttggaaagccttgcgaacggttcccaccgtccgcacactatgcatccgaacgcgcagacggacgaggagaaaaagcatatcgccgacttagttcgtcgtaacccgaatatagggctgaatgagttgtacgggaaactgcggctgcattacgcatataagcgtaaccccgcaacgctctaccgctatttgcggcgctgcggtttttacgagcataagcggaagtacataccgtacaagccgaagccgtatgatacgcccgaacatatcggcgtaaaatggcaatttgacgtaaagcacgttccgaaagagtgcgcggcaagttccgtactcgaagatgagcatttttatcaatataccgtgatagacgaaaccacgcgcgagcggtttatatatccctatcgggaacagatagcggataactcggtcgattgcatacggcgggcgattttgtttttcggctataagccgcaaatcatacagacggacaacggttcggaatttacgtttacacagaaagtgaaaggcgggcggcagcatacctttgacaagttctgcgaggaacaaggcattgagcataaaacgataaagccgcgaacgccccggcataacggaaaagtcgaacgctcccaccgctcggacaacgaacgcttttacaagtacttgcggtttcattcctttgatgatttgaaaacgcagatgaaagcgtacctgcggcggtcgaacaatatcccgatgagcgtactcaaaagcaaggacggaaaaaggaagtggctcacgccgaaagaaaagcgacgggaattactcctgctcgattggggcgtaattgaatagtaatccgaacgaatgaaactgacaagccgccgaacagacggctttttcggcgtacacggagaatagaaaaagagggtaaaccctgcggggcttgccctcttttgccgtcgctcggtcgctccgctccctcgcaaggacgggattattgaagcataaggacggtattattaaaaaattttgtagaaattattaaaaagtcattgacaaatcagcacaaacgttttgcacgcgctttcgcccgtaaaaaatttattgtgcattttgtcacttttctttggaagcgctccgcatggttttgaaaaacccgctcaggatcgcggaacattcctcttccaggatcccgccctccgcttcgagcgtgtggttcaaaagattgctcgccgcaagttccgccgtcatcgagcggcccttctgttcgtacgcgccgaaatacaggtttctgatgcgcgcgttgagcatggcgcccatgcacatgggacacggttcgagcgtcacgtacagatcgcagtcgcagagccgccaacttttcagttttctgcacgcgcggtctatggcgtacatttccgcgtgcgaagtcgccatctgcgtcttcgtgcggcggttatatcccgacgcgatgactttcccctcatatacgatcacggcgcccacgggcacctcgccctgcgaaagcccctttttcgcgcgctttaacgcctcgcgcatgaattttatcttttcgtccataacaattcctccgcaagcgttgcgggtacgtatttattctgcgccgcgatgcggccgagttgcgacagtcccacgggatgctccaacccgtccgaacccacctcgatggtgaacgacggaatatgcagcgcgcggatacaccagtccttgtagccgcccgcgctgccgggcgtatatgcgggcgcgtagcccgtcgtggcggcgagcgcccgcgcaatgcggaaatcacgctcgcagtcgccgggctcctgttcgaaataccaatagatctcttcgcccttggaatgataactgacagtcgcgtcggggcagacgttttgggtaaaggctgcgagcgcgcgcgtttcaggctcgctctcgggcgaactccccacaaaattttcgcgcgcgggagaaaacacgttttttatccccgcaccccaccgcgcgtcgaaattcacgttgaggtccacgccgttcgcattggctttccagagagaaaaatcttccccgccgttcagcccgcgtaaaaaatccgcgcgggatggctcttttaccgaggacagaccgctaagagccagcgccacgccgtcgggattggtcacgggcagaaaataaaaggtgccgcacgacgaaaaattcgaaatatgcgaaagcgccaacagcgaagtgatccactccctggcgtgtatcgcgtactgtacgatgacgaagggccgcccctccccgcatttcatacagggaatgtcccttcccaaaacgctcgtcccgacggaaaacttttcgcccgcaaaggcccggtaaaaatcgtaaacttcattgagcgcgtccataaaatcatatatacgcgcgacgggcccgatgtgttcccgaaatcctatttatgatactcgctgcccgcgttgatcatgaacgcgcggtagatctgttcgcacagtatgacgcgcatgagttgatgcggaaaggtcatgtccgaaaaggaaagtttccagtccgccgccgctttcacgcgtgcgtccagcccgcaggacgagccgatgacaaaggtcagttctttgcccgcgtccagaagcgtccgcatttttttggcgagcgacaaactgtccgctttttccccttccacggcgagcgcgacgacgtagcccttcaatgcctttaaaatgctgtcgcactccttttgcggcgtttcgcgctcgcatagttccacaaccgaaacctttgcaaagcgcgacatgcgcttgatatattcgttgacggcgtccgtataaaatttttccttgatctttccgacgcagacgatattgactttgttcattacgcgaaataacccgccagaacggtaaaccacatgacggcgttgatgatgatgcccgcaagagcaaaaatgacgagcggcttgatcgccccctgctttttgcggttcgtcttacggtcgacgaagatcagatagccgagggacaagacgagcgcgacgcccgccaacacgtacaggacgatcattgcgggatcgcttgcctttgcgagccagccgaaacgggtatcgaaaatgatgaacgcgttgtttgcgaaatgcactaagatggcgggaagaatggaatcggcgcggatggcgagcaacgtgaagaccgcgccgcatacgaactgatagacggtctgcatggggttctggtgaaagatggaaaagagcagtccgcccaaaaggcacgccgcgaccgttccgatatccttgatcccctccaagatgatgccgcggaagatcgtttcctccaagatcgcggggagaatcgcgaccacaagaagaacgccgaaaagcccgccccctttgagagaaggcagcgagatctcgggcagcacgccgcccattttttcgatggcgagcgcaaagagattgttcatccagttgagcccgaacagcagcccgaatcccagaacgatcgcgatgatataatatttccagtgcgtcttacggtagccgaattcgcgcggtttattcttatagatgcgcgcaaaggcgaaaatgatcgcgatatatacgatctgatacagaaagtaggaaagatatttgtaccaatccgcatcggcaaaggaagccgaatccacgcccaaaagccgcgcgacggcggcgagggtaatggcaaacagcaggctgataatgaccatgccgatgatggtgcccgaataaacgagaccgctcacagccttgcggggctgattcaaaagcccgcttttcggcgcttgattgttcgtctgattttccataacgccattattatagcgtaattttcgtttttagtaaataaaaatcttttccttttcgaaaatttttgctataatgaaagcgaggtaaattcatgagaaagatacgaacggaagaaatcgaacaagcggtgtacgaactggcgaaaaaggcgtgtttgaaccttacgcccgactgcgtgaaggcgatcgagaacgcggcgatctccgaaacgggcgagagcgcgaaattttcgctcgacacaattttagagaacgcgcgcatcgccgcgcgggaacatatgcccgtctgccaggatacgggcatgagcgtcatacttgccgagatcggacaggaagtcgctttcgaaggcggattgtttacggacgcggtgaaccgcggcgtgcggcgcgcgtacgaagatttttgtttccgcaagagcgtttgcgatcccctcacgcgcgtcaacacggcggacaatacgcccgccgtcgtacatacggaattggtgcggggagatcggatcgatctcacctttcttcccaaagggttcggcagcgaaaatatgtcgcggctgtatatgctcacaccctcgcgcggcgtcgaagggatcgtggagagcatcgtggaaaccgtacggctcgcgggcagcaagccctgtcctcccgtgtacgtgggcgtaggcatcggcggcacgttcgacacgtgcgccctgctcgccaaaaaagcgctcgcgcgagagatcggttccgctcaccccagaaaggacgttgcggacatcgaaaaaatggcgcttcaaaaaatcaacgcgctcggcatcggcgcgcaggggttcggcggcaaaacgaccgcgctcggcgtcgcctgcgagatcatgcccacgcatatcgcggggctgcccgtggcggtcaatattcagtgccactgcgtgcgctgcgggcatataaccctttaaaatcagcgatttatgcgtaacatagtactttctatacagcgaaaaaacaggtgatcgtatgaaaaaaatatttcttcctttacaggacgcggacattgaaaatttaagggcgggcgagagcgttttactctcgggaacgctcctaacggggcgcgactgcgcgcacaagcgcatttgcgagtttttggacgaggggaaagaactccccttttccctgcgaggagaaaccatttactacgcgggcccttgtcccgcgcccgagggaaaggcgtgcggcagttgcggccccacgacgagcgcgcgcatggacacattcgcgccgcgccttctcgatctgggactgaaaggcatggtcggaaaaggcgaacgcagcgacgaggtgaccgaggcgatcgttcggaataaggccgtctatttcgcagccgtcgggggcgcgggcgcgctgtacggaaacgccatcgtgaagagcgagatcgtggcgtttcccgatcttttaagcgaggcggtgtaccgcttcgagatacgggattttcccctcgtggtcgcgatcgacagccgcggggaaagcgtctataaaaaataatggaaacggcggccggaatttcttccgaccgcctttgaaaattcgctttttcaggcgatttgtatggtgcagacgccccgccgagtcaaacggaacatccgtatttgattgtctatactataccccatccgtattacagccgcatgacggattgtgaaaagaaagtaaaagacgcgaaaaaaatccgcgtcttttacttttttaagatttataaggaaaaatactgtgtgatcattttataaatttcaactcgatgaccagtttgccctcttcataccgcgcgaaaatcgttccgcccatcttctcggtaaggatcctcgcaatcgacagccccagtcccgtgccgccccgcgcgctctctacggtaaaaaatctgtcgaacagtttgcctaccgtcacttcgtccagcccgtccgcggtattaaaaaagacgatcgagccgttttctttcagcgtcacgccgaaatcgcgctcggcgtatttgacggcgttgttgataatattcccgaaaatgcgcgacaaaacgtccctgttcaacgtgcgcacgacgggcttttccgcaatatcgatctgcggctcgatgccgcgctcggtaaaggcggtgtaaaactgcgtgagcgaatcctcgagagcgtcgcccagattgatcggttccgtctccgtcgtaccgttatctgaaacgatgacggaataggcaaacagttcttccgtcagttttttcatcgcctccatgcgcccctcgacgaccgcaaggtattcccgctgtttgtcgtccagcctgctctttttcaagagcccgatgtagcccgcagcggaagtgagcggcgttctgagatcgtgcgaaatgttcgtaaccgattctttcagttcgcggttgccgcgagcgtactgccgtttcagttcgtccattctcgcaagcgagcgattgagccgccgcacgaatcgcctgacgtccctgtcgcccgactccaacaagatcaaaaggttcgtgtcggtatccaacttccgttccgcctgttcgttgacgtctttgagcgaatatttgattataaaaattttcagcgacaatgcgatgatcacgatcgcggcaacgccgagcgcgacagacagccagaccatatgccctcacaatcatttatttgatatccgtacggatcatttcagatccattttgccgaacgtccaagcgccgagcgaagcggaaagaacgatccacagagcggacagcggcatcaactgccacaggaccgcttcgcccgactgcaacaagaccgcctgccccgaagggaacagccgcacggcgaatttcgccgcgtactgtaaaaacgcgggccattgacagggtacgaagatcgccccgtcgggatcgttcgggtcgtgcacatagtgtcccgcaagcccgcctaagatcatctgtaccatgaacagcacgacgagcgtccccacgatgccgacgatgatgcccgtcatagaactgcgggagatcatgacgaccgcggtgaagatcgaggcatacgcgcacgtcatcaaaacgccggcaaaaaaatcgcccgcgaccgtcgcggcggacgcccctcccccccagccgaggatcgcggtgcccaaagtgaaattgacgagatgatatcccgcatagatcagcacgcacagcgcgcaggcggtaacgagattgcaccaatacagtttcgcgcggccgctgccgacgatgactttgttccgcatggcacccgaagtaaattccgtaccgacaaaaatactgacggtgagcgcggacaaaattccgatcaggctcattccgccgccgaaaccgctatagaatatgcccaatgcggatacttcgtatcccgaaggacgcagggaatatgcctgatacaggcagccgatcagcgcgacggcggcgttgacgataagacacgcgaaaaaaatcttgcttttcagagcgcggtacagagaagaacgaaaaagtctgatcatttcgcccctcccaccagattgatgaaatatccctccagatcttcatcgcgttcgctcaccttcaaaaggtcgatcgaaccttccgtcaaagcggcggcaaggtcggaaatcttgacgttgcaatacagttccgcttctgtttccgaaaagatcttataatcgtacagcatcaattgccgttcgagaacgagcggcagacggctcgtcgaactgaccgtaatatgaatgcttttacggcacgaccgttccagttcctccgcggatatctccttgatgaggacgcccttttcgataaagccgtaacaggtggcaagtttggaaagttcgctcaaaatgtggctggaaatcagtatcgtgatgccgcgctcgcggttcagacgcaaaagaagttcgcggatctccacgatgccctgcggatcgagcccgtttgtcggctcgtcgagaatgatgaaatccggattgctcacgagcgccattgcaatgcccagccgctggcgcatgccgagcgaaaaattgcgcgccgttttattgccggtatcgctcaatccgacgaagtgtaacactgcgtcgatcacctcgtacgaggtgacgcccatgacaagacattgttcgtacagattctgccgcgcagtcatcctgggatacacggacggcgtttcgatgatggcgcccgtacgcctgcggctcagattgatcttgcgttctttatcctctatgccgaacaggcggtaagagccgccgctcttttgcacgagcccgcacacaaggcgcatcaccgtggttttgcccgcgccgttgcggccgacgaacccgtaaatttcgcccctcttcacgtgcatattcacgccgcagaccacgtcggtctgtttatagcgcttatacaaatcgtgggtttcgagtacgtattccatttgatcgctccttttcccgaaagatgagagcagtatactcccgccgatttaaatttcgcttaaaatacctttaagaaagtttaaagatgttccccgtcgaactgaaagcctatgccccacaccgtgcggatataatttctgtcgctcgcctctttgagtttgttgcgcaggttgctgatatggacgctgaccgaggattcttccccgtcgggcgtatagtcgctgatataatcgaggatcgccgatttggaaaaaacttttttggggttgagcaaaaacattttcagaatggcaaattccgtctttgtaagtttcagaggctttccctccaccgtgaccgaataagtatccgtatccattacgatgcccgcgcgggatacgacaccgtccgcgtgtgcctcgcaccttcttagagcgacgcctacgcgggcgagaagttcgtcgttgtcaaaaggttttgtaatgtagtccaccgcacccgcattgagatttttcactttgccgctcacttccgttttcgcgctcaggatcataacgggcgcgagttcggaaatattttgcaacacctcttccccgctcatgccggggagcatgagatcgaggatcacgagatcgggtttactcttttccaaaagaagcagaccttccgtacccgaataggcgcggataaccgaataaccgctctccgtcaagagttcttccaaaacgttaccgatgtaaatatcgtcttcgatgactgctatcgtcttcatatttcctccgcaagacaagcgccccgtatcatgtgaacggggcgcgtttttattatacaggcaacggcagcgcccgatcgttccgataggtaataaaacgaatggtatagccgttagtctccaaaggttcgctttcggaaacgatacggaaattttccatctcgtcgagatttttaaaaaacacttccgcgccgccgtttgccgcgaccttcgtcacgatcacttcgctgcaatagccgagcatcgtcgcgtacatcatcgcgccgccgaccacgtacacgtcgtccgcgggatactttgcgatctctttaaacacctcgtccaacgtttcgaaaacaaggcagtcctccctcttttcaccgcccggccagagcacgatattcacgcgcttgggcaagggttttgcccccggaaaggaaagcaacgtattgcttcccatcacgacgactttttcccgcgtcgtttcccgaaaatgtttcatatccgcaggcagggaaaataagagatcgttgctcctgccgatgccccagttctcgtccacaactacgattgccttcatgccaatcctcctcttttaatcgaattatgtcacgcatagtactacgaaaatgccgttttttagattgcaacgggtattttgatgtctaaatcggtatattgatagttttccaagcgaaaactattttttgtgaatcgatagaaatctttgaccgtttcgtcgacgatcaggcgcggcgcagggtactgcggattgcggatgatcttttccacgatgggtacgtgccgatcgtaaatatgtgcgtccgcgaccacgtgcaccaactcccccgcttcgagcccggcggctcttgcaaacatcatcagaagaacgctgtactgcaccacgttccagttgctcgcagccagcatgtcctggctgcgctggttcaaaattccgttgagcgtattgccgctcacgttgaacgtcatcgagtaggcgcaagggtacagatgcatatctttgagatcttccacattgtacatatgcgcgatgatgcggcggcttgcgggcgtatgtttcaagtcgtacaagaccttgtctacctggtcgaaaacgccttcgcgaaattcgtattttttccccaactgatagccgtacgccttaccgatcgagccgctcccgtccgcccaactgtcccagatatggctggacagatcgtgaatgttattgctttttttctgccagatccataagatctcgtcgattgcggatttcagataggtgcggcgaatcgtgaggatcggaaactcctcccgcaagtcgtagcggttgacgatacagaattttttgattgtatgcgcgggcgcgccgtcctcccagcgggggcgcacttccctgtccgtatcccacacgccgttctctaaaatgtccctgcaattcgcaataaaaatttcgtctgccctgctcataatatctcctttggtaatattttcaccgttaatttggctctaaatggaaatgccaaagtactatttgacttcatcgaaaaacaaatttcatatgtacctacttcaaaaatccaattacttggtttataattaatttccccttctggagaaatgtagtgcattacatcacaatctatcctgttttcatctgttaaatgttttatactaccatcctcaaataaggcaagcaccataaaatgtctgtattttgcgtcaaactcaatttctatcgtcttatggttttcttgctcggtcagttcacaataagcatcttctcttttatcatactcatgttcgacgatcagcatcgttatatgttgccgattcggatacggatctttttcgcaagcggtaaaaaggagtgcgctgaaaaatacgatcgacgcgatcataaccgatcgccccgctgataaaattctttttactttcattttatttccctttaaacaattcccgttgcagcgcttcttcccacagccgcagtttttcggtgcgggcggcgtcgctcatgcgggggcggaacgtatgcgcgccctctgcgcagtctttcagttcttccagatcgcggaaatatccgctgtacagtcctgccagatacgcggcgccgagcgcggtcgtctccgcgacggcgggacgaacgacctgcgcgtcgagaatatccgactgaaactgcattaaaaagtcgttggcacttgcgccgccgtccacacacaggcggccgatgctctttctcacgtcctgttccatggcatgcaccacgtcgaaaacctgaaaggcgatcgcttccagcgcggcgcggacgatatgcgcacggttggtgccgcgcgtgatgccgtagatcatgccgcggcagtcggaatcccaatgcggcgcgcccagccccacgaacgcgggaacgaaacagacgccgcccgtatcgggcacagatcttgcgatcgcatccgtttccgccgcgttggaaatcagtttcatttcgtcgcgcaaccactgcaccaccgccccgccgatgaacacgctgccttcgagcgcataactcggacgggaaagcgacgccgcgagcgtggtgatcagcccgttggaggactccaccgcgcgtccgcccgtattcattaagaggaaacagcccgtgccgtaagtgtttttcacgtccccttcccgcacgcaaagttgcccgaacagcgcgccctgctgatcgcccaccgcggcgcacacgggtatttccgcgcccgtgacgctcctgacgctcgtgccgaaatcgcccgccgagggcaaaacttcgggcaagaccgcagcgggaatatcgaacaattttaaaaggtcttcgtcccattgcagcgtatggatattgaagagcatggtgcgcgaggcgttcgtgtaatcggtcgcgtgcactttgccgcccgtcagccgccagatgagataggtatccaccgtaccgaacaacagatcccctttttgcgcgcgcgagcgcgcgaacggaacgttatccaaaatccaggcgatcttcgatgcggaaaagtaggcgtcgatattcagtcccgtgcgctcgtacacgaaacgcgcgtgacgttttttcagtttttcgcattccatcgaagtcctgcggcactgccatacgattgcgttgtagacgggtttacccgtgtatctgtcccacacgatgaccgtttcgcgctggttggcgacgccgatggcggcgatctcttcgggcgatacgccgcccttttcgagcgcaagccgaaaactttccaactgcgaagaaaaaatatcctcgcagtcgtgctccacccaccccgctttgggatagatctgcggaaattccacgtgcgctttggaaacgacgcggccccgcttatcgaatataatcgtgcgcgaactcgtcgtcccctggtcgaatgcggcgatatagcgtttctccattttcccctccgatcaaaaagcgtctttttcgagattgcgccagcgccgcgcgataaaacgcatgcgccaattctgcggaacgatcttcggcacggtcgccaaaaatttattccagaatcctggaatcagttgttttcgattgcggcgcacggcttgaagacttttttgcgcgatatattcgggcgtttttgcagacattttaccccaaagcccctgtccctcgatatccttgacgatatcggggcgggtatagacgccgcccggcaataccgtggtgatctttacgccgctgcccttaagttcggatctgagcgatgaaaaaaaactgacgagcgccgatttcgtggcgctgtacagcgcgaaatacggcatgggatagacgcccgacatactggagatcgtgacgatctccaacgcgtccgcgcggcgcgacaaaacgaaccgcgtcaccgaaagggtcgcttcgagattgacgcggcattgaaagacgatctttttctccgtatatttttcgaaagctttctgaatatccgcgcccgccacgttgcaaagcctgtcgaacacgacgccttgcgcgtctattgttttatacatttcggcgcgggatctttcgtccgtcagatcgcaggcgaagacgatgaggcgcagggagggatatttggaagaaagttcttctttcagagcgttcagtttatccgcactgcgccccgtcagaaacagattttgcccctttgccgccagagtttcggcaaaagccctgcctatgccgcccgtagcgcccgttatcaacgtgtaaaaaagtttttccgacgaattttccattggttttattgtatcataaaacagaccttctgtaaagtgcccgccgtcatacttttttattaagtcgcccataaaaaagcgttatgttgctgcgatgcggattttattgacaaaaacgcccgaaaagtctataatcgcaaacagaaacctatacgaggtgcgatcatgagaattttagcgatcaacgatatttcctgcgtaggaaaatgctccctgacggtggcgctccccatcatttccgccgcgggttacacctgcgacattctgcctaccgccatactttccacgcacacgggcggctttacggggtacacgttccgcgacctgagcgaagatataccttccgttttaaatcactggaaaagtctcggactggaatacgatatcattatcagcggctatctgggcagcgtcgagcaggtggagatggtcaaagagatcaagggcgcctttttaaagagaggcggcacaatgatcgtcgatcccgtactcggagacaacggaaaactttacgcgcattttgacgaaaacttcgtcaacgaaatgaagggactgtgccgcgtggcggacgtcattgttccaaaccttacggaggcttgttttctgaccgatacgccctaccgccccgacgccgaatttcagagcgtgcttgaaaaactgaacggactctgccctcacgcttcgatcacgggctgcgaggaaggcgcgtcgagcacggtctattatacggacgaaacgggcgcgctgcgccgctattccaccgaaaaagtgcagggacagttccacggcgcgggcgacgtgtacgcgggcgccttcgtgggcgcgctcgccaacggactaagtttagaggacgccgtgcgcgtttccgcggattttaccaagcaggccatagaacagactgcgaaagacaaaacagaggcgcgctacgggctgaatttcgaaagcaaactgttcggatatctgaaagcgctgggaaagaggtaaaatttttcacaaattttttgcctcgaatctgttgtaattttccgaaaggattgttataatagaatcaagatctgcggtgttcggagttcggattatcttaatccacatttttaaaccgggagcgctttatcgtaaagtcttggccgataggcaaggtctgtttatgaacggaaagtctgacgcggcgaagcggcgcacccacctgcgagaagcgggttaacactttttcgttctgcggcacaggcgggtcgatatttttgtaataatgccgaaaatattcggtttttcccctataaaaaagttgccaagatatttcgattatgctataatattatagtaactttttgacacggcctcatggtcaagcggttaagacgccgccctctcacggcggaaactcgggttcgattccccatggggc

SEQ ID NO: 3981 - DNA, 1681 bp, Unknown
  16S sequences of unknown bacteria
ggcagccgccgcgatgaccgcgatgccagccgtctttttgtttctcatttccgtttcccctttcagctgttcgattttctatattttaccatgtttcccctgcccgctcaatgacgcaaaaaagatgccatccaggcaccttttcacagcttgtggctgaatgtcagcgcatcgacgaaatgcaggtccaatcccgcgatgacttcatccacgatatcatattgttccttcttcagatattcctggggatcatgggcatccagcccatagacgaccttattgcctttgcgggccgccacttcccagaagcgccgatatgggtagaccaagcggttctgtctgccgatggtgcgcatgccgcgcttgatgccgcccatgttcacctcaaggggcacattcgctgccagcgccgcatcgcagatcatctgcgcggcctgttcacaggcgtcgctccactgcgcgcggctgtacatgaacaggtccggatgggcgacgatatccgccatccccgcctccagcgcctccttgatctgcccggcatacagcagcacatgaccgtcatcgttctccacataataatcgccgatcgcccttccctcgcgcagcgcagcggaatgctggccgatgatgcagtagtcaaacatctcccggtatgcacgcagctcgtgctggaacgcctgatagttttcgatctccagaccgatatagatatcgatctgatcacggtaacgcgcctgcaggtccttgatggaacggatgtactccggcagctcgctcacatccatgcgctcttcggggtgatactgtcccggatagggcgcatgatcgctgaagcccatcttctgatagccggcggcgatcgccgccttcacatattcttcatccgtgccgacggcatgtccgcagcggctggtgtgactgtggtaattgaacaattgtttcatgtgtaatcatcctcttcataagtaaagcccagaccgtgcacctcatcggtgtcggtcacgataatgaacgcgttcgggtcgatccgcagcacctcatgctcgagcaatggatactgcttgcgcgagacgacgaccatgatgacctgacgctgctccttcgtataaccgcccttggcctccagcagcgtggtgccgcggtaaagctgttcgtggatatatgccatcagctcctcaggatgcgcagagatgatcatgcagttctttgaacggaccgcgcccagcgtcagcgtccggtcgatggcgacgctgctgacgaagacggagatgatccccatgagcgcggcctgcaggccgtaagtcgccaccccgagcccgacggtcagcgcgtcagtgatcagcaccagcgtggacagcggcagatgggtgaagcggtgcacgatcagcggagggatatccatgccgccagtactggcgccgcagcggaacacgagcccgactccgcatcccatgaacacaccgccatagatggcagccagatactggtccatgatgaaggtctccggcgtgaaccattccgcaagcccccaggagagcagagagataaacagcggataacaaatcgtagaaagcagcgtcttcagcgcaaactgcctgcccaggatcaccgcaccgatgccaaacagcacgatggtcgccgcattgatgaacagtgttggttctatagcgaccagcggctg

SEQ ID NO: 3982 - DNA, 4006 bp, Unknown
  16S sequences of unknown bacteria
tgatatcatttttcttcacatagtcctgatactgattcatcagcctggtcgccgccgcaatcagtctctctgaggagacatcgacctgaatgttgttcttcaccagctcccggatatcatttaccacccggctcgtgacctcttcgctcgtcagatactgtcggatcgccgctctcatcttctcagaatcagcctccggcttgtccttgatgctctcctgatagccttgcaaaagctctgtgagcagcgactgcatgccctcttcggtaaaattaaatttcatctggctgaccatatccatcagattcagctttggtgcagccggaatattagccgcgaggtcttccggcttcagcacatccaacagatccagatccagcgcggacaaatccagcattttcgaaaagtccggcaaatcattggcatccagctgcatgcttctggacagatccggcatcttcatatttccaccggacagccccgataaatccagtgacaatacactctcatcaaactgaaacgcctgctgcaacgcatccgtatcgatctgaaagagcgattccagatcaaatttaccatcatcggcttcgttttccctaccaaatgcctcaccggtaaacacgttcgtcttctcatctgcgagctgtgcctgtacaatcggacttttcttcgcctcctcgatcacgtgatgcgtcagtgccttcgggtagcagattcccgccgtgagcatggaagccgtcgcaccttcctttggctggacgatgccgacgatcgtcagagtctccccgtttttcacaagttttttcatatatgcatcattgtctgttttgtccttccagactttatagtctgcatcatattcataatagtcggccgcgttgactagccggaacgtcgttccgagaatctgatcataggagtagccatctgcctgtgtcggcgtctcgaccgtctcttctgccataaactgttccaccatctcctccagctccctgctgtcacgcagtccgagcgtgtactggagaaaatcactgatatttccattcggcgtgagcacaagcacacattcctggtaggtctttggccagcgtcccgcctttacatcgtactgtccttcgtagagcgacgctttctccggcatctcataaaaaacatccgtgctcatggtcatcgacataatgctgttggacgatgtcgaggagccaagtcccatcgcagaaaaagacgtatccggatttacctgccggatctcatctccctcttccctgaaaatctgcggcgacattgaatacgtgtactctacggcatttgcatactgcccgattccgctctcctcactgtcaaggtattcctttaaggactgcagatcatttgaattcatcttggaaaacatattcgtcaccatctctgtgacaccgaccgtgccttctgcattctcttttcccgcagcctctgccgctcccgccatcatcgaggtcaggtcaaagcccgtgctctggatctgcaatggatactcagagagcgtctcctcctccatattctgaatgtaacgattcacaccatttgaaatcgacagaatcagggcgataccaataataccgatcgaaccggcaaacgacgtcagaagcgtccgcgccttttttgtgcgcagattctggaagcttaaggagagtgctgtcagaaaagacatcgatgactttcccatatttttatgcaccggcggtgtcaggctctccgcttccggtataaacggatccgtatccgaacggattttgccatcacgcagattcaccgtccgcgtcgcatacagacttgcgagctccggattatgcgtaaccatcacaacgaggcgttcttttgcaacctcctttaaaagctccatgacctgcacgctcgtatctgaatccagtgccccggtcggttcatctgccaaaagaatatccggattgttcacaagcgcccgcgcgatcgcgacacgctgcatctgcccgccggacatctggctcggcttcttgtgcaactgcgcgccaaggccgaccttttccagcgcctctgtcgcccgacgtctccgctcgctgccggaaataccggaaatcgtcatcgccagctccacatttgcgagcacggtctggtgcgggatcaggttatagctctggaacacaaagccgatcgtatggttcctgtaggaatcccagtcccggtccttatactttttcgtcgaaataccattgatgatcagatcgccgctgtcataacgatccagtcccccgatgatgttcagaagcgtcgtctttcccgaaccgctcggcccgagaatcgccacgaattcattgtcgcgcagattcaggctgacgtcatcaagcgccttctgaaccagcttccctgtgcggtattccttccggatatgttgaatctgaagcatccatttcctcccgtctcttctataaattaatcttacattcttttcagccgctttctgaaatttttgaagatatgcttccgttttctgccggttttttaccttcgtctcataacaggaaaagccctgacaaacgcagggctttcgctgactttttttattatacatcctattagaaaaggctgtcaatttttttgtatcattccatcaattcagctctgtccccgacttgattcctctaaggtaagccatcgcattgtccaacgtcgtctggctgattgcgccgagggcttcttcggtcaggaatgcctgatgggaggtcacaatgacattcgggaaggataagagccgcgcagtcgtggagtgcatcaggatgtcatcctcgcggttctcgtatacattctgtgtctcctcctcgtacacatccaatccgacaccaaagaatttccgctcccggattccggcgatcagatcatcggtctttacaagccctccgcgggaggtattgaccagaatcacgccgtccttcatcttgttgatcgtatcgatattgatcatatggtgcgtgctctccatcagcgggcagtgcagggagatcaggtcactcgttgcgagcagctcatccagctccacataagtaacgaaatcaagatccggattctgatacatgtcgtatgcgatgaccttcatgccaaatccatgacaaatgcgcgccattgccgctccgatttttcccgttcccacgattccggctgtctttccgtaaaaattcattccggtcagtccctgcagactgaaattgttctcgcggactctcatatatgccttgtgcagatggcggttcactgccatcgccaaagccatcgcatgctctgctaccgcctccggtgaatagcccggtacgcgcatgactgtgataccatactctgtcgccgccttcaaatctacattattgaaacctgcgcagcgcataagtacaagcttgacccctctgttctgcagcacctttaatgtcttttcactcacatctgagcttacaaacgcgcagattgcctcgctgtcctgtacataggacgctgtcttcggtgagaggtccgtctcccagtactccagctccagctccggatactgctctttgattctgttgaaggattctttatcataactttttgcaccaaaaaatgtaattctcatgctctgtctcctctctgatctcacagtttatgtgaaacacgataaccttgtcgctctgttcgttaatattttaacgagtaagtcattgaaaatcaattggcagatttacctgtctttttttcacaattgctttcttttcctacaatatttcctgcttcttggcggtttatacaaagcgtttgacaggacaaacctttttttcgtcgacgtgacactctttcatttccgcttttgcttcttctacagaatcaagtgcattttccatgtgcttttgcaaaaacttcttgcatctgtttccaaagtatggtatgatgtctctcgtgcaaacgcatatgccactgtggcggaattggcagacgcacttgactcaaaatcaagcgggtaacaccgtgc

SEQ ID NO: 3983 - DNA, 32759 bp, Unknown
  16S sequences of unknown bacteria
tcaatgcggtagtagatttgcccgtacctcctttctgattttcgattgcaattaccttgcagttcacttcgttaacctcctttgtttttcagccgcaaagtatacggctatgtacggttacaaggaaaaaaacgggcataaaaaaagaccgtaaaatctttatatgtaataaagaaattacggtctgaatatatgtcgtgagttcgaatccctgtggaggagcagggtaagccgctcgtaaagggagcgcaaaacccgatcgtcaagcgagccggtagcctccttgcggtaacgcgcaataaacggtatggtattgccgtcgtctataagctttacggtattttcaacctgaaacggttttaaggaaaattcttccgtaagcgtttttataatatccattttatcaccttgcctaagtttaccataaagcgggattatgtgcaataaaaaatggcttttgccgcggtttacgcggtaaaagccgtttcttatagtttgattattcttctgtaaatgcgtctttacttaaaccacatatcggacatacccaatcttcaggaacatcttcccatgatgttccgggtgcgattccgttatcaggatcaccgacaacagggtcataaacatatccgcagggacattcgtattttttcatagtaaaaaccctcttttatttttgattacttgctcattatcttagatattgtatccataattttgtcatggcaaccaccgcatccggtcgaacattttgtgatcctttgaacatcttcaaaagctttttccacattctcaaattttacttcacggtgaagtacattttcaacatctgcataggttacttttttacaattacatatcgtatagttttccatcatatattaccctgtacattaaccgaaatatctctttaaaagaccctcaaaagctctgccgtggcgggcttcatcctttgccatttcatgaacggtatcatggatagcgtcaagattaagttccttagcaagcttcgcaagttcaaacttgccctttgtagcgccgttttcggcgtctgcacgcatttcaaggtttttcttggtgctgtcggttacgacctcgcccaaaagctccgcaaacttagcggcatgttcggcctcttcaaaagctgctttttcccagtacataccgatttcgggatagccctctctatgagctactcttgccattgcaagatacatacccacttccgtacattcgccgttgaagttttcacgaagaccgtcgattattctctgatcggcgcccttggctatacccacaacatgctcggcagcccatgttttttccgcagactgttcagcgaatttagatgccggagcgtggcatataggacattcctccggcgcagattcgccttcataaacataaccgcaaacaagacatacaaattttttcatttttaattcctccgtaaattgattttaatcagctctgcatttactgcacacaccgtacacgatatataccgttgtttcgcttgagaagccgttttcctttgccgttcccgacagaatatcctgctttaacggagcgtcataaattttcccgcagcgtttgcaatgcagatgcgcgtgcggagcgctgtttccgtcaaagtgttcatatccgtcgccgacagataaggaaagtataacgccttcttcgcttagagccgcaaggttacggtagaccgttccgagacttatattcggaataaccttgcgtacctcgttataaacggcagatgccgtggggtgtgtatcggttgaatgcaaaacctgtaaaattgtttcacgctgccgtgaataatttttcattgaatcacccaaatcaataatgattactattttattatacacgcaaatttgattttgtcaagaactttttttcaaaaaccttgacattatcaaccgagaccttaagtataccttccttttcgcctctgttcacggcaagtattctgtggtcgggtattttggagagcggttcgctgtaatccttatacatttcgtaaacgccgatatcctccgtgattgccttgacggtaagcataccgtgcgcaaagcaaacaaatctcatacgtttgcgtatgtcggcgtcgtcggaaattttttcggcaattatatccatagctcccgtaagcgcttcttctgctgtttcaacccctttttcggggtttatatattctgccgcaagcatcataggaggtttgcagtcgggcgcctgtctgtaactttcctccgctaacggctcaagacctttttcttttgcggtttttcttgtagggacggtataaatcgtcaagctcggtcagagttttcgctccgtctatcgcggcggaaagctcatcggttaaagcatcctgttcgtctatggcggttttgattttttggcgtgtttcctccatattgcgcagatagttaagctgcggaaatgaaaaaagggactttaaatccggaaaatttcatatccctagttcaagtccctttggtcgaacatattattgaattttgtgccctaaaactgctttttgatttttgccccataaacgcaagaaaacccttgaaatatcaagggttttcaggctttgtgctttatagtcgcacaattatggcgcgctgaaagacgagcgttgtttaaaacagtcctgcggactgttttaatagtgagagtcccttccaagaggacaagcccgcggagctgtccgattggggtgatatatacaaagtataaaaagagcagtaagccgggttacagcttactgctatagatggcgcgctgaaagggactcgaacccccgaccctctgcttagaaggcagatgctctatccagctgagctatcagcgcaaatatatactgtattttacagcaaatgctattataacacagttttaaaaaataatcaaggcttttttcttctgttttagggaaaattaaaaacgaatattcaagcattgccccgcgaccacttgataaagcggagtaattgtgatatacttaattataatttaattgatttaagtaacggaggaaaataaatgtctgaagaaaaaaacacaggttgctcgggcaactgctcatcctgcggcgaaaactgcgcctcgcgcgagggggcaagccttatagagcctaccggagaatataataatataaagcacgttctggcggttgtaagcggtaagggcggcgttgggaaatcaatgaccgcttcaatgctggcagtgctgcttaaaagaatgggtcatactgtgggtatacttgacgcggatattaccggaccctcaatacccaaaaccttcggaatacgttcgcgcgcatatcagaacgaaataggcattttgcctgccgaaaccgaaaccggcattaaagtaatgtcaataaatctgctgcttgaggagggcgatatgccggtgctctggcgcggaccggtaattgcgggtgcggtaaagcagttctggcacgatgttgtgtggggtgaccttgattaccttataattgactgcccgcccggaacgggagatgttccgcttacggtattccagtcaattccgattgacggcgcggttattgtaacctcgccgcaggacctggtgtccctcatagtgcgaaaggcatataatatggcaaaaatgatggatattccggttttggggcttattgaaaatatgagctacgccgtttgcccggattgcggcaaaaagctgcgccttttcggcaagggcagcggtgccgttgccgatgagctgggactcccgcttttggcggagctgccgatagaccccgatttggcacagcttgtggataacggcgaatttgaaaaattcacctgcacggcgttggaaaacgccgcacgggaaattgataaaaaattttcctgatgattttttaaattaaacggaaagacgcatttaaggcttctcttaaatgcgtctttccttatttaactcttttaattataacgtgaaatcaaagcgcctttaaaaccgaaagcaaatacttgcgcagcattgtcatatcctgagagttgaggctgccgaagcagtgctttcggcaggcggctctgaaacggcggacgataccggctccgcagagcttatctccgagcttgtgctctcggcggcagagggtgccacaggctgcgatgaaacggtgctgctgtttgcaaaagtgttattcggtgtttttttgcagcctgatacaagcattgccgcgcaaagaaccaaagccgccgctttaattttacctctcatatttttaacccattaatttattggctataagaaaacagacgcaccattcggaaaaaattcaaaaatgatgcgtcttgcttaaaatataatcttatagggtgtttttacttattaagcgcctgctgaacggcaaccgcgcatgcaacggtcataccaaccatcgggttgttgcccgcgcctataagacccatcatctcaacgtgagccggaacggaagaagaaccggcaaactgagcgtcggagtgcatacggcccatagtatcggtcataccgtaggaagaaggaccagcagccatattatccgggtgaagcgtacggcctgtaccgccgcccgaagcaacagagaaatagttcacgccgttttcaacgcaccatttcttataagtgcctgcaaccgggtgctggaagcgtgtcgggttggtggagttaccggtaatggaaacgcctaccttttcgagcttcattatagcaacgccctcgggaacgttatccgcaccgtagcacttaacggctgcgcgcgcgccctttgagaacggcttttcgtaaactaccttaacctcttctgcataggggtcaaactcggtttcaacataggtgaagccgttaatacgggagattatataagccgcgtccttgccgagaccgtttagaataacgcgcaggggcttaactcttaccttgtttgcgttaagagcgattttaatagcgccctcagccgctgcgaaggattcgtgacctgccaagaagcagaagcactcggtttcttcggaaaggagcattttaccgaggttgccgtgaccgagaccgaccttgcggttttcggcaacggagccgggaatacagaaggactgaagaccgataccgatatttgcggcagcggtagcggcggatttatcgcctgtgcgctcagcctctttaaaagcgatagccgagcctacggtgtaagcccactttgcgttttcaaagcagataggctgtgtttcctgaacggtggtataggggtcaacgccgtattttgcgcatatatccttgcactcgtcaatagaagagataccgtaatttttaagaacgccgagaatctttgcctcgcgtctctcataaccttcaaactgtgccattataccgtacctccttattcttcacgcgggtcaatgtatttgaccgcgccgtcttctttattgaagcgtccgtagtgacccatagactgcttgtaagcctcgttcggctccataccctttttaataaggtcggtcattttgccgagggagacaaactcgtagcctataacctcatcgttttcgtcaagagccattcttgtgcagtagccctcggtcatttcaaggtatcttacaccctttgacttggtgccgtacatagtaccaaccattgagcgcgcgcccttgccgaggtcttccatacccgcgccgattacaaggccgccctcggaaaaagcggactggctgcggccgtaaacaatctgtaaaaacagctcgcgcatagcagtgtttatagcgtcgcagacaaggtcggtgttaagcgcttcaagcacggttttgccgggaagaatttcggcagccatagcggcggagtgggtcatacccgagcagcctacggtttcaaccagagcctcttcgattatgccgtccttcacattgagcgacagcttacatgcgccctgctgcggtgcgcaccagcccacgccgtgggtgtaagcggagatatctttaatctctttagcctgtatccacttgccttcctccggaatcggagcgggaccgtggtgcggacccttggcgacaggacacatattttctacttcctttgaataaatcatatatgtactcctttcgtgcgggactttaaaatccacacaagtatgcttttattatatcaaacgccgctaaaaaaaacaaggggttatattaaaaaataaaacgtaagcgtatgctattgactttaaaacagggtaagggtataatttagacaacgcaaaaataattgaacggggtgtgttaaaacgaagaacagcggtaaaaaaatcagaatagcggtgctttcagccgcaatattatgctttttggcttgttcggtgtattttattcgcacttttctgcgctcggacgggcttgacgatattcgctcgcaggtatcaaccggcagcagcaacagcagctctgcttcctcaaaaacaagctatgttgaaacgccggtaaactttgttgagctgaaaaaaatcaaccctgatgtttacgcctggataaatattcccggcacatcggtggattaccccatactgcggcgggaggacgataacgcctactaccttaaccatacggtggagaacaagcgctcggattacggcagtatttacaccgaaaactacaacgataagaattttgatgatttcaacacggtggtttacgggcataatatgcttaacggctcaatgttcggctcgctgcggcgctaccgcaacaacagggactacgcgaaaacgaataacgttattaacgtatatctgcccggcagaattttgaaatatcagattttcgcaacatatattacagacgacaggcacctgcttttaaacaatgattttaaggatagggctgtctgcgaggaataccttaaatcggtttttgcggtaaaaaccgcaaattcctttataaataccgatttggtggttgacgctgacgataagataataaccctttccacctgcgtgggaaatgacgacaagcggtttttggttcagggagttttgacctatgacagcagaaaacaataacgccgcggctgcccaataaaaaaggcagccgcgattttcagcgttaattttcttttttatcctcggcggcacgggttatggcggtgctgccgaatttttttcgcagcttataaacagaagcctctattttttcctctgcctcctgcttttcggaatttccgaaaatatcctcctgcaccgcggtttggtaatcccttaaatttatagccctcagccctaccgagcgcagcggctctgtaaagctgaaatgctcccttaaaaggttcattccgcgctcggctatggcttttgcgctgttcaccgagtcgggaaagctgcggctgtactccttaaccgaaagcgaggtattgcgtatatgcacctgcacgccgcccgcatacagcccgtgctcgcgcagagaatcggatatttcgcgtgcaagccttaaaaacattccccaaatttcatcgggtgttttaaaatccgccccgcgcgttacagagcggcctatgcttttaggtacgcttttttcatccagccgtgatacgggcgaattatcctcccccaaggcgcagcgctttaattcaagcccgtttttcccgagcaggcgctctaatgtttcggcggagcacacggcagcgtcgcctattgtgcaaatgccgcaggagcgcagtttttcggtagttttgcgcccggcaaaaagcaggtcggaaaccggcagccgccatattttttccttaaaattttcgcgggatattaccgttatgccgtcgggctttttcatatctgacccgagctttgcaaaaaccttgttaaagctgacccccaccgaaaccgtaataccgagctcccgctttatttcacggcgtattttatcggctatttcctcaccgctgccgaaaagcaggcggctgcccgtaacgtccagccagcactcatctatgccgaagggctctatcatatcggtatattcttcgtaaattttgtgggctttctttgagtattccttgtatttatccatgagcggcggcaaaattacaaggtcggggcattttgcccttgcttcaaaaatagcttcggcggttttaactccgcagcgctttgccgcctcgttttttgcaagcacaatgccgtgccgctgctccttatccccgcaaaccgcaaccggcagcgagcgcagggtggggttgaaaagcagagaaaccgacgcgaaaaagttattcaggtcgcaatgcaaaattactctgtcttccatttctcacacctcgcagaacatttgttcaataaatattatagcctattttcttcgccttgtaaagcggaaaatttatcgagagctaagcggtgcagccgttctgtctggcgctggctgtaatttattgtaaagcttatttccggcagcgtttttccgagaacgtatttaagatagagtatttcggaaagcaagccgccgtctgttttttctattttttcttcaatttcgcgcctcaagccttcggcgtcctcaataagcgcgcggtattgctctgctttttgggggtaaagcgcaatttgcccctgtaatctttgaatttttgtgtgctgcaaaagataaagcgaaagatattttttagcttcttttctcattttttatttccctcggataaaatataggcgacatatttgccgtagctgtaatccgtgccgtgcgccctgttatattcatcaacttcccttgcaatgcggcttatgggattagcctttgcaagccttcgcatacgccgctgcctgcgccacatttcctcgccgcgccgccggcaggcttcgctgcaatactcaccgccatctgtcagctttgcaccgcagcagcggcagtgagtgagatttttttcgtgaatgttggtgcttttacaaaacgggcagcagcgtttttcctcaaagggcggcgaattaaagccgtgtgtttcacggtatgtatcgggcttttcaaactgacttccgcaatcggagcaaattagcatttttatctacttcctttctttgtctacactataaagaaaggaaacgtatggcagtttgtaaacaccgataaataaaatatattaagtttatttatcctttcttaacaaaatgcgtgaaataatagcatataatatatttataaaatgaaaggagcggaaatatggatttcagatacaggcttatgcggtttatgtccggcagaaacggtcccgatgagcttttcgcgcttatattcgcggtttctgttattttatcggtaataaatatttttgtgcgctcctccattttgcaaattgcggtttacgccgtaatgcttttggcgcttttccgccttttctcccgaaataccgagcgcagaaggcgcgaaaatgaaaagcttttatcaatgctcggcgtgtttcgccgcaaaaaaagctttcacgagcaaaagcgcgcagataaatgccacatatataaaaagtgccccgattgcaaagcggttttgcgcctgcctaaaagacccggtgtgcataaaaccgtctgcccgaagtgcggcagggaatttaccgtaaaggtgcgcaaatgaaaaaaataacgctgcgaaaatttttagccgtacatattcccgcggcggtcgtaattgtgctgtatattattttgccgataggctgccccataaaatattttctgcacatcgattgccccgcctgcggcagcacaagggcaattatttctctgctgcggggagatatacgcgcatattttacatataatccggtggctctgccgctgttggcggttgttctttttgcgctgcataaagggctttttaatttgagccgccgcaccgaaatgattattttaataccctctgcggtgtgtgtatttattgtatatatttacagaataatatttatgcaataaaaatatgcgaaaaatgtatttttttgttgtaattttctgttctatatagtataatagattcataattttaaatataaggggatatggattatggatcagaacaaagtagatatgtatgtcatgacaaaccagaagtattttccggcagagaaaataatgtatctcaaggaaaagcttgccgcaatggacgagagtaagttcacaatggtttccaccgttgagcttaaagacccgaccacaattcttttggtctccattttcttagggtcactcggaattgaccgctttatgctgggtgataccggaatgggaatacttaagcttcttaccggcggctgctgcggaatacttaccattattgactggtttacagtttctaaaaagactaaagagcttaacttcaataatttgatgactgttctttaaaacaaaaaaattgcggcgtttgcattgcaaacgccgtttttataatgtccggagaaaaatatatggaatatgaaatcaggcgctccgcgcgcaaaaccgtcgctttggaaattaccgaccgtgccgcactgcttgtaagggcgccgcttaaaatgagtgaccgcgaaattgaagggtttgttttgaaatacagaggttgggcggaggaaaagcttaaaaccgcgcaaaaaagagccgcgcacgagcaaagtattaccgagcgtgaaaaggagctgcgcgaaaaagccgaacaccttttgccggagcttacggcaaggtattcggctgttatggggcttaaaccctcgtctgttaaaattacctcagctaaaaaacgcttcggctcctgcagcggtaaaaacggtatttgcttttcgtggcggcttatggcgtaccctatgcccgcaatagaatatgttgtggtgcatgagctggcgcatataaagcaccataatcacagtgcggcgttttatgcgcttattgagcggtatatgcccgattacagaagcaggcgtgcgctgttgagggcacccgagtaatttatttctgcgcgcaatccctgcatagcccgtacagcacgctgccctcgcagcgcagggcaaagccgtggcttttaagcaggtgctcttttatttccttcataaactcacactcaaggtgcattaccttgccgcagcgggtgcattttatatgtatgtgctcattgcagttgcggttattgcctataagcctgtaaaccgatttttgagttttctcctcggttattttaagcaccctgtgttcggcgctcagcctgttaaggcagcggtaaacggtagcgggattaacgcccgcgtttttttcgttcaggtggtttataatatcggcggcgccgacggctttttcgccgcgggcttcaagaaaatctaaaatatatttgcgcgcctttgttgaatagctttgcttatccggcataattatcttccctttcggcattattataacgcaaagccgcaaataatgcaataagtattgattttacccggcatatatattataatcataaaaaaacatcaggaagtgtttatatgaatcttaaaagcatttttgaaaacaatgatgaaaagccgctggataatataccggcagacggcggctacaccgcaattttccgcacgattgcctgtgtgggagacagcctttcatcaggtgaatttgaggcggataacggaaacggcggaagcagctatcacgatatgtttgagtactcgtgggggcagtttatggggcgtatgtgcggcagcagggtttacaatatgtcccgcggcggaatgaccgctaaggaatactgcgaaggctttgccgacgcaaacggctactggaacccgaaatatgccgcgcagtgctatataatagcgctgggcgtaaacgaccttttgggtcaaaagcaggagctgggcagcccggacgatattaccgccgaggataaaaagacctttgcccattactatgctgaaattatagaaaagtataaaaaaatacagccgcgcgcaaaatttttccttatggcaatgccgagcgagggcgaaaaggacggaaaccttgaaataaagaaaaagtacctcagcctgcttaatgcctttgccgaaaaatatgataacacatatgttttggatttatttaattacgcacctgagtataacgcgcagtttaaagaaaagttttatttgcgcgggcatttaaaccccgccgggtatttacttaccgcaaaaatgacggcggcttacatagattacattattcgccataatatgaaggatttcaaggaaatcggctttataggcacaaatttacacgaataaacggggaaaatcggctcgtcttgcataggacgggccgatttttataaaataagttgaaaaaacggcgaaacagtggtaaaataaccgttatacagagaaaaaaggcgggtgacgaaaatgggaatgaaaaaatggcagacagccgagcttgataaggctcttgcaaaggagcttgccgaggaatgtggggttgaccccatagtggcgcttatagcttcctcgcgcgggtataccgacccctctgacttagaggaatttttatcggatgagccttgtttttcagacccgtttttgcttgccgacattgaaaaagccgccgatattttaaacgaggcagtggaaagcggcgtgaaaattgccgttttcggcgattatgactgcgacggcgtaagctccgccgccattatgtatacctaccttcaaggccgcgggtgtaactgcgtttgctatattcctgaccgtatggacgaggggtacggtatgaatattcccgcggtggaaaaattagcggcagacggcgtggggcttattataaccgttgataacggtattgcctgcattagagaggttgaaagagctaaagaactcggtatggcggtaatagttaccgaccaccacttgccgggcgaagtgctgcccgccgccgacgcagtggtagacccgcacagggcggactgcccctcggactttaaggaaatatgcggcgcagaggttgcctttaagcttatttgcgtggcagagggcaaagagcccgaagaactgatatatgaatatgcggatattttaagcgtggcggtcaccgccgacgttatgccgctgaaatttgaaaaccgcagcattgtaaagctgggaatagaaaagctgaaaaacgcgccctcaaaggggctttcggcgataatgagcgtggcggggcttgagaggaacgatatgaacgcaacccgcatagcttacggcattgcccccagaataaacgcggcgggcaggcttggcagtgcagatattgcctttaagctgctcaccaccgacagtatgaccgaggcgttggagcttgcaaaccgcatagacgcgctgaacgcagaacgccgcggaacagaaaagggtatttttgaaaaggcggcagaaataatagaaagagaggggctttcctaccgccgcgttatagtggtaagcggggaaaactggcacccgggcgttgtgggcatagtggcggcgcgaattaccgagcgctacggcaagccgactgtagtaatctccgaaaacggcgatatatccacaggctctgcccgcagtattgaaggcttttcgatttttgaggctataagctattctgccgacctgcttacaaaattcggcgggcacaggcaagctgcgggcttaagccttaaaacagagaatataaatgctttcagagagaaaataaacgaatatgccgaaagccttgcctttacagcccccgttttaaagcttgactgcaaattaaagccctcggcgcttacactcgatttatccgaggcgataaagcagttggagccgttcggcacgggcaacccgacgcctgttttcgggcttttcggcgttaccctggcaagaattacgccaataggcggcggcaaacacctgcgccttattttttcaaagagcgaaaactcctttcaagcgttgcttttcggcgtaacgcccgagcgcttttgctttaaagagggcgatattttagacgcggcggttacggttgaaaccaatttttacgcgggcgagtataatttatcggttcagataaaggcgctcagaatgagcggaacggatgatgaaaggcttttcagagaaatggataatttagagcttttcttatccggcaaaagctttgatataaacgaggttttccccacacggcaggagaccggaacggtttataaagctatagcggcggatccgacaagcgcagagcgtataaaatatttgctgctttcaaaccccggctatgccaaaacagaggtgtcattaacggtgctgaccgagctggggcttattaaaaagggcgcggacggcgttttaagaacaacgggcgctaagggagacctgcacaattcgcctacatataaaaagctattggaaaggggagcggaaaaatgaccgaggcacagcaaagagattacgataagctatataagcaaatgcaggatttcggtggaaagtacgattataagcttataaaaaaagcgtttgaatactgcgttttaaagcacgacggtcaaaagcgctggacaaacgaggattactatattcacccgtttaacgtggcgcttataatcgtatccctcggaatggacagcgagtctatagccgctgccctcctacacgatgtggtggaggacaccgacgcaacggttgaggatataaagcgcgagttcggcgacgaggtggcgctgctggttgacggcgttaccaaaataggcaggcttaattttaccaccaaggagcagcagcaggcggagagccttagaaaaatgctcattgcaatggggcaggatatacgcgtaataattataaagcttgccgaccgactgcacaatatgcgcacgattgacgcaatgcccgcgcaaaagcagagggataaatcggtagaaacgctggaaatttacgccccgatagcccacaggctcggtatacgccccgttaaggaggagcttgaggaccttgcaataaagcaccttgaccccgttgcctacaaggaaattgaagacctgctgatgttaagaaagcagcaccgcgagcagattttggaagaaataaagcagcgtatcgaaaaccgcttgaaagaagaaatgccgggcgtggaaatggcgtttcagggcagaataaaatcaatatacggcatatatcgcaaaatgtatgttcagggcaaggactttgacgaaatttacgatatttacgccataagaattataaccgacaccgtggcggactgctacaatattctcggtattatgcacgatatgttccgcccgatacccaacaggtttaaagactatatttccacccctaagcctaatatgtaccagtcgctccataccacggttataagccgtgcgggaataccctttgaaattcagattcgcacctttgaaatgcaccataccgcagagttcggtatagcggcgcactggaagtataaagagggcattaccgataataacgccaaaatggagcggcggcttgagtggataaggcagatacttgattcgcaggcggcttctaccgatgcttccgaccttgtgcgcagcataaaggtcgatttatcgcaggaggacgtttttgcggttactccacgaggcgacgttataaatctgcccgtaggctctaccatagtggattttgcctttgcaatacattcggcgataggtactaaaatggtgggcgctaaagttgacggaaaaatagtacccataaaccacgaggttaaaaccggcgaggtaattgaaattttaaccaccaatcaaccggggcacggacccagccgtgattggctaaatattgccgttacttcacaggcaaaatccaaaatacgctcttggttcaaaaaagaaaagcgcgccgaaaatatcgccgcaggcaagctggatgttgagcgggagttccgccgcaacggaattgagctgcccgaaaatgaaaacgcggagtttattgaggatattgcaaaacggcttaaattttcgggagcggacgagttctacgccgcaataggctacggcggaatactgctttcaaaaataatgccgcgcataaaagaggattacaacaagcgtaccgccgcgcaaaagccgcaggagatcgtcaccgtgcccgaaacacggcgcagtaaatcatccgagggcgttgtggtggacggcattgacaactgtcttataaagctctcgaaatgctgtaccccgctgccgggcgatgatattataggctttattacccgaggtcacggcgtttcaattcataagcgggactgcaataacgtgcctgttaatattgccgattcccccgagccggagcgctggattcccgcgcactgggacggcactcaatcggaaaagtttatatctaccctgcaggtttctgcaatcgaccgcgagggacttttaatagacgttatgaatacggtgcagaatatgcgcgttcccgtgcacagcataagcgcaaggcaaacaaagagcggcaattgcttagttataatgtcgctctcggctgaaagcgttgagcaccttaaaagcattatagcgcggcttgaaaagctgcagggcgttttcggtgtggaaaggataaatcagtaatgaaagcggtaattcagcgtgtaaaaaacgcaagcgtggcggtaaacggcgaaaccgtggggaaatgcggcgaggggcttatggtgcttttcggcgccgaaacgggtgacaccgcagaggacgcggctttgcttgccaaaaaaacggcggctttgcgtatattctgtgatgaaaacgataaaatgaaccgctcggtttgcgatataaacggcgaaatgctggtaatttcccagtttaccttgtgcgccgatgttaaaaagggcaaccgcccctcgtttacgggcgcaatggaacccgaaaaggcaaacaagctgtatatgctttactgcgaggaactgcggaaaaacggcattaaaagcgttgaaacgggaattttcggcgcggatatgcaggtatctttaataaacgacggaccggttacaattttgtttgatacagctgtatggaggaaaaatggaaatcagagcaatacacttaggactgattaaaacaaactgctacctaatttcaaccgataaggcggcggtggttatagaccccggctttaaaaccgaaattactgcggattttttaaaggcgaacaggggaaaggcgcgaatgatacttataacccacgcgcactttgaccatataggcggggcggaagcattaagagacgaaacgggtgtggaaataggtataggcgagcttgacgcgcccgccctcagagataccgagcttaatttatcggataaattccatgcgcacatagcccccttttcggctgaccgcacattttgcgacggcgaaaagttcagtgttggcgatattgattttgaggttattttaaccccggggcataccgtgggcggcgtttcctacctttcgggcgaaagccttttttcgggtgatacgctttttgcgggcgccgtgggcagaacagatatgccgggcggcagccttaaagccctaaaaaaatcgcttaaacggctgatagccctgccggaggaaaccaaggtttaccccggtcacggtgattttactaccgtggggtacgaaaaagaaaacaatatgtttgtgtggtaaaaatgaaactgtgtttaataggtcattcattcggctatgagcttgaaaagctgataagaatttttcttccgtttgaaaaaattgaaatatgcgaaagcagggataattccgaccgtgccgccgtaaccgttttatcatgcgaaaacggcgtaacgcgcctgtcggctgagcttattctcggtgaaaatacttataccgatgaaaaaacgcttgaaaacagcgcggaaaattatgagaaagagtgcgaacggcttatagccgccgcgctctataattgctttgttgcggcatcgggttacaccccgccgtggggaatacttacgggcgttcgccccgccaagcttttttcgcggctttgcaaggcagagggggagactgcagcagagcagtattttaaaaacgcgctgtatgtgaagcccgccaaaacagagctttgcaaaaaaacggttgcggcggagaaaagaataaccgatttatcgggcaaaagctcctacagcctttatatttcaatcccgttttgcccaacaaggtgcgcctattgctcatttgtttctcactcggtagagcaggcgcgcaggcttataccgcagtatatagcccttttatgcgaggaattaaggcttacggcggaaatagcgaaaaagctttctttaaagcttgaaacaatatacataggcggcggaacgcccacctccgtaaccgctgagcagcttgaagaaataatgtcggcagtggcggagaatttccccgtacagagcgtggcggaatacacggtagaggcgggcagacccgacaccgtaacaaaagaaaagctggaagttataaagtgtatgggcgcttcaagaatcagcataaacccgcagactatgaatgacgaggtgcttaaaaacataggcagaaagcataccgccgcccaaaccgaggcagcatttcgacttgcaagggagtgcggctttaaaaacataaataccgaccttatagcgggcttgccgggcgatacgcccttaagctttgaaaacacgctttcccgcgtgctggcgctttgccctgaaagcgttaccgttcattcgctttcaatgaagcgttcgtccacgcttaacacatcggggcttttccccgaggcgcaaatgggcgcggcggctgccgaaatggtggaatacgccgaaaaaacgcttgaaaccgcaggaatctacccatactatatgtataggcagagcaaaaccgtagggaatcttgaaaatgtgggctatgcaaaaccgggaacggaatgtctttacaatgtttatactatggacgaaacccacacaattcttgcctgcggcgcgtctgccgttacaaaaatgagagaaccgggcggaaataatatcgaacgcatttttaacttcaaatatccatatgaatatatcagtcggttttctgagcttaaggaacggaaggacggtattctgaaattctatgaaaagtaccctgcaaacaataaatagctatgccgaaacaagccccgaggagcttgttttgcgcgccgagcggcactatcggaacgaaatatccgcggtggcggataaaataatacaaaacaaaagcataaaggtcattgcaatagcgggtccttcctcatcgggaaaaaccaccacggcgcatatgctgcgcgggtgccttgccgaaaggggcgttaaaaccgacgttatttcgcttgacgatttttacctgccgcctgagcgtttgccgctgctgcccgacggcacgcaggatattgaatcggtaaacgcgcttgatattccgcttataaacaaatgctttaataaagcgcttgaaagcggcaaaacatatttgccgcagtttgattttcaggcgaaaaagcgtatagaaaacgcgcgtgagcttgatattacgggcaacagcattgtaatagttgaggggctgcacgccttaaaccctgttttaacaggcattattccgcacaaaaagcttttcaaggcgtatataagcgtaaaccgcagcattgaggatgaaaacggcgaagtattgcttacaagccgccaaataaggcttgtgcgccgaattttgagggacagaatattccgcagcacttcgcccgcagaaacgctgaacttgtggaaaggtgtaacggcgggcgaggaaaaatacctttactgctttaaagatagggcggatatactgattaagaccctccatatttacgagccttgcctttataaaagcgaactttccgctttaaaggaagagaccgcgcaatgcgcggataacacgtattttatgaaaacgcttgaaagcattgaacgcttttacccgatagatgggtccttaatacccgaaaattcgctgatacgtgaatttatcggttgaaaaaagctttgaaatgtgataaaattttaattacaggaggtaatatttatggatttttttgatgacgcagtaaataaagcaaaggaagcgctcgacgttgcctgcaaaaagacaaacgaggttgtaaccacccaaaagcagaggtttgatatagcctcgcttgaagctaagcgcacaagggattttgaggcgctgggcagatattattatgccgagataaaggacgccgaaataaccgacgaaaaggcggctgaactggttaccgccataaacgcaaagaccgagaaaatagaggctctgcgccgcgagataaacaacataaagaataaacgcgtttgccccaagtgcggtgcttctattgataaaaactcggtttattgcaatttctgcggtgaaaagctcgtttttgaaagcgcggctgagcccgaaaaagaggataaaaccgaggaagaataatcaaatgcaggaatacaaaaaaatcggcataattgttgccgatgatgaagaatttaagccccttgccgaccttgtgacaaggggtgaattttcggaaagctattttctgaaaagaaaaatacttaatttcaaaacgggtaaggctgatgtgtacgcctgtttttgcggcataggcaaggttaatgccgccgctgccgccgcgcattttgttgatatgggctgcgaaataatgcttaactacggcttatccggcgggatagacggtgttcgccgcggcgatatttgcgtttgctcccgctttttagagcacgattttgacttgacgggcataggctacaagccctgtgaaaagccgtggcaggagtatatttacaatgcggacaagcgcctgaacagccgtattttatcactgctgccgggagcggttaccggcactgcggttaccggagactgctttgtgaccgacgataatctacgcgaaaggcttaaaaatgatttcggcgcggtttgctgcgatatggagaccgccgccatagcctatgtctgctattatgcgggcgtgccgtttgccgccgtccgcagaatatctgacgacgcgggcgcgggcgcgggagacgtttaccgcgagatgaacaactcgggcgataccgtactttcggattttattcttgaatgtgcgcgcttagcggcagagctttgagcgcggcggaaaataagcgccgaagtatgcaatacggcacggcggtgctgcttatatccgccgttattgtaaagcttataggcgcgctttttaaaattccgctgtcttcggcgcattgtctcggtgacgagggcttcggctttttttcctctgcttacgatttattttcgccgctttactcccttgcaatggcggggctgccggtggcggttgcgagaaccgtttcggagcatatagcggcgggcagataccgcgacgcccgcttatcttacaggctttcgcgtaaatttttccttatagcgggaatcataggaacggctgttttcgcggctttggtaattccatttgtaaggcttaccgacgctactggtaaaaccgcccctgcgctttttgcggtggcgcccgcggtgcttttttcctgcattttatcggcggagcgcgggtattacgaggggcttaacaatatgctccccaccgccgtttcagagcttacagaggcgctgtgcaagctgattttggggcttggtgcggcgtttataacagtgcggcttacgggcagcacggtatggggcgctgcggcggcaatggcgggaataaccgtcggtacgctttttgcatttctttacacccgcatttacgctaaattgaagggcgacggcattacggctgaggtgcttgaaaacagccccgagccgcaaagcggcgctgccgctcttaaaaaaatgatattgcttacactgcctattgcgcttacctcgcttaccgttaatattccgcctatgattgacgcattaacggtaaaaagcgggcttgaagggctgataaacggcggcacggatttaaggggaatttaccgctcggtttttgaaaacggcgatatacccgagttatcggcttttcctgtgttgctttacggcatacggggcaaggcttataccgttttcaaccttgtgcccgcctttacctcggtaataggcgtgggcgctgtgcccgcaatagcggcggcagcagcaaggggaaatacggcagaactcaaaaagaatataaacaccgtgcttaaaaccgcggcgcttatatctctgcccgccgcgtgcggacttatagcaataggcggcagaataaccgattttttatacgataccgaggcttccgccgtaataggcggcgaaatgcttacagtttacggccttgcggcgctttttgcgggctttctggtgccgctgggcggcatattgcaggcggtgggcaggcaaaacgcggtgcttttaaacacggcggcaggcacggcggtaaagctgattgtaaatattattgcggtgtcggtaccgaaaatcaatgttatgggctcggcgctcggcaccgtgctatgcttttttgtgatttttctgcttgatattgcggttttaataaaggcggtgggctttgcgcccgatagcgtgaatgtatttttaaagccgcttgcttcagccgccttttgcgggcttgcggcacggcttacggtaatgctcggcagctcgcggggggtaactctgcttgccgtttttgccgccgctttggtgtacgcggcgctgattattgcccttaaaacggtatcggaaagtgattttcccgattcggacaaaggaaaaaagctggctgaattttgtagaaaacatagaattattcgctgaaaacaggggtttaaaacgaggtttttatgttcttttacagaaaaatcaaatttttaacgaaaatagattgatttttttcttaaagtatggtaaaaatatatagtacaagctttacgcttgtgcctaacagatttcaaacgagaaatcgttgaaaaatttttttggaggttcttaaacatgaacaaaacagaattagtagtatcaattgctgaaaaggcagctatttcaaagaaggacgccgaaaaagcactttccgcttttctcgacactgttgctgaagagctcaaaaagggcgagaagattcagcttgtaggcttcggtacctttgaagtacgcgagcgcgctgcaagaaccggtatcaatccgcagaccaagcagactattgaaattgccgcttccaagaatcccgtattcaaagcaggtaaggctcttaaggattctctttctaagtaatttaatacttaaagccgagccgcccttatgggcggctcttgtttttagggtgactgttatgagacttgataaatatttaaaggtggcgcgaataattaaaaggcgcaccgttgcaaatgaagcgtgcgacgcaggcagggtggctgtaaacggcaagcccgcgcgcgcgtcgtatgacgttaaggttggggatattttggaaatatccttcggggcaaggcttttcaaagccgaggtcacatcggttgcggagaccgtgcgtaaggacgacgccgcagggctttaccgcgttattgagtaataagccgccgcacccctcaatatattttattgaggggtgtttacggtggatgaggttattcgcagcaatcaaaatataataatagaggacagaaaaaagctcacgctttcgggagtaaaggacgttatttcgttcgatgatgaaacgctgctgcttgaaacggtgctcggcaggctgacggtaaagggcgcggggcttcacatagtgaattttgataccgcaagcggcgatttattcgccgagggcaagatttacgccgcggtgtatacatcggacgagaaaaacggcggctttttctcccgcgttttcaggtgagctatgtgggaaatagataatatttcgcagcttatcgcctttttgttatccttggcggtcggctgcgttttctgccttatttacgatattttccgcgcggtgcgcaaaagctttaaaagaaacgcggcggcgatgttttttgaagatgttctgtattcgtttatctgcggcgttataggcttttgttttttgctcggcactacgggcggggatttacgcgcgtttgcgtttataggtatgggcgcgggtttttttatttgcaggtttactctgtcgcgcctgtttttgcacgtgctgctttttattatacgcatattgcggcgtgtgttcggcggaatttcccgcatttcggcggcggtttttacggcaattgacaaggctttttgcaaatgcggggagaaaatgcgaatttttttcaaattccttgcaaatagtttaaaaaaaggcttgaaaaagaagtaaggtttgttgtatactgaatttatatcaaaaaaacgtttggagcgctgaaattatgaaaaagaaaaagcgcaggaataaaagcattatcctgcggattatgattctcggcgtatgcgcttatatggtgttcacatttgcggggctttggaaaacctggaatgacagcaccaagcagttaaacgagcttaaagcgcagtattccgccgaaaaaaatgatattgaggagcttaaagcaatgcttgaggacggctcgaaaaccaagatcattgaaaaggcggcgcgtgagcgcttagggtacgtttatccggacgagcagatatttattgatatatcgggaaactgaaattttttgaggaggacattcggcttttatgcagctaactatcggacaaattgttgagggaaaaataaccggaattaccaacttcggcgttttcgtggatctcggtgagggaaaaacgggaatggtacatatttcggaggttgcccgtacctatgtaaacgatattaaggaatttgttaaaataggcgacgaggttaaaatgaaggtattgaacgtcggggaggacgggaaaatatcactcagcattaaaagagcccttgagccggaaaaaacaagcgagcccagagagcgcagggaaaggcgcaattcgcccccgccgaaaattgacggctcgtatacctggactcccaaaaaggcagagccgcagagctttgaagaaatgatgaaccgctttaagcagacaagcgacgaaaagttctccgatttaaagcgtaaaaacccggaggcaaggcgcaccaagcgcggcgcgggtaaataatttttatggataatataaagcttattgccccatgccttttcggtgttgaaagcatagcggctgatgaatttcgccgtatgggctttgaaagcgttgctgccgaaaacggcagggtaaagctttcaggcagccttaatatgctggcgcgcgctaacatttgctcacgctacgcagagcgtattatgatagacgtgggcgaatttcgcgctgcaaccttcacagagctttttgacggcgttaaggcgctgccgtgggaagactatataggtaagacagacgctttccccgtaaacggcaggagcattgattcggcgcttttcagcatacccgattgccagtccataattaaaaaggctattgttgaaaggcttaaacagaaatatcacatatcgcattttgaggaaaccggcgcggaataccgcgttcgtttctttattcataaaaatgttgcctcgcttatgattgatacctcgggtgatgggctgcacaagcgcgggtacagaagaaaatcgaacgacgcgccgctcaaggaaacattgggcgccgcaatgtgcgaccttgcgagaatttaccccgatacccttatgttcgacccgttctgcggcagcggaacgctgcttatagaggcggctttaaaggctaccaataccgccccggggctcaggcgtttcttttcggctgagcgcttcggctttattcccgaaaacatatggcgcgaggaaagaatgcgcgcgcaggaccttattgtgcataatatagatttcagggcacaggggtttgataatgacccgaacgccgtagccttaaccaatgaaaacgctgaaaaagcaggtatgaaaaaatacgttaaggcggcggtcggcgatattcgcgattttactgtgcccgatgaaaggtgcttggttattaccaacccgccctacggcgaaagactgcttgacgttaaggcggcggaggagctgtataccgtaatggggcagcgctttaaagagggctgcggcagaaagtactacattataagcccgcacgatgaatttgagcgtttcttcggcagagaggcggataaacgccgaaagctgtataacggaatgataaaatgccagttgtttatgtattttaaaaacagggagcgttaaattgtgggtaagaaaaaaatcaatattgtagagggcattaaaagcaaaaagggcttaataggcgaatttaaggaatttatttcccgcggcaacgttattgaccttgcggtcggcgtggtaatgggcagcgcgtttacggcaatagtaacctcgcttgtaaacgatatgataaccccgcttataggtcttattatgggcggtattgatttttccgatttaaaggttacaattccctcggcaatagagggcgtaaaggacgcgaaaatatgttacggcaaatttatacaggcggttataaacttccttatagtttcgcttgttatattctttgttattaaggctatgaacagccttaagcgcaaaaaggaagaggtaaaggaagaggaaaagcccgcagagcctacggaagatattttactgctccgcgaaatcagggattcgcttaaaaaataattattgacaacagtaaaaacaggtatataatataattataatcttcagggcggggtgaaattccccaccggcggtaaagcccgcgagccttttttggctgatcaggtgcaattcctgagccgacggtacagtccggatgaaagaagaaatgtgctgtatgcattttttacgcccgcgttttaaagcgcgggcttttcttttcccctgaaaagaaaggaaatgatttttaatgaaaaaacaaaaatttttaaggggtcttgcagtcagcggtataatgggtgcgctgggctttgtgcttatgctgcttgaatttccgctgccgtttattattccgccgtttatcaagctggatttttcagaaatacccgcaattatcacggcgtatgccttcggtccgcagtacggtattctggtgtgcttaatcaagaacttagctcacctgccgtttaccggctccgcaggggtgggcgagctttcaaattttgttttgggcgcggtgtttgtgggcgttgcagggcttttttacaggcataaaaaaacacgcaaaaacgcgtttttgggggcggctgcgggtgcgtttgcaatggcggcaataagcgttgtaaccaactattttgtggtttaccccgcctacgtggtgctttacaatatgcctatgaacgctattataggaatgtacaaagcaattctgcccgcgtccgacacgctgcttaaatcgttgcttatttttaatgtgccgtttacctttgttaagggtatgatagataccgccgtttgctttgcggtttataagcggatatcacccatattaaagcattaaataacacacccctgttatcatcgcaggggtgtgttggtttttaatcggttattactattttttctattatcggctgattttcctttgaaactgtgccgtttgagtcggtaacgggtgtgttttcggctattttatcaaccacgtccataccgtcggtaacatgaccgaaagcggcataggagccgtcaagataatcgccgtccttgtgcattataaagaactgggaggaggcgctgttgttatcctgtaagcgtgccatggaaataaccccgcgcttgtgggaaatgttgttttccacgccgtttttagaaaactcgccgcgtattgttttatcgctgccaccggtgccgttgcccttggggtcgcctccctgaatcataaagccctttattatgcggtggaaggtaagcccatcgtaaaagccgctttttgcaagctccacaaagtttttaacggttatgggggcggtgtcgccgtcaagcacaagctttatatcgccgtaatccttaactgttataactgcgtggtgggtgccgtagccgctgccggtatcgctgtcaaactcactttgcctttttgagcaggcgcaaaatgtaagagtcagcgccgctgcggataatattgctataatttttttaacggtcatatctgtcgtcgcctttctttttcccgtagggaatatattttacctttcgctttcttattcttgcaatattgagccttattatcataagtataaatatcacaattacaagcgcgataagtatataaactattttcatataaaacgagccgaaaaagccctttacagctctgagggctataagcagcttactcgccttaacgctgctgcccgctaccaaatttaccgtgcctattacctgctcggcgtacacaatatccgccgtgccgagcacctcgccctttttaataggtgcgtcctttttttcgtaattaagctttggctttacaactattgttgaactgtccgcttcattcggcagcaccgttacaaagggcttttcaaaataaagcggtacaaaatcggtttcgaacgataaatcaaccggcagctcgcaaacaggctcggtggaatccgctacctgcttgaatgaaaaattattgaacgcccagcggtaaaggtttgccgagtctataaactcataccttttacctgcgtttgcggggcagttcataagtatgcacatataattgtagccgttataggtcgcggtgcttacaaggcacctgcccgcttcatcggtaaagccggttttaacaccccttgcgtattggtaatagtagtttgtattggggtcctgcaaatagttggtggtggaaatggtgtgcttgcccgacatattggtagcctctattgtgtagcgcgccgtttcgcaaacggttttaaaggtctcgtttttaagggcgtaggtagcaagggtgtgaatatcccgcacggtggtgtaggtctgttcatcgtgcagccccacggggttgctgtagtgcgttcccgtaagccccagttccgccgccttattattcatctgctcaacaaacgcttccacgctgccaccgtaatacagcgccgctaagtacgcgcaatcgccgaaagaggacataagcacggtataaaccaagtcaagctgggttatttcttccccgattttaaggtttgaaaccgcgctgcccgtgccggttatcagcctgtcaacctcttttgacatggcaaccttgcccgtagggtcatatttttcgctttcgagcataagcgttacggtcataattttggttattgaggcggggtataccttttcgtcaatatttttggagtacagcgtctcacccgtatccatagatacgagcatacctgcctttgccgatacctcaaagcccgtaatttcatacgccgaggcggtaaaagccggagaaataacagccacgaccgttaaaatagttaaaaaaacgtaaattatttttttaggcatggaaatctcccttgaaatatagtataatgctattatatcatataattttcaaatttaaagacctaattttttcgcgtgccaaaaaaggcacgcgtttggacgggaatgccgctcgctcgaaaatcacggattttcggactgcactctatccccgccaataccaccccagtgttcttgaaaaatagcttaatagctatttttcgcttacaatgtgtttttccgccgcgcctgtcagcggaaaaacgaaaatgcggcgtcaccgccgcaaaatatcatattttgattacttcacagtttaaattttttaagtaggtgaaatttacggtttatattacgggagatacgcacggctgtcttgaacggctgtacgataaaaatttcagaaaattaaaaagcggagacgtgcttatagtctgcggtgatttcggctatatattcgatggcggaaaaaccgaaaagcaggtgatagactaccttgcgacaaggcggtttgtaaccgcgtttgtagacggcacacacgataaccttaccaccataaacaaagcgcgcgtgacctactggcacggcggaatggtgcacagaataaagggcaaccttatacaccttatgcgcgggcagatttttgaaattgaaggcaacagctttttcaccttcggcgggggtgaaagcaacgataaggatatgcgcatagcctcgggcaactggtggcgcgaggaggagcctacgccctttgaaatggcggagggcgcaaagcggcttgacgcggcggggcttagcgttgattatattataacccacgagccgccctcgcttgtaaaaagcgccatacttttgcgcaggggggacgctgaccgcataaacaagcttaacggctatcttgaagaaatagggcgctcctgcaaattccgccactggtatttcggctcgctgcacgaggacagggtaataaccgagcgccacacctgcgtgtttaaggaaatgatacccatagcccccggcggtacggtaagcaaaaaggcaaagcgcaggcaggcggcgtttaccgccgcgacttgacagatatggtataatttacttatataatatactcggaggaagtttatgataaacaccgaaagactctgccccggctgtatgaacgataacggcggggagaaaatatgtcctatatgcggctatgattcagcaagccgcaatcccgatgtttgcctgccggtaggctttacgcttgataaccgctatatggtgggtcaggcgaaaaaacgcaacggcgagggaataacctatatcggctgggatactgccgacgataccgccgtgagcataagggagtatttccccgcgggctttgccgagagaaaccccgataaaaccgtatcgataataagcgggggagaatatatatttaacgagggcttaatggagtttatggaaataaaccgcgaaataagctcatcagagctgcccgcgcttatacccgttctcagtgtttttgaagaaaacggcacggtgtatgccgtttcgcaaagctttgccaccataaccatggcggagtttttgcagcgcaacggcggcactcttaaatgggagcaggcgcgcccgctttttctgccgcttatagataccgttaagggtatgaacgatataggtataattcacggcggaatatcctgtaataccgtgcttgtggggagagacggaaagctgcgcatttcgggctattctgtaaagcgcctgcgcacagccgacggcggtcttgagcccgagcttttcccaggctttgccgctgcagagcaatataactcggaaaggctgctgcccggcacatataccgatgtttacgggctttgcgcggtgctttttaacgtgcttataggcacggttccgcccgaggctcccgaaaggcttaaaaacgactcaatgaccattcccgcaaaatttgccgaggagctgccgcgccacgttttgcaggcgctggcgaacggcttgcaggtaatgccgaaaaaccgcacgcagaatattgaggactttaaaaacgaactggtttacgccgaaacgggcgagccgcagaagaaaaacgccgcacccgaaaaacgcgctgccaccgcacaaaagccgcagaaaaagggcggcacggcaaagtatgttataatatccgccgcctgcactgccgcagtgtttatgggaattgtgacaatacttgtttttacggtgtttaaaaaggatattttcggcaataaaaatgcgtcggaccagagcggcagcgtatccaccgccgcaccgagcgttgcttccataggcactattgacagcggtgctgccgaaagcgcggtgcttttctcggtgccctctcttactggcaaatattacgccgagcttgccgataatgaggattatgaaaaattcagctttgttataaagggcaaggaatttaacgataaatacgctaaggggcaaatttgcgcccaatcgcttgcagagggcacacaggttgcaagagataccaaaattgaggttacaataagtctgggaccaaaagaggtaaaaattgcaaacgttgtggggcttgaagaaattaacgcaaagctcgagcttttaaaacagggctttttgtacgataatatagaggtgcttgaaaagtacgatgaaaacaaaaagccgggcgcggtgctggagcaggagccgaaatacggcacgcagataagccccgaccgcgcggttacaatctatgtaaattcctataagggagacgacagctccgacagtctcggaactgatttcaactgattttcagggaggataaaatggctgctaaagtatatcgcatttcagagggcgtagaggggcttttcgttaaaaacgagaggttcaacactacgtcaatatcctttaacttttatttgccgctgcaaaaagagaccgccgcttcttacgcgctgctaccctttgtgcttaccacctgcggcgaaaaataccccgatttttcggtgcttaactaccgccttgagcggctttacggcgctcagcttgacgcggttgccgaaaagctgggcgattaccagcttttaaagctgagaatgtcggttataaacgataaatacacctttgaaagcgagtcgcttataaagcgcgcctgcgatatgcttttaagccttattttcgagcctaaggcggaaaacggcgctttttg

SEQ ID NO: 3984 - DNA, 8585 bp, Unknown
  16S sequences of unknown bacteria
ccacttccgagggctttttggtatgtcgctaaatcggtgggcaatttagcgaaatcactgatacaatttttgcccaagaatataactcaggaacttttcctcttccgaagcatgctctgtggtatcgacacagcaattctgtcaaaccagtccacagatgcaaacctgcagcagatatgtacgaaccgccgcagggcgattcagtaaaacgaaacctattcagaagccagagccttgaccgggtcgagctgtgccgcccggagcgccggctttgcgctgaacacagttcccagcagcacagtcatcacagcaccggctgtcagcaaagtcgggtcggtctggaattcaaggctgagcagctgacacgcaatccaggtaatgccctgtccggccagcagcccgaggatcgcgccatagaagctcagcagacagccctctgcgataaattcccccaggatcgccgcatttttggctcccactgcctttttgatcccgatctcatgggtacgttcggtcacactcgctgacatgacagtcattacaccaagcccggataccatcagcgatacggcagaaatcgccaccagcgacaattttacaatctcggcgatattctccatcttctgcttctgagcgaacatattttccactgtgtaactgtctgcctgctccccatactggcgggccagtgcatctgccagcttctccccttcctgatctgccgcctccgggtcagatagggtcaccgcgatacggtcatagcctgactttccgctgttctcctgcagcacattatagggtatatagacaaagcccggcgcataactgtccagcatggtctgtaccaggcttcccccactctctgccactcccacgatctcaaactcctgataggaaccgttcagcatgatctggatcttcttccccacaatgttggtgcgctggtagatcttttccgccagactgcggtcgataacacagacagaccgtttctcactcagatcgcccggctccagcagacgcccatgcagcaggtccagctccacaatctgggtgctgccgctgtcgattccccagaccgcgcactgctccacgattcccttgagttcgatctgtgtataggccatcacaatcggcgacgctgactccaccgtcggctgttcccgcagcgtattgagcttctcttctgtgagagggacatccgccactgttttattggcggtgatggtcactgaacccaccccaaggctctgaatctcctcctccaccagcccagacccgatctcaccgacggtgctgacaatcaccaccagcatcatgccaatggaaatggataacagagtgggatacagccgccggcgtcggcggatcaggctccgcattccatacagcagccactcagccctcataatatccctccaatcgcaccggctgacccgattgcaggttttccccgatcagaacaatgtcctcagcggtaatcccagagaggatctgggtcatttccgcggtttcctccccagtggtgacgggctgtctgaccgccgcaccggtattggacagcagccagacatactcctgattctcctcgtcctgacagacagcctgatagggtatgaagagtccatcggtactggaacgggaaagaatctgcgcagtgacagcataaccaggccgggctcccttggaatcggaagtcagccggacctgcaccggaaccagcacctgcaatgcgccattctgcagcgactgcatggcagaggggttgatggaaaccacttccccgctgatctctccggtgatcccggccccctgaatgagtaccttatcccccggctcaattcccgctacacccgcctgcggcacatacagttctgcccgcagttccgagagatcttccaccacaatggcagcctgcggggaattgtacagactgtccgactgaagattcacagctgtaacagtcccattgatagcactggcatactccggcgcggctgccagctgcacgctctgctccccgaggccggaagcggacagcagactttccagcgaggaggtctccgggttttccaggtagcttttaagaaaattcgatgtcagttccggtgaagtcatcagcagaccagtggcgggcagatccaccgtgcaaagcacctgccctgccgtaacctgatcccccacctccaccaggacatcttcggtcaccactggcgaagtaatgtaagtctctgcacggtcaaaggccaggatctgcccgctgcagctcaccgactctgttcccggctgcgtggaagtggtcacataccgggctgtgggtatattctgataataagcggtcggaagcaaagctgctcccactgccaacagtccgccggcagtcagaaccaagattcgatgcataaaaatccccccaggtgttcatctgctttagtttgaaccacccgggaggattttataatcatcttattcagttttatttctgccaatgattttgcaggcttcattgatgctggaaacagggattacttccagatcgggcatctgctcggtattgagctgggagaggttgtgtctgggaaccatgcagcgcacaaatcccagccgataggcctccgacacccggttctggatatggttgactgcccggacttctccggcaaggccgatttctccaatggcgatcagatcgtccgggatcaggcggtcggtgagattggataccagcgccaatgccaccgagagatccgaagccggttcgtccagccgcaaaccgcccaccacattgatataggcatccagggaaccgaagaaatatccgcaccgtttttccagtactgccaggagcagagccatccggttgaaatcaaagccggttgctgtgcgccggggatttccaaaggcggttttggtcaccagagcctgaacctccgccagaatcgggcggctgccttccatcagacaggtcacgcaggtacccgatacatttaccggtcgtccggagagcatcatcatggagggatttgccacctcggtcaggccacggtcggtcatctcaaagacgccgatctcattggtggagccataacggttcttcactgcccgcagaatccggtatgccaggtgccgttcgccctcaaaatagaggacacagtccaccatgtgttccagaaccttcggtccggcaatggcgccgtccttgtttacatgtcccacaataaaaatgggaatgtccgcggatttggctgtatagatgagccgctgggtacactcacgcacctgggtcacgctgcccggcgaggactgaagatccgaaagactcatggtctggatggagtcgatgatggcaatatccggatgcaccttgtcaatggcggcaaccacatggtcgatgtcggtggtggtagccaggaagagattggggctttccactcccagacgcatagcccggagcttgatctgccgggcgctctcctctccggagatgtacagtacccgcagtccctggcagaggaatttgcagatctgcagcagcagggtggatttaccgattcccggctcaccactgagcatgatcacagaccccttgacaatgccgccgcccagaacccgatccagctcggaaaggtcggtatggaaccggttctcctccgccgaggagatggcatcgatggtgctgacctccagattggttaccaccggggctgcctgagcggctttcccacccatgggagccggagacttgagctgctcctccatagtgttccactgaccgcattccgggcacttgccgtaccactttgccgactcataaccgcagttctggcatacatacgctgtttttgattttgccatgttttacactcctgtattgttgcacttccggggatttatccgcccagatattcattcaaagaatcaaagatcataaaggccacccgcttctggtagtctgcatccaccagtttgtgggcctcgtccgggttggaaaggaacccgcattccaccatgacagccgttgtcggcgcattccagagcagatagatctcatcgcccacttccttgatggtgcggttgttctcctcatccaggtctgctttggcatgttcctggatgatctgcgccagctcctgggaggtctgggaattgggactgtaaaagacctgggttcccgaatagatgggcgaaccgaactgattctgatgaatgctgataaagatggaacccggatattccttcatcagctccagacggttttccaggtctgaaaccttcttttcccgcagagtctccatgccagggtcatagatggcggtgtcactgtcccgggtcattaccaccgtgtagccgttcatcaccagcagatcccggagattctgcgcaatggagaggttgatatccttttcaataatcccatccactccaaccgcgccgccgtcttccccgccgtgaccggcatccaggataatggtcggacggctcagccgggacagtgatgtggggattgcctcctccagcttatagaatgaccccaacaggatcatcagcactgtcaggaggatcatggaattgacataaaagctgcgtgttttcacattgtatcacccacagctactctatgcccttatttctgaggttatgaccggggagggaaaatcatctcccgttccggctgaccggtttccggatcaatatactccgaaacggttccaaagccatgccgttcatagaactgcactgcgccggaattccgggaatagacatgcagtgtcagagggaaacgctgctctttgatatgttccagcagcagaccaccgattccctttccgcgctgcgcgccggatacaaacagccctgcaaggtaatgctccaccataccggcaaaggcctccacccgaccgttttcgtcccagacccacacatcagcctgggcgatggcttcccgtacttcctgaaaacagccagtccagtaagccgggtccacaaagtcatgtgcctgcaggttgccctccagccagatctccatgatccggtcgaggtcctgccgctccgccagacggaacatagcgggatacctccttttcacgcactttattgtaccacagatcccggcgaaaaaaaagcgcagacccgttttacacagggctgcgctcattctttcagcttacgatccgttcgcagaattcatctgcgccctgttcatccagtccgcccagaatcgcaaaggtaaccttatcacagttgcagtccgaaagccggaggtcatctgcgaagaatttccggatgcgggtatagctgctgtaataccgttccatcgcctcccgccccttctcggtaacaaacaccgaggagtaacgctttttggcgatcagttccaaccgttccagctggaggagcatcttatgcgcactcggatcagatacgcccagtttctgcgctatatgcccctgtcggactacgccttgcttctccagctcccggatggcaaacagataccggatctgggtcgcactcagctgtggggtcatatgctatcctctcctttcgtgcggcaagtcctgctcaggcattgggctgatgattactgtgacaggttccgcagcagccgctgcatccagtgctgcatccgcagctgcactttcctgcctttttatccttatagatactgcgggcagccagaactgctgccagagcaaccaggcctccaatgatccatgtagacatagtatcgttcctcctttattgaaacgttccggtgatggggtttatgggatcagtcagctgcaaccggactgccagtgaccttgacatcctttttcttctgggggtccgggcgggtcaggagccacaggaagccggcagccacagccacagctgcgatggtgccgattccgaagccgccgccggtgagcagggtgccgaactgataaacacacagcgaaaccgcataggcaaagacggtctggtagcccaccgcaatcagggtccagcgggtgttgttcatctcacgcttgatggcgccgatggctgcgaagcagggtgcgcagagcaggttgaataccaggaaggaataaccggctgccagcgacatgctggatcggagcagatcccagtactcagcgccgtcctctgccacttccgcaaagccgaacaggacgccgaaggtggaaacaaggttttccttcgcaaccaggccattgatcgaagccacagctgccttccagtcgccaaatccaaggggcgcaaagatccaggcaaaactctgaccgatcacagccatgaagctctggttgagatcctccacagcggtgaaggagccatccacgatgccataggtcgaagtgaaccagatcacgatggtggacagcaggatcacagtaccggccttcttgatgaaggaccagccacgctcccacatgctgcgcagtacattggacagggtgggcatgtgataggccggaagctccatcacgaagggagcgggatcaccggcaaacaggcgggttttcttgaggataatgcccgagcatacaatagcggcgattcctacgaagtaggcgctggggccgacccaccaggcattcccgaagaaggcaccggcaaccagagcaataatgggcagcttggcgccgcagggaatgaaggtggtagtcatgatggtcatcttgcggtcacggtcgttctcgatggtacgggaagccatgatgccgggaacaccgcagccggtaccgatgagcatgggaataaaggacttacccgacaggccgaaccgacggaatatccggtccaggataaaggcgatccgggccatatagccgcaggactccaggaaggccaggaagaagaacagcaccagcatctggggcacaaagcccaggactgcgcccacaccggcaacaataccgtccaggatcaggctctggagccactcggcacagccgacgctcaccaggaagttttccaccatcggcggaatgatctcgccgaacagaacatcgttggtccagctggtgactacatcacccacggtggtgaccgaaatgtagtacaccagggtgataatcgccgcgaagatgggcagcgccaggaaccggttggtgacccagcggtcgatcttgtccgaggtggtcatggtgcgggctgccttcttcagataacagccctggataatggacgagatgtagttgtagcgctcattggtgatgatgctctccgcatcatcgtcatgggctgtttcaacccgctcgatgatgtcccccacatccgggataccctgcaccgactccgcaatcttttcgtcccgctcaaacagcttcaccgcaaagaaacggctgcgctcaggcggcacaacgccggtcagacgctcttcgatggaggccagcgcctcctccacatcggcggcaaagtgatgttccgactgaggtacagcaccggaacgggcggcagccacagccttggaggccacttcgttgacgccggtgcccttcatagccgaaatctctaccacatcacagcccagacggcgggacagctcttcggtgttgatcttctcgccggtctttgccagaatatccgccatgttgaccgcaatgacggtggggatcgaaagctccagcagctgggtggtcaggtagaggttccgctccaggttggtgccgtctacgatgttgaggatcgcatccggacgctcctggatcagatagttccgggccacgacttcctccagcgaatagggcgaaagcgaatagatacccggcaggtcggtgatcaccacatcgctgtgacctttgagcttgccttccttcttctccactgtaacgcccggccagtttcctacaaactgattggaaccagtcagcgcattgaacaatgtggtcttaccactgttggggttgcctgcgagggcaattttgattgacatatcccttctcctcctcaagctttccatcggaaagcgctgtaactaatgttagtatagactaacttcatggcctggttttattccacctcaatggcggaagcgtcctccttgcggatggacagctcataaccacgcactgtcagttcaatgggatcgcccagcggggctaccttgcgtaccgaaacatttacgcctttggtgatgcccatatccatgatccggcgcttgactgcaccttctccatgcagacgaaccactgtggcacttttgcccggggcaatatccttgagtgtcttcataccatactcctcctacaccatgatccggttggcaaggctgcgatcaagagcaattcttgaatccttgacaccgaggatcagatttccatggatctccgagacaactgtcacacactcgccctccaccagacccaggctggacagaaaccggcggacttcgtcttttccggtgatctttttaatggtatcggtcgaaccaaccgacagcatactcagcggcatcataatttcctcctctgtcaagcggctttgtcaacttcaatgcttgcaatgtgttagctttaactaaccatcttggttaagagtataaccctcccgtccgactttgtcaatgatttattaaacctttttgtttgttatgacta

SEQ ID NO: 3985 - DNA, 3131 bp, Unknown
  16S sequences of unknown bacteria
agccggctgcggcgaaacgtcgcgcagcgtctcctcgatgaacgcgcacgcctcggggacggtcgccgccacacgcgagctgccgatgccgcggcggtgcagttccatcccgagcgtggccacgcgcgggcagttgatgccgagctcgaccatgcgctcggtttgggagagcacgtcgcgcgcggggccgtcgagcgcgatatgcccgtgttccatcaccacgaggtgcttcgcgtattcgcataggagcatgaccttctgctcgatgacgatgacggtgatgccctggcggttgagctcggcgagcagctcgaaaatctggcggctcgactgcgggtcgagctctgcagtcggctcgtcgagcagcacgatctgcgggcgcagcgcgatgacggccgccaacgcaaccttctgcttctgcccgcccgaaagcgtcgagatgcgccggtcgcgcaggtcgctgatgccgatggcctcgagagccccggcgacgcgcgactcgatctggtcgcgcgcaacgccaaagttctcgagcccgtagaggacctcgtgctcgacgaccgccgcgaccatcgagctgtcgatgtcctggctgaccgtgccgatggcacgcgagaggtccgtgagcttggtctcgaaggtgtcagcgccgttgacgcggacctcgccgtaaaagtcgccgtggaagtggtgcgggacgacgccgttgatgcagtgccccagcgtcgtcttgcccgcgccgctctcgccgatgatgccgacgaagtcgccgtcttcgatggtcagcgacaccccgtcaagagccttcttggtgccagtgctgtacgtgaagctcacgttgttgatctcgatcatgatgtattgccaatcgtgccgactcgagcctgttcgcgtcccgacgctagtcgcgcttgagcgccttgcgcagcgggatgataaggatggcgacgacgatcgcgttgaacagcgccgtcagaatgacgatcgggccaaactggacgagcgccgccatggcgtccatgctgcgcatcgccgcggcgatggcggagaacaggccgcccgagacgaaggtcgcgacaaaggtgccaatgccggcgagcgcggtcgacttgccgccttgcacggggatcgcggcgagcaggccgatgacgatgccaccggcaagctcggatgcgaagttcacgaacggggtgccgcacagcagcggaatctggcacacggcgccggtgatgaggccgatgatcgcgccgtaggcagcgccctgaccgtagcttttcggtttgatgagcagcagcgccaggcagtatgccgcaatcatgaagtttggcttgacgccgccttggaacagcatgcccaccacgagcttgagtacggcgcccgccgcaatcagcactgctgcgagcacgaggtcggtggtctggagacccttctttccctcaacctggatctcacgtttctttgctacttctgccattgtcctagtcctttctcgactattgcgcagccacgccctttgcgcggctgctcccttagttgggctcgtgagaaaaaggaccgggcaataaaaaaaatccgccctcgtcgctttcgcgaaaaggacggattagatatccgcggtgccaccttttcttaacccccttgcgagggctctctcacgagaatgccaacacatcctctgccgttaacgccggcgtacgtctcggattgggggcctgcgggccccgcccccccccccccgtggcccatttgcctggctgctatctgcgaggctctcagcaggtgccccactctctgtactgcgcttgaccagacgttacttccacgtcatcggtttgatggctacgaatataatcatgcccctgcgcttcgtcaagcatcttttttgaaaactgcaaattggggacagtccccaatttgcagtttcacgggccctcgtgccagttttgggaaaagaaaaagccgctcacacgaggtggcggcttttgtgcactgcatggtggtcagagagggacttgaacccccgacacagggattttcaatcccctgctctaccgactgagctacctgaccaatcagcgaacgctagtttaccatgaactgctcttcggtcaagaagaactttgctgtttttgctgggacagctccgcctgcttctcgctgttttccagattcttgagcttcttcagaaccgtcgacgggatgggctcgctcatgtcgagcttttcggtctgggtgctcgtcgtccccagaatcgccgcctcccggtcggtgatcgtcgggtcctcgccgctcgacgcgcgctgcatgagcagcttccactggttgatgtaggtgaacgtgtagctcgcatcgccgatcatgcccgtcgtggacggtgccatcgccatcgccatgttctcgctgctcatgccctgcatcgcattggccagcgcaacgatgtcggtcaagctcatatccgtcttgaagcactgcgcgatgctcgggacgagcgtcgcgagctcggcggggtccttctggagcaccttttcgacgattgcctgcgcgatgaggcgctggcaggtcgtgcgtgtaaagtcgccgtcgctgtaggtcttgcggttgcgcgcgagcatgagcgcctgctcgccgttcagctcctgcacgcccgggttcagcgagatgccgccgtacgaggcgtattccggcacgtcgacggtgattccgccgagctggtcgaccagctgctcgaacccgctgaagttgacctcgatgtaatggctgatgtcgatacccgcgtattcctcgatcgtctggatggcctgcttggcgccgccgagcgaatacgccgcgttgatcttttgctggtgaccgttgatgtagacgagcgaatcacgcggaatcgacacgaatgtgacctgcttgtttgccgggtcgatgcgcgcgagcaagatgacatcggagcgctgcccggagacgtcgcttggcccctcgcgctcgtcggagcccaagatgagcgtccagaacggctcggagaccgagacctcggactgcaactcttccttgattcccgtgtccttgatgctgatggcgttttgcgtgttgttccagaacgcgaatgcggcgccgcccaccccgccaaagatcagcacgac

SEQ ID NO: 3986 - DNA, 32759 bp, Unknown
  16S sequences of unknown bacteria
gggggttttcggataggcaagaacggcgcggcgggaccggcgggggggggatttacttgatatcccggcggcagaagctgtcccgggcgatccacaggaaacagacggtgtaaatgagtaggatgacgacggagaagccgagggtcatggtgccgtcgacggtgctgctcaggccccctgtcagactcattccccccattgacgaagggaagtaggcgccgagactggtgttggagaagagaaggaacttgagccctgggatggtgaagccggccatagcgccgaccagggccacaatggagaggaccatttcgctgccgaacatcagcaggatcgagaccgcgatggcgacggcgctcttccgggtgacggctgaaagcatcagcgccaacgaagcgtaggcgatcaccggcaggaggaagaggagatatttgagcaggatgaacagcagataggggatgcgcacgacggtgccgaacaacggcgtcacctgcatggcggcgagatcggagaagccggtgaacaggccgctgacgaagaaggacatcacaaacatcgcgccggaggtgatgaggatgacctcgaggagcagaagggccttggaccagaagatcttggaccggcggtggggggtgatgagcagcagcttgaccgtaccggtcccgaattccgtcgccagtatgccgccggcgatcaccatgagcagcagggagaccagctccaggctgctggtggagacatccatcatcgccgggaaagaagtgctgtcgacaggaggcgtgtctgttgacaggcgcttgagcgccacttcgatattcgattcgagctcacgcctctgggttttggtcagcggggtgttgttctcgctttccccccgtacgagggagagcttgctggtttggataagctgtagctgctcgcttttccaagcaccggcatcggtctgatcctggccgtaataccccatggtggtggagacgggctgtatccccatttccaggtacatatcgaggatttcaatctggacctccacctcttcgggggactgattccccagttcgtcgggggtgagggcggcaagctcgtccttacgggattggatgtaggcccgccagtcgttgtccgccagcagggcgtcgatttccgccatcttggcccgggcgtcggcaaccgacagctccagctcggcccgttcctcctccgctaggagcgggttttggagctgttcgagcgcctccagctccacgcgcttgtactgatcccagtaggaggacacgagatcggtccgccagtcggagggcgggatgtcgttatccagcagatatttgaatttctgtgcctccgcatacgacatggggtcgctgtccgcattgcgctgggcataggtgtagttccactcgtagttttcacgccaagtggtgccgcccccactggacataagcacgttggacagcttgacaatgccgagggtgaagagcattaacgccacgatgacgcccatcaggatccaggtggacacttttttatacagcttggtccgttcgttttgcagcagcttattcaacaacgttccctccccctgtgatcgacatgaagatctgctcgagggagttgccctgagcggccaggccatagatggtgatgccgttttccatgaagcggcagttgacgttcccgacctcttcttccgcgatgtgcaggtcgatgaaatcgggcccgacgccgaccaggcggtcggagaggtgctgctgggccaggcggacggcgtcctccatgggccgcagggagtagcggtagatgttgccggtattcaggcgggagagctcttcgatcgtgcccacccggagcagctcgccgttgttgatgatgccgacggtgtcgcacatgagctgcatttcctggaggatgtggctggaaaccatcaccgacagcccccgctgatgggccagatgccgcagcaggtcccggaattctttgataccagccggatcgaggccgttggtcggctcatccagaatcatgattttcggattgtggagcagagcctgtgcgacgcccagccgctgtttcatgcccagggaatagcttttgaacttttccttgatccgcatctgcatcccaacgagggtcacgacctcgtcgatgcggcgcggatcggcgccgcaggcgcgggcctggatcatcaggttgtcgtaaccggacaggtagccgtacatatccgggttttccacgatgccgctgattcccgacatggcggcctcgaaatcgttttcgatatcgtgcccgttgaccaggatggtgccgctgtccgcggcgagcagaccgagcaccattttgatggtggtggttttgcctgcgccgttcgggccgaggaaaccgaatatttccccttccccgaccgcgaagctgacgtttttcacgacggggcggtgcccaaaggatttgcagacgttttccagacggagtacctcgctcatgccgtcgcctcctctatgcttttataagaatcgcggtagaggctgctcacacggtaaagcttccattccccatcggatttctgaaaaatcagggtcatgtcgacggtctgctggccgtcctccaccttgaccagtccttcggtccgatagttggtaaaatcgccgctgacccgataggtgtattccatggaaaggctggcggtatcctcgttgatcaggcagcggaccacccgggccttctcgagttcctgggagtggatcaggaagtcgccgtacgcgatggagccgacctcgcccatgaccaggctgaccgccggcttcagatagccggaatcctggacgaacaggggggcgagctccgcctcgatttccgcctgcttggccgacagggcggctttgtcgcggtcgagccgcgcggcgtcctcctgcgtcatggtggcgaggccctcgaaggtctgccggacggtgtcggcggcctttttcagttcattcctttgaggaatgagcatgaattgggtggcaattacatacaacacgacggcgcccaacagcaccatggacacgataaatccacggtttacccgctttttgggtttcatttcgctcatcggttcatctcctcttctctgtcaaatggggccgccggccgtgcggccggcgggttcaaaccacgctcattatagcacgcgtttttgcaaataaaaccggattcgggcttttttccgccatccttcataaaaacttaatacttcccgaaaagtcctgtcccccttgaaaaggaggctaaaatttgctagactaaaaaacagaaattataagaaagcgggttttaggcatggcacagaacaattccacggccaaggtcatctccatcctggactacatagggatcctctggatcttgggcctgttcatcgaaaaggacgacccggacgtcaaattccacaccaatcaggggctcatcctcttcctgctggaggtcgtgacgggcgtgttttcggtcctgtcggtcatccccattctcggaatcgtgttcaccctcgccggtgggcttctgggcatcgtctgcctggtgctggccatcctcgggattgtcaacgccgcccaggggctgcagaagcccctgccggtcatcggtaccctgttcagctttatcaaataaggcgggcggataaccaaaaacacagccggcgcagcaactgctgcgccggctgtgtttctatggggaaatagaaagggggaaacagaaaatcgatacccgggcaggccggaaacggagaggaaagccgacgcccggtggaagcatttgtaggatacattcttatcatatcatatacggagaaaaattgcaatacatatgtgatacatattcacatgcaaaatcaatgcataataaaggcagacatatattatgcagcgacgggggagatatgatgagaaaattcaagatcccatccattccaccgaccacgaataaatgcattcggatcccgaacgatgtcatcgccggggtggagaaggcgatccggggccgagactgcacgttttcggcgttcgtcatcgaggcgctccgagtggcattggagaaccttgaggaggaaaacggcgagcatcccgatccgtgaaacgacagaaaagagaggccgccggaaccgccggcggcctctcgacatgtatgacccgtatttgcctgtcccgtggggattcccgcttaccacaggctctctcccttttcgaccgcccttctggaggcggaacggaccgctttcaggatggcattcgggcagggtgatttcgacgcagtcccggcaggccccctgggcatccagggaaatggccgttaacaggcagaggccgctgtcccaatagatacagaactggttgtcgcaccgcataccacagccctcctcaatatacacgacatatgccatataataattatatattataagttattagacatcaagagctggttatagacttatgtttattttctgaaattcgccatacactttttatgaggtgacgcggatgtccagaagcacgaaaatcgcttttcacaaccgggacaaatacatcgcgctgggcctgaacatcgcctattaccggaaacggcaggggatgacgcaggaacagctcgcggaaaaagccggaatcagccgttcctatctgggagagatcgaggcacctaacatggtgtccaccctgtcgctggaggtgctgttcaacatcgccgccgcgctgcaggtcccggaataccagctgctggagttccgggactgacagccggacaaacgaataggcaaaagcgtcgcccccggagaaatctccgggggcgatgtcgtatgggctatgtacggtccgaaccgctgccgatttttaacccaagggatcaggcgtcgggggtatcggaaccggaatccgaaccggcgtcgggctccgcgcccgcttccaggtcggccgggacttttccgggacgaatcttgaaataccagtaggcaaagccgccgcctccgcccagaaggaggacggccgccgcgatcaggacgacgggcagccacgggaagccgccggtttcccctgtaccgcccgggaggtctgagctgtcggagggcgcggtacccgtggcgttgttaccggcctcgacggtggaggaatccggcagggaggcgccaccggaagggaggctcccgtccgggtcggtgatttcaggggcactgccgtcaggggatgtggtgccgtccccgccgttgggggaggtcacgggcggattgttgttctggttgttgtccgggggcttggtgccgggggtggaggcgtcgcccaggatctcgctgacccggacattgtcgaacaggacgccgaaatccgggccctgctcggccagggcgatgaagaagcgcagcccgtaaaccgcgccggcttcaaagtcggtaggggtgtagtccactgtcacccgtttgtatccgtttgggagggattctcccaggtcgttggtgacgaggttgacgttgctccatccgcctaggttgccgggcatcttatcgggatcctgcatgaaagccacatgggtctgcatcgtgtcttcgcgggtggtaccgaggaatttgtagtcgaacatcagccggtagctcttgccgggttttaggttttcgctgaagttgacataggcggaaccgtaactgagcatcatgttgccggccatacggagggccttggaaccgccgtcctcgacgacggtggcggccattttgtcgccttccgccgtccaccagccgttgacgtcggggttgggatcgtagagggtgctgacgttcttatactcgaagtcgccgccccgcacgaggttggcgtcggacagctcgaccgctttgtcggtgccggcctttgcgctgatcttgcagatttccacgttgtcgatcaggatattggcctcgttgccgagcttggctccgttgtaattgaactccgcgaagaaacggatggccttgaagctggagggggcctgcgccacgaaggtgccggagacctgcttccagccgtcgcccacgtcgacaccggggcgctgcgccaggcccacgacgagggtgtggatgggaccggtgccgccgtccatgacatcgcagtggagctggttggttttggtcagcgggtcggtcactttatacaggaaggtgatctgataggtttcggcttttttaatcgtgcttttggggaagacgtagtaggcggcgccgtatgcgtcgttcccgttgccctcgatttgcaggcatttgcccccgccgtatcccttgtcgacgatgctggtggttttgtagtcgtattcgttggagcgccacccctgggtggaagagagctcctcgttggtccctttttgcggcaggatgccggtggccgccgattcaaaggtaccggtacagaaattctcgcctttgacgatcgtgtacgctttggccgagctggtatccgccgcggcggggagcagcagggtcagcgacagcagcgcggcggccgtcaggctgatcagctttttcacaggaaacaccatccctttccgtcatccaaaggcggaagagccggggcccttccgcctttgggctgtcacagctggtttacttttcgcggcggcgggaaactgccactgcggcggcggaggccgcgcctagaagcaggacgaacggcacggcgctggcgacgcccgtcttgggcccgtcgggcgtctcagacggagtggagggattcgacggggccgaggaaccgggctcatcgaacagcttgtcatacgcccggttgaggaaggtcacgatgtgttcgggcaccatggccttgtgctcggcactcagggcgttgtaggcatcgtaggcggccttgacgtcggccttgtcggcctcggagagctcatccatggccttgaagccgtccaccatgtcgatgacctcctgcacctcgtcgggcaggggatcggcgttcgcaatgtcgtagagggcgacgttgtcgaaatagataccggtatcgttgccgttgtcggcgccgatctggatgaagaaacgcaggtcgctgatggcggaagcctcgaattcagacggagtgaaatccatctctacatggcggtagccattctccagctcgacaccggggagggtgaggaggttgatggtgtaccagccgcctggggtgccggcctgcttgttgttgaggaggctgacgtgcgcctgccagctcagggtatcggtgatgtcgatgaatttgtagtcgaacgccaggcgataggtgcgctcggcggtcagctcgggcattttgtaaagggcggtgccataggccacggcattgttgcccgccaggcggaggaccttggaggaaccgtcccgcacaaacgcggtggagtcggcgtcccaggcgttggagccccagccgtcgtcgtcataggtggtgccgagcttctcgcccagggtcttgtcctcgaaatcgccgccggcgaccaggttggccgagctcaggttttcgtcggcggcggggttggcggcgggaacggccttgccgatctggatgtcgtcgaacaggacataggcgtcactgccgaggggcggggtgccctccggctggcggaagtcggcgaacaggcgcaggaaggtgcggtcgccgaacgcctcacaggccacggtgccggtcacgcggtaccagccgtccccggccggggtgccgacataatcggtgaagccgcagacctcggaggtaatatccgcgcgaggatcgtccttgatgaccgcgatcggatcccctgcggcccagacggtgttgggggtgatgtgggcgtggatctggggggtgcccgccttcatcgtgtcgctgaccttatagaggaaggagacggcgatgacgtccttgtcggcaaaggcgccggccgggagcttccagtaggcggcgccgaaggccttgccgccgtcgcccgcgattttcagggccttgccgccgccgaagccgacgccggactcaatagtggcaccgatgtcagccggattagaaaaccaccccgcggtagccgacaagtcctggttcacaacggtttcatgatcgtaggtgggcagagcgatgggggaaccggcggcagcagcagttccttcaaagtcgctgttctccgagaggttggtgaaggtccattgatagaccgtgccggcgtccgcagcgaatgcggtcatggatgtcatgagcagcagggcggcgataacgacgagagagagagcctttttcatgtttgttcctcctttgaatttgggataacaagacaacgataaggttttgcatatcctccttcctgaatcattcaccggtgataccgcttttgtcgatgctttctatgagcttccgctcgaccaggacatagatgaggagcagcgggatgatggagagcacagccgccgccatctcgacgccctggttgagctgggcctcgatgctttgggtatccacgaccggatacatacgggtgaaggtgtcacggaaacgctggagagccaagggaagggtgacgaggctcttgccgaaataggtgtcggccagggtggtctcattccagttccagaccagggagaagatgaagacgacaatggtggcgggggtggcggcgcgcaggttgatctttaaaaagatgccgagctgggacgcgccgtcgatggaggccgcctcgtccagggagggcggggccatccggaagaattggacgtagattaggatgaagatcgcgtggcgcagcccctgtccgaagatggtgggaagcaggaccggcaggatggaattatccattttataggtggtgaacatgacgtattcgggcaggaaggagacctgcttcggaatgaaaaaagtggcgatcatcagcgcgaagagtatccggcggaaagggaagtcgtgcttcgcgaagccgtaagccaccatggcggaaaccacggtctgcaccacggcgacgatccccatccagaacagggaggagagcgcggtctgatagcccccgagggcgttgtatgccttgacgaaattatcggtattgaaggagcggggcagccagttcaccagcggatccaccaggtcgtaggcgtccatgccgctggcggacaggaagcagaggatcgggtagaggaaggtgaagctcacgccggtgagcagcacgtaaatgagcacctgggagagtactgactttttgccgcccgatccggcgatgagccgcctcatccccgactttgacacaaggcgggagacagaccgttttgtcatgatgctggtcattcctttcgttcggggataggcggcgggccgggcggcgcagcattacgcgcccagaccctccctttgggcttggcggtgccgtttttccgcgcggcgggcggcacggcgccgctccttgtccttctgcctcatcgggtccttttctttccgcccgaaaaccaggaaagccagcagcagggcggcgaggacgaacaagaaatagagccaggaggcggccgaggagaagccgaagcccttggacggggcgaacatgccgtcctggatcaccttggtgaaggggctcagcgaggacagcgcgatgtctacgaccgtgtagacggcgatcaggaggataaaaggtttgaccaccgggatggtgatcttccagaaccgctgccaggccgaggcaccgtccaccatcgaggcctcatacagggaattgtccaccttttggagcccggagagaaaaatcaggacctgcacgccgctgaaccagaagatcagcacgatgttggagatgatatactggatcggggaggagaggacgggcgggacctggttgtaaataaattggaagacgaagaaggaatcgacgcccggcagattggtggcccccacctggcggatccgttcgaggacgggcccggagatgaggatgacgggcaggaagaagatggcgcggtagatccgctggccccggatatggctgttgagcagcagggcgaacagcagggaaaacaccacgatcatcgggaccatgaacaccatctgccggagaaaggtggggatcccgagggtgaagtccgggtcggtgaagaggacgtcggtgtaattcttgaatcccaccggggccgtttcggttccctgaggggtgatggtgacgttggaaaagctgtacaggatggtctgggacaggggatagagcaggaacacgacaaagccgatgatccagggcagtacgaggcagaagccgaacagttttttgcgggtggagtatttcacggccggggaaccctcctttcctgtgcggtcatacgcagacggcctgcatggcgggcacgtcggtgccgtccagtgagaaaacggtatcggtgtaattgacgatgacggttttcccgttgtcgtaccggacgacggaaacgccgtcggcggggcaggtacggctcgtcaccgaggcgcccgaaacctcgcgcagaaccggatcgacgacggcgtacacccgggcgatttcgtccagataatcgtcgaactgcgaggaatagacgtcgttggtatggcattgggcgaactcctccgacgacgcttcggtgaggagataggcggggtagacgttgtaatcgatcatctgcagcaccgcggcgttgccgccggcgctgaggttctgccagggggagaagctcgggatatgcccgccggtgaccatctgggcgaaggggacggtatcggtttcgaagacatagcgggaatgctgcatgtcggtgttataaatcatgtccgcgtacgccagcgagtaggcggcgggggcttccagggccaggataccgctggattcccgcagggaggcgagattggcctttgtctcctccagcatggcggcccggctcatctcccggccctccttgaagttgctgtacagggtgctgccaagccccggcagggcggcattccgcttgtattccggcagcccggcataggccttcaccgatttggacaccgccgccgcgtcgagatagtagcggctgccaaagaggaaaccggtgtcgggggtggtggtaaagacccggttgatcgcgtaaagaaagccggattttttggcttggttttcataggcgcggctgaactccttggagagcagcaggccggagccagggacgttcagcttgccgtagagggcctgcagctccttttcgccgccgacgccgccctccagcttatagctgcccgcttttccgccgctgtatcctccctgttcgaagccgtatagggagaggacgaggcttccgatatcctgctcgcggaggcaatccacccagccggtgacgtcctggagggtggtgaagaccttggtggagcggccgaacagggattttgcctggtcggccatgagggcttggatatagaccgggatatggtcggagggggcggccttgtccggcagaccgccgcttgcgagcaggtggcggcggtaggcggaggccatgcccgcgtaattggcgtcatcgccgctgaggagggtataggtcacctcggcgttgacggtgttgggggtcttttgaatgacatcgaacccggtcccagagccggtggattggcggtattgctcacggtagaggaaaaccggggacatccagtgaaagtcgatcttgaccccggcggggctgacttcgaagccggcataggtttcgccgcccgtgacgacgccgagaaacccgttctggttggagccatgtaccgcgccgtagaccgggaactgcaggtttttcgtcggggtgggggccagcccgttctgataggcggcgggcgcctggacgctgacatccggtccgtatacccgcagaagggtggaggagttgtaggtcttgggttcgtcaaagcgcatcaacgcgccgcagccgtccgggatgaagaagtagcccgggatggtgttcgagtaggcggagccgaggaagggcagaacataaagcttacccaggcggtggtccggcttattgaatacgatttcctcatccggaatgcgcactttgaagccgtcttcggtcagagacagatacacccgggcggtggcgtcgggttcccggaaggtcagggtggcggccaggccgtcctccgtgcacagcaggtcggccgcggccttgtcgaaccgggcggaggagcgcaggctcgctccgttggcgttgaagtaatccattgtcaggaaggcctgggaaaagcgccgccaggttccggtcatggatgccagctcggtttcggtcgcgctgctcgaccagacgtagtccccctgcttgtcgaggattttgacgatgaaagcctcttcgtccagatacagggcgaggcggctgttttcacagaccaggcggtcggtttccgcgagggactcgctcggggcggtgccctcgatatcctttttgacgctgccgaaaaggctgggcgaggggttgagggggcgggcggcgcccggttcctcctcttcgccccgggcgatccctcccgcgagcagcgccgcggcgcacaggacggcggcgattgatgcgatccgtttattcacgcaggctcacctccgttatgagttccccgataaaggtgaagatctgtttgatgagcaggtaggccagggacagcaccagcaccgccaccagcatgaaaaacgctgtcagaagcaggttcttgaccaggcttttggccgaatagtcgtggatctggatcagagaggtgaacagggcggccgcgatccaggcaacgatgaggatgagtaccatctggcggacgaagagctcgttataggtcaggccgttgaggacgatggtcaggaagggcagcagcaggatggcgggggcgaagctgtacaccgtgacgatgtagatcgaccgcagcgtgcccttgccgtcctggatggagctgatgaaaaagttgccgatgacaaacaggatgagggccgcggagaggtagaggaaggtgctcaagatggagaagtcctcgaccttctgcgcgaagaggaagcccgaggcgagctgatagacgacatacaccacaaagaggatgccgtataccgccgtcgcggacgcgacgctgccggcccgcccggcctggatctcataggctgtgtcgatgggatgcagggcaaaccgcttgatgagcaggagatcctgaccgaagcgggagaaccggccccgggtccgcggctcctttgcaggggcgggctttttccgatgggagaggctcttgaccgccacggcggccacggccaggacgagcagggcgatgaggatatacagcatgtgctcctgcagccagaggttgcgcagctcccaataggcttcggaatactcggctttggctccggcgatcttgaattcccgtatcgcttggtcgtacgccccctgctgcatatagttctggcccatgtacaggcggacgaagtaggaggtgctgttgcgggtgaggatggtttccagcagtacgcggctttcatcgtaccgcccctcggcatacaggtcgagggccctgtaaatatccagctgcacgggggtgggctcgaatatctggatataattccgtttggcgtcgagcacgtagaggcggccgtccgcatcctcccccacgccggtggcaagatcgaacaggcccacccgttcgctcccggccgagttgccgccgaaacggcaaaggaaatgcccctcccggtccacgacggtgatatagcccgcgttgtccaccaccagcatccgcccgtcgttggtgacgaagaggtcgccggcggcgctgaaggcggggagataggaacgcccggcgaacaggtcgagcccgttgatgctgtggcgctggatggtggagccgggttccttgttgagggtatagacgaggccgtccgcgccagtgaagatgctgccgtagctgggcggggtgctgggaaggaatttgttcagctgttcctcggtgagcaccacgtcgaggagtttttcaaacaggctctttttgacgtcgttggacgcgaagaagccgaggaattcgccggtgccgtccatgtggatgatgccggttttggaatcctcgctgatgatatacaccccgccgctgcccgcggccgcgattttcagcggggaaaaccgggtgtttttcccgaagctcggggtgttgggatgctcgaatacttgctcgagctgcccgtcgggggagaagcggaaggcgaggccggcgccggggtcggcgacatagatgcggccctcttcgtcggcggccacccccttcggctcggtgaggaggccctccccgacggccgtggcggtatcgtttgccgtatccagcacgaggatccgctgattgccgctgtcggcgacgtatacggtatggtcccggacatacaggtcctgcgcgttgtcgatcccgagctcgctgtacaccccagccgggaggtaggcatcgggggaaatttccatgcccccgttgatggtgggggacaccgtatagctcgtcgatcccgaatccgccagcgccgtcaggcatacgaccggaaaaagaagcgccgacaggagtccgcggcggagaaggtgacgtttcatgcggcccttcctttctatgagttcgttcggggatagccgggaacaagatcccgcttcgccggcacattcgctcatttgattcccgaatgcgccatggtgttgagcaccttgttctgcatgaagatgaagatgaggaggttcgggatgaacatgacgagggtggcggcggccaggatgccgcggccggccacgttgttgcccatgccgacgatcatgctggacagatagaaggcgaaggtgcgcatcatgtcgttattgacgtaataagtgctgatctccgcgttgttccagcttgcctggaaggccaggatagccacggtggccagcgccggcttgacgatgggggcgatgatgctcgtcacgatccggaaatcccccgccccgtcgatccgggccgcctcaatcagggcatcgggaacctggtcgataaactgcttgacgaggaacagcccgaccggcatggccagcagcggcaggaacaggatcaggaaattgtcgatcagatgggatttttcaatgatcagataccgggggatctgcacggcctgagggacgaacatcagcgccatggtgttgatggtgaagagaatccctttgccgcggaagcgttttttggagaggacatatccggcgttgagagagattaccagcgtgaatcccaccgccagaagggcggacacgatgctgttgaagaggtagcgggagagcgggatgccggaggattcgatataggaggagatgtccagaaaattatccatggtgggcttctgcacgaaaaagcggggtggataggcgaacaactcgtccatgggcttgaaggccgtggagaagatatagatgatggggagcagcatcaccgccgcgagggggaccaggtaagcgtagattttgagctgggacaggctgaaacggctggggtttatcttgctgccctgaaaactcgacatggcgtcttcgtcctttcctttccgcgttcggtcagtccctctccgcgaaaaatttattggcgagctgggatacgaggaggatcagcagcaggagcagcaccgacaacgcggtggcgtatcccatgttgtactgcaggaatccctggtccatgatgtggctgaccatggtctggcccgcgtactgcggcgtggggttggccccggtcaggtcgatgccgatctggccggccgaaaaggaattgacgatggccatgaccgcgccgaacagcatctggggtttcatggaggggacggtgatgtagagaatctcctggaaacggttccgcaccccgtcgatatatccggcctcgtagatttcggcgtcgatgttcagcacgccggccatcatggaaaggaaacccacgcccatgctggaccagagggaggcgatgatcatgatgggcaggatgtactggggggattgcagccattggatgggggcgtcgatggcgccgatcgtgaggaggaaattgttgagatacccgaactcatccccggcgaacagcaccttccagacgaccgacagggtgacgccggccgtcatggagggcgagtagaaaatcagcgccagaatggtgcggggccagcgggagatctgggccagggaccatgcgaggagaaactggaggatgaaacccacagccccgaccacgacggaaaacacgatcatattcggcagcacgttgcgcatgagcacgtcgtcctgcgtaaaggccttgatgtagttcgcaaggccgttccattccggggtgctgaccatgttgaaataggtgaagctgagcaccaccgcgacgatgatgggcgccgcgatgaagaacaggaagagcagcgcgtaggggccgagcagaaccgtgttggcgaaggtgccgccgaaatgccggacccgatggcggatgacgcccggcttttgcatgctcattcctccttccatcggtctacgtcctcaccggtgacgaccttgaattcttttatcaggttccccttgtcgtccatatacccgaactcctggagcttctgggcaatttggcggttgcaggtcaggattgccttgtcgagcgaggcgcggggggtgtcgccgctgtagaccacccggttccaggcgttggaaagctcccgttccacggcgaaataggctggattgcgggggacttccaccgtctggtcgatctgctcgaggatgatctggaggttctccggctcaaaggcggtgcttttcgccagcgccttgaggttcgcggtgttccagatgtattcggggccgttgcgcaggtacatttctctcgtatattcgacctgggtatcctccgacatccaccatttgaggaagtcccagccctcctcgtgcttgtcgctgtcctgcatcagcacacagccgttcatgaccgagagctggctgcggttgatgtcgccgttttcgtcccggacaccgaccgagggggcgatgccccactggcccttgatctccggcgcggcgtttttgagcaggatataggtggagatgtcggacatgccgatggggctgatcccctttttgaaattgttgtagaaattcggaatggaggcgggcaggctgtagcgggtatacaggtcggtcatcagggtgaaggccgccacggtgtccggatcacccagttccacccggctcccgtcctctgagtagagcttgccgccgtactggttgatgaagggcatggtggcgccgaagtgcttgaaggattcgagattggagagataggtgttgtagctcatcccgtaccggctgagcaccggcagcatggcgagcacgtcgtcccaggtttccgggacctccagccccaggctcgcgaggatatccttgcggtagaactgtacgacaaaattcgcggtttcgggcaggccgaagcactggtccccgatggagaacatcacgagcatttcggagtggaagtcccggatgaaggaaccgaaatccgggaactgccgcagatcgtacagggcgccgcgcagggcgaaatcgaagggacggaaggtcgtggtgcccagcaccacgtcggggccggtgccggccgactgcgcaaagatgagcttctgctcatccgccatgatggagaaattgaccttgccgccggtataccgccggtctgccagctcccgcagggcctcgacatggaaggtggagcggcccacccacacgttgagttcctcctccgaggtctgcccggcggtgtcgtaatcggcgacaaaggtgtaaaagagcttctggatttgcttccagacggcttcgaagaaaccggtgccatggtgctccagatcatcggcgcggggggagagcaggatctggtcgatatccatcggctggtcgagcaggccgtccatcagggtagagacgcgctctgccaccgaaccgctcccctgggagaagcggctgatgttgttgacgaaatattcgagatcctccgcgtatcgggtcagggtggcggccgcgaccttcaggtcggaaaccgccgatatggtctgtttggatgccatgccggaaataaccgcgtaggcggtgttcacctggtcggcgatggcatagagctccgaacggatatcgggaaggaactcctcgagcttccaatcccggtttttgtcgattttattgccggtcacctttttgacttccagggcgatgcggttgatctcgttgactacgtcctgaagctgttcaaaggtttcatacaggggggaggccgagctctcgagggtcagggtatgctccccagcctcgagatagaggcctgccgggctgccgtccacgctgacggtatgggttttgatgccggaaccggtataggggaaggcgtagctctgcatctcgccgaacaggggccgcccgtcgacgtagaggtttttgaacaccggcatgttggttttttccgattggctgtaccgcagggccagataatacacgccgctctgttcggcgcggaaggtatagctgaccgcgttgccgggggtcgcccaggtgtagccggagagcaggttgatccggctggaatcgggggcgtacggggtgcagttgtagttgcgggttttctcgccgcgtatgtaggaatgggatttggaggtatatttctcgccttcgagcaggatcggctcggtttcggcggtgacgccgctctccttcgaggcggccccggccgcgtaagaggcgtagggctcgggcgccgcgtagccgccgaaggatatgccggagatccggcaggggacagtgccgaattccagatcgatccggttgaccccttccttcagaggaaaaaccagaggaatgtcgagatgatagacgctgctgttgagcgccttggactgccaggccggcgtatggaccggcaggggatagacttcgttgttgaagcggtcgagcttgtaatcctgggaatcgtccgcccaaaccgaggggagagtgatttcgcggctgtccgaaaaggggtattccccgccgattttcagggaaaaggacacgtcctcggtggattcctcggtgacgatataggaaagggtgaggatatacccccccgccgccggacagtccacatcgaaggagagccgggcgcctttgccgatctgcaggagggggacggaagttccctccggtccggggccctcggccagggtgacgccggacgcctcctccgtcaggcagatatcctccgccggaatggtgaaggccttatccgcggaaaccaggctttccagccggctgccggccgcatggtaataggaggggacggtgtccggtgccagcgcacccgccaggggcgttccggacagaaggagcgagacggcggcagccactgccgccgctttggcggctacggccgccgggaaggtcggaatgcgcggatgcaaggcggacacctccttacagaaatgggcccggctgcccgcttgcgggcggacagccgggcggctgtccaggatcagggatgtatcagcctgtcacgtctttccaggccatttcggtggtggaattgatggtgtcttccaggctcttcgccaggtcggcggcggtcttggagccggtgtagaggatgtccttgagcacccggttggtcacgaggttttcccaggtgttggcgtattcggggacgatccgccagcagtcgacgtagccgcgggagaagttctccagcatgtagtcgaggcccggcttgtagccgacgtccatgctcttccagagctcgatggcttcggggttgttaatggggggcaaggagagggattcgatcttctcaggcaggtcggccgcgatatcggggtagtttttcgcggtttctgccttgtcgtaggcgttgacgatgcccaccttgtcgcggaagccttcgagatcataggacatgtacttgatgagctcccacgccgcgtcggggtttttgcagctggtggtgatgccgtaatagtccacgctgaggcccggacgggagacgtcaccggcgccggaggaggggaaggggtaataatcccaatcgaagccggtataggacggatcggtcttgtcaaaccgcagggtccaggagaaatcctcctgcatggcgaccttgccgagcggccacggcacctcggtggtgcccacggccttcatcaggtagtcgttgcgtttttcgaccaccgcgttatagtccgcggaatcttcttcaaaatcatcgggtttgcctaatttgtcgatgttttcccagataacgtattctttgtcgacgatatccttcattttgttgacggtttcgatccactcgttgcccaggctgtacgtctgggtcgagtaattataggcagcccagccgagttcatcgttcatctgcgcgggcagatgtttcatcagccagatgatattgttggtgccgatgctctcgcctttgacggaggaggctttcaggatgttcatgaaatcgtcgatggtccagtcatagccgggcttcggaatgttgagatcctccagcagggtgaggttgaccttgatgccatggaaaaagacgttgctgggcaggacataaagcttgccgccgatggagccgaactcgatgaagttctcgtaaatcgccgctttgtccgggtcgttctgataataggacgagatatccatcagccagttgtttttgacaggggtgtaaatattctcgacgttgatgatgtccggcatcttattggccgcggccagcttggccagatcctcggtgccgagccatttgccttcttccgccagctccaccttgatttccgggtgcttttcggtgaatttggccatccagggggctttcagggcgttgacctcccagctcgccagagtgagggttacatttttcttcgtctccgagccggaagtcccggactcggtggcgtcacccggcttacagccggaaatcaggctcagggacagggcggctgcgaatgcggcgcagaatacgcggacggttcttttcatagcgctgtctccttttctctatgtttctggtgcgtttggataccgcaaaggaaccccctttgccgtgggatccaggcatctgttggggctcgccaagtctgcaaaaatgcgttttcccacctccataaaacataataacatcgatgtcacaagaacctggaaaagccgcgaggcttgatgtggtaacacataaatagccaataaaaagataaaccgtcggataaattcatgcaatatagatgcgaaatgattgcattgcatccagcaagacgagagataggcccatcggatttggtcgaaattaaaattcatgatatcgatgtctcatcgggcccaaacaaagcacaattttccggcaaacatgagaacagccagtggaattgtgcttgattctggtttcagtataatcccaggattgctatttgtcaacagttttacacaaataattttatgttcttttgtaatcaatcacagaatcgcggtaaataagctcgggttcgatcaacaaactcttacggaattcgcggtggtcccggatccgttcgaagaggaggtcggcagccatggagccgatggtttcctgtttcatgtccaccgatgtcaggctgggatagacacaggtacagaaatcggtgttgtcgagggtgacgagggatacgtcccccggaatccgcaggtctttttcgtggcagacatccgttacgccgatccccatcaggtcgttggcggcgacgacgcccgaaaagggccggccggattcgaggaactggcggaagcggtccccggcggtctcacggctgaaaccggcgggcaggcagtaggactcgtcgaaggggatgccgccggcctcgagcgcctttttataccccagcagacgttcgacgcctgtctgctcctgcgggtcgccgccgagatacacgatgcggcggtgccctttccggatcaggtggctggtggccagatacgtcgccttcgtatgatcgacatacacgcagtcgaagttgcttttttcgctgtaatcctcataaaagttggtgatgacgaccgggacggcgcagtgcttgatccgctcgatgagcgcttcgttgaagttgaaggaaaccatgatgaggccgtcggcgaacttttcccgcatggaatccaccgtctgggtctccttatcgaacgagtggttggtcggcaggaggatcgtccggtagttgaaccgttcgcagacgtcgttgacccccttgatcatgcggaaataaaaggggttgtagatgtcggggatgcacagcaggatcttgtttgtgatattgctgcgcagggttttggccgcctgggaggggacgtaattgacctctttggcggttttgagcaccagctcccgcgcctcctggctgcagtagccccgcccggacagggcacgggccacggtggagggggaaagatgggtgattttggcgatttcatagatgttgctcataatcggtttccgttccgacccaagagtttccagattgagggcctgtttttctgcattatatcacacgcttgtgtcagaagtcaatcataaaaataaagctaaatgcacaaaaacatattataaaaatgagcggatataaacgaaaatacccgaagtcagggaaggtgtattgacagttttctgcgaatcgtgtattctatgtataacattgatgtcacaaccgaacagaggagtcgcaggctgtatgaatttcatatggccttttgtgctatgcggatatatgctgcatgcaggcggcgggtagattcatccgcccgccgggcggccgtccgatgaaacacggaaagcctctcgcgcttttcaccggggtatggaaccctccggacaagaagaaaggaatggttttacgatgagctttaatggtatctgcaattctatgggggatttgatgcgtttgtccgacgccaaaacccgttccatctgcccggaaaactttaccggcgaaaagggcaagggcggcatgtgccccttggaggaagggaacgcccaccgggcggcccgcgatctcgggacaggctggaaagtcaatccctatatcgtcatcccggccggtgaaacctttgagatcgcctcgatcgacgggatgggctgcatccagcacatctggatgacccccaccggcaaatggcgcaacaccatcatccggatgtattgggacgggcaggagaacccttcggtggaatcgccggtcggtgactttttctgttccggctggaaccaatacgcgcagctgtcctcattggcggtgtgcgtcaaccccggcagcgctttcaactgctactggcagatgcccttccgggaaaattgccgcattaccctggaaaaccgggatgaggagccggtgacctattactatcagatcgattacaccctcaccgagattcccgaggactgcgcgtatttccacgcccgtttcaaccgggtcaaccccctgccgtataaagaggtgtatactatcctggacggggtcaagggccgcggccagtatgtcggcacctatatggcctggggggtcaacaactccggctggtggggcgaaggcgaaatcaaattctatatggacggggacagggaatacccgaccatctgtgggacaggaaccgaggattatttctgcggctcctacaacttcgaaaacccggtgacgcacgatcaatatgtggagttttccaccccttattccgggctgcaccaggtcctgacgcccgaccgcctctaccggagccagttccgcttcggcctctatcgctggcatgtgaccgatcccatccggttcgaatccgacctgcgggtgacgatccaggccctcggatggcgggagggacagcggtacctgccgctgcaggacgacatcgcgtcggtggcgttctggtaccagaccctgccctctgccccctttgccccgctgcccgacaaggattatctggaagtgatctgacgccgcacggcagacggttatcatgaaggccgatggaagcatcgcgccgccccacgagagtgagaaaggcataggtacataagatgcaaaaacgaaactggatgcgcaccctcgcggcatgcctggtgtgcagcgccctcctgctcgcgtccgcctgtgggaaaaagccggccggcccgtcgtcggatcccgccctttcggatgcctccagcaccgatgtttccacagatggaagcgggggttcgctgccggacggggagacgtcggacacggaaggcaccgtttccggcgacccggcttccggtggcccgacgtcgtcccaaaaccccggcagctccggttcaaacgggacaaggcccccggactcctcgggatcggtcacgcccccacccgctccggccgacgggatggcgctcgatatcatcggagatagcgggagcccggtcaccagcaccttctttggatcggtggagatcgaggaacgcaatacctacaccgtgccgagcaacggcgacctctggccgggggcctggtcggacgacgactacctgtatacggccaacggcgacggccccggcttcggcagtgtcaacagcgatatcgcggtgggccgcctgaagggcacccccgccaccggcatcacccgccagggcctggcccatggcgacgcgatcgcccgggtctggtccggctcggaatacaaccgcaaacccaccggcatggtttcggtgggcggggtgctgtatatggcggtgcaggatttgcgccgcacgcaggacgggcttttcgacgacgccccggcagcgtcgatctacaagtccaccgataagggccgcacctggaccgggacgagcgagcccatgttcaaggattatgtattcaccaccatcatgttcctcgactacggcaaggacaacggcaacagcccggacggctatgtctacgcctatggcctcgattacaactggcgggattccttctccggcagagtgaccgatcccaccaacctctatcttgcgcgtgtgccggggaacagtgtgcaggaccgttccaaatgggaatttttctccgggacggcgggcagcccgtcctggagccgggatgtgggcgcccgcaagcccgttctttccgattcccgccgggtgtacgagtacgttaccgaagggatgagcggcgtgcgggacatgacggtcctctcccagggcagcatcgtgtataacaaggcactgaaccgctacatatacacctcttggaccgagtacacgtatgagttctatgagtcccccaccccttacgggccgttcaagctgtttgcgcagaaggatttcggctgctatccctggaccgacgcgaaatacggcggatacggctgcgtggtgccgtccaaattcatcagcgcggacggcctggagatgtacatcgtgtccaccacctttgtcagcacgacgaggcagtatcagtacaacatgcggaagatgacggtgtccctggcacccacggcccaggcgaacaacgggaaaagcgccaccaacctggcgcgggacgattccctgtcccccgtcgtcatcagcaaaagcaacggcaacggccggccccagcggctcaacgacggatcgaaggagtactttgagcagagctggacgggcgagtccaagaacatcgatttctggggttacagctttaacaagatctgccgtttcaacaccatcgagtacaccaccggcgaaatgaagaacaacggcggctggttcaataccctgggcgtccaggtgcgcaaagacggggtctggaccgatgtcagcaacgggcggatcagcccggattatgccaaaagcgtcaacaccggccagtataccacctataccatcacgttcgacgagtgtgccggggacgcgatccggatcatcggccggccgggaggggccaggcggtatactacggtggcggagctcgccgtgtattaccgctgacgccttttgacaaaaggagaaaggttggttagacttatgcgtagatggacggcggctgcggccctggcctgtgcggcggggctgctgcttaccggctgccatacctcaaaagacggggagacgagcatgatgaaaaaaccgctgccggaggtcgtgacgagcgacacgcggagcacctttttttccaccgcgcatattgaggacaagaacaccgtatccatccccttgagcgacggcgatctctggccctccgcctgggcggacgacgatttcctctatgtggccaacggcgacggcaaaggcctcaacacctcgatgccctggcaggacatcgtcacgggacgggtgcgcggaaccccgtgggacaacagcctgagcggcatcaatctcgcgtcgggcgacgacgtggcgaaggtgtggagcgatcccgaccgctacaaccgcaagcccactggcatggtctgcgtggacggcgtgctctatctcgcggtgcaggatctgtgcaaggccaagttcggtatcttcgacgaggcacccgcggcgtcgatctacaagtccaccgacaaggggcgcacctggaccgggacggacgagcccatgttcagcgactacgtttttaccaccgtgatgttcctcgattacggcaagaacagcgaaaactgcccggacgactatgtctatgcctacggtatggactacaactggcgggattctttcaccaaccaggtcatcgacccggtcgatctgtatctggcccgggtccataaggaccacgtgatggaccggacgaggtgggaattcttcaccggcaccggcacggacgggcagccgggctggagcggcgacatcacgcagcggcgggccgtgctccacgacgaccgcaaggtgtacaccaacatgagccccgcctacaccggagcgaacaacatgacggtgatttcccagggcagcatcgtctacaacaagccgctcgaccggtatatctacacctcctggaccgaatacacctttgagttctatgagtccccgaccccctacggtcccttcaagcttttcctctccaaggatttcggcggctatccgtggacgggcgacaagcacggcgggtacgcctgcaccatcccctccaaattcatcagcgaggacggccgggagatgtgggtgttctccgctaccttcaacggcggggcgcagcagtaccgcttcaccgggcgcaagctggtggtggacccgtatgaccccgagggggcctccaacgcgaaggcagaggacaacctagctgtaaaaaacgccactccttatactcgttgtaatcgatatggcaaggaagcggtcctctacgacggcgacaagacgacggcggaggacagctggaccggcgagatgaagaaggaggattactggggctatacctattccgattacctcaccttcaacgccgtggaatacaccaccggcaatgtcgacgacaagggcgggttcttcaccgacgtccgggtgcaggtgcggcgcgggctggaatgggtcgacgtggacggcctccatgtaccgccggaatatacctgcaatgccgaggtcaaaccctataccacctatacctttaccttcgatgagatcgacggggacggtatccgggtggtcggtacgcccggcggtaccatggcctataccggcatcgccgaattagcggtcttttaccgctgacccccgccgctggcagggccccggaaaatggccgggtcaggcggtttcatctcagaggaacctggatacgggacctcctctctatctcaatgccattgcgaaaggattggttatatgtccctttacgctcttggtgtggacttcggcaccctgtccggccggacggtgctggtggatctggccacgggggaagagcgcgcgagcgcggtatacgagtatccccacggggtcatggacacagcgctgcccgacggcacccctctcggggacgactgggcgctcgagcatccgcgcgattggattggtgtgctgcaggtaacgatcccggcggtgctggagcaggcaggggcacgtgcggacgaggtcgtggggatcggcaccgatttcacggcctgtaccctcctgccggtgaaagcggacggcacccccctctgtttcctgccggcatacatgaaccggcctcatgcctacccgaagctctggaaacatcacgccgcccaacgctatgccaatcgtctcaatgccgtcgccgaagagagaggcgagccctggctcgccaactacggcggaaaaatctcctcggagtgggccgtccccaagatgtggcaggtactggaggaagacgaggcggtttacaacgccgccgaccggttcatcgaggcggcggactggatcgtgtggcagctgtgcgggaaagagacccgcaacgcctgcacggcggggtataaggagatctggaacaagcggatgggctttccttccgacgactttttcgccgcgctcgacccgcgcctggctcatgtggtggatgagaagctctcccgggacatcctgcctttgggagccacggccggcgagctgacggcggaggccgcctccctgacggggctgcgccccggcatcccggtggcggtggggaacgtggacgcccacgtctgtatcccggccgtcggcatcgaccggccgggcgccatcctcgccatcatgggcacctcgacctgccatatttcggtgggggaaaccgaggtgcaggtgccgggaatcggtggcgtggtggaggacggcgtcctgcccggatttttcggctacgaggccgggcaggcctgcgtgggggaccatttcgcgtggtttatcgaccgctgcgtccccgcgtcgtataccgagcaggcccgggcggccggccggaacatacacgccttcctacgggaaaaggcccaggcgaagaagccgggggaaagcgggcttttggcgctcgactggtggaacgggaaccgttcggtgctggtagacgccgacctgtccgggatgctgctcggcatgaccctgcagacgaagcccgaggacatctaccgcgccctgatcgaggccacggcctacggcacccggatgatcgtggagaattaccgggaaaacggcgtgccggtggaggcgttctatgcctcgggcgggatcagccagaaggatccgatgaccatgcagatctacgccgacgtgctgaacatgccggtgaaaatcgcgggggcggaacatggccccgcctatggggcggcgctgttcggcgcggtggccggcggcgcgttcgccgacatttttgaggcagccaggcggcttggaaaggtcaaggataccgtatatatccccgatccggcggatgcggcggcctatgaccgcctgtttgccgaataccgcctcctgcacgactatttcgggcggggcggcaatgacgtcatgaaacggctgaaggccatgaaacagaataaggaggcggcagtatgaatcatgggtgcatccacccgaaaatcgggatccggccgatcatcgacggacggcggttcggggtgagagaagggctggaagagaagacccgcaagatggcggaggcggccgcggcgctgatcgcggagcgggtgcggtacgccgacggaagcccggtggaatgcgtgatcgcggacgagagcatcggcggctgcgcggaggcggcgagggccgcggagcagttcagccgggaaaacgtgatcgcgacgctgtcggtgacgccctgctggtgttacggcagtgagacgatggacatggatcccacgacgatcaaggcggtgtggggcttcaacgggaccgaacgccctggcgccgtgtatctggcggcggtgatggcggcccacgcgcagcggggcctgccggcgtattcgatctacgggcacgacgtgcaggacgttgaggacaacaccatcccggaggacgtggcggagaaaatcgtgcgtttcgcgaaatgcgcggcggcggtgggacagatgcggggcaaaagctacgtcaacgtcggcggcgtgtcgatggggatcatgggaagctactgcgacgccgactttttccagaaatatctggggatccgcgcggagtgggtggatatgacggaagtgctgcgccgcgtcgaggccggcatctatgaccatgaggaatatgaaaaggcgctggcgtgggtgaaagccggctggcaggaagggctggacaaaaaccccgccgagctgcagcatacggcggcgcagaaggccgcggaactggagttcgaggtgaagatgaccctcatcatccgggatatcctgctcggcaatcccaagctggcggagatggggtatatcgaggcgtcgaacgggcgcaacgcgatcgccggcgggttccagggccagcggatgtggtccgactggcagccgatcggagatttcaccgagacgatgctgaacaccacgttcgattggaatggcaggcgccagccgacggtctttgcgacggagaacgacaccttgaacgcggtgtcgatgctgttcggccatctgctgacgggcggcgcgagtgtgttcgcggacgtgcggacctactggagcccggaggcggtggagcgcgtgaccggctggaaaccggatggcctggcgaaggacggcttcatccacctgattaattcgggcgcggcggcgctggacggaaccggccgctcgcagaatgcggccggggaaggctgcatgaagccgtggtgggagatgaccggggccgacatggacgcctgcctgaaagagacgaaatggtgcgcggcggaccaaggctatttccgcggcggcgggttctcggtgcagtttgagacgagaagcgtgatgccggtgacgatggtacggctcaacttgatcgacgggcagggcccggtgctgcagttcgtggaagggtataccgttgtgctgcccgaggaggtggaccggatactgtacgagcggaccgacccgacatggccgtcgacgtggttcgtgccgcgtcccggagaaggggtatgccgcgatgtgtacagcgtcatggcgaactgggggtcgaaccacgcggcctattgctatgggcatgtggggcgcgacctgattacgcttgcgagtatgctgcgcatcccggtaggcctgcacaacctgggcgacggcgagctgttccgcccccactgctgggcggcgttcggcacccgcgatcccgaatccgccgattacagggcgtgcggagtctacggcccgctctataaataaggtataaaaatacaaaagacaccgccgcccctccggatacatcggaggggcggcggtgccggatcccgacacgtcaaggagcaaaacgccccgccggcaggcaccggcgggacgtgtcaggcgtcgatagggacaacccgggtttcatgtaagccggcggtttccggcatgtcctccacccggacgatcgagccggtacggaccgcctggtcggccgccagggcgacacggaacgcgctgtacgcctcttcgatcgtcggtgcgtcggtcggacggccctcgatgcggtcgatcagggagcagagctggccccacatatccttatagaccgccgggacattgatctgttcatatgtatcggacaccgcgtggtagacctcgatgagatcccccatctccacatgccggccgcgtcccgcctgcatggtcagggtgatgtgcccctggtccccgatgaactgtttgacgttgccggaggcaaaggtgcggccccagccggcttcgtaatacccgacggtcccgtcttccagccgcatggtcacgatcccgtagttataccggccgggctccaggtccgcgtccaccaccgcacccatccccatcacctcggtgatggcggagccggtaaaccattggagcacgtcgaaataatgcacgccgcagtccaggataggggaacaatcctccagcaggcggcggtaccgctcccaatcgagcgcgtggtgattctgcgtcatgcggacggttttgagccggccaatcgccccggatcggatcaagtcccggatttttatataggaggcgttgcggcgcaggatatgcgccaccagaacctgtgagcgcccgtttttggccaaacggtaaaactcctgcccatcccgcgcgttggcggcgatgggcttttcgcacagcacatgctttcccgcgacgacacagtcgcgcagaatggacaggtgagtgctgacgtaggtggcgatgatgacgatatccacatcgtcccgcgtgataaattcgtgataatcgatgccgtaccggtcggcgccgtatttcatggcgaaaagccgggccttctgctcgtccgcgtccacaaccgcgacgatgcggatgttgtcccgataatagatctgcgcgatatgttcttccccgatatggccgcagccaattaataccacaccatagattttgtccatccggtgtcccacctctcgtatggatcctctctatttaacattatacggaatatccgtccctttacaaggcccaatctctctggaaaatgtaccatttttcatttacgcagacgccgagggaaagattggagggaatgagagccctatgccgcgggcagggtataatgaaggccggatgtggcggacagggcaccgctgtcccggataaaaagcgcctcgatgccgggaagggactcgatcaggtccatggctttttcctcgcccaaaacgaaacaggcagtggacagcgcgtccccgtccaccgacagagaagagacgatcgtcacagaggcaaggccgttttgcaccggccatccggttttcggatccagcagatggtgatagcgcacgccgtcgaggacgaaaccgcgctcataggttcccgacgtgaccaccgaggcattccg

SEQ ID NO: 3987 - DNA, 16269 bp, Unknown
  16S sequences of unknown bacteria
cccttgttctttccactcttttactgtataatataagatattattttatgctgtgaaaagtgtggctgtgtttccccgcccctccgcttcgtagcccgggccggcggagcgatgccgctttggatcgaatgttgaaacgaaaggacggtcccctatgataaagatgcagtcggaaaagggcgagatcatcatcagcagcgcagtgttcaccaatatcaccggcgccgccgccacaaattgcttcggcgtcaaaggcatggcctaccgctccatgaccgatggcctggtgcaccttttgcgccatgaggccatgggaaaaggcgtgaaggtcacctacaacgacgacagcagcatctccatcgagcttcatatcatggtggagcacggtgtgaatgtcaccgccgtctgccgtgccatcatgaacgaggttcgttatgtggttcagcagaatacaggcgtgatcgtgcgctcggtggacgtctgcgtggattccatcactctgtgaggaacagcactgctttgaaaggaaggtctcatctgtgaaagataaagtagacggcgctctgctcaaggagatggtgctgttcggtgcagcctctatctctctggaaaagcagagtatcaacgatttgaacgtattccccgtgcccgacggcgacaccggcacgaatatgagcctcaccatcggcaacgccgccgccgagctgcgcaaaaaagcgcccgccacggtggaggaaacggccaaaattacggccagcgccctgctgcgcggcgcccggggcaattctggcgtgatcttatcccttttgttccgcggcatttcccgcagcctgaaagggcaggctgccatggacggtgtgtccctggccaacgcgctgcaggaaggtgtcgccgcggcttacagcgctgtaatgaagcccgccgaaggtacggtgctcaccgtttcccgcctggctgccaagcgcgccgtagaagccgccacggaacacaacagcgcagagtacgtgcttcaggccgccattgaggagggccagctggccttggctgacaccgtcaaccagaacccggtactcaaaaaagccggtgtggtggatgccggcggcaaaggcttcctcgtcattctcagcggcatgctttcatgcctgcgcggcgagccgatgcccgagggtgctgatgaagatcagccggcggccagcatccaggacaaagcggattttgaatccattgataccgaaagcatcacatttgcttttgacaccgtttatatcgtgcgcaaaaagagcgaaactgtggatctcgcccctctgcgcgcctatcttgacagcatcggtgacagcctggttatcggtgaagacgacgagtctttcaaagtgcatgtgcacaccaatatccccggcgaagcactcacggagtcccagaagtacggcacactggagctggcaaagatcgaaaacatgcgcacgcagcacgacgatctggccgccggccgccatgtgcagagtacggacgatctggatcagatcgaaaaagagctggaaggcaatggtaccgtcgaagacagccagcggcacgtcgccgcgccggaaaagaaatatggtttcatctctgtctgtgccggcgacggaatcgccagtgtgttccgggatttgggctgcgacggcatcatcagcggcggccagacgatgaacccttccaccgaaagcattctcgacgccatcgaccggaccccggccgaagtggtctttgtgctgcccaataacaaaaacattatcatggctgctcagcagtgccagcacctgtccgacaagcagatcgtcgtgatcccgtcggccagcgtgcctcagggtatggccgccatgctggccgtggacaccgaaagcggcaccgaagccattgaaacagcaatgaacgaagccattgcccgcgtcatcacagcccagatcacatacgccgcccgcgactcagatatcgacggttttgccatcaaagccggcgaatatctggcattaaaggaaaacaacctctttggcagcgataccgacattgccgtcctgctggaaaaactggccgacaccgccaaagagcaggatgccgaatttatcactatgttctacggcagcgacgttagtgaagaagatgcgcaaaaagctgaagcaatctttgccgcagcctgtccggatgcagaagtttccctgctgcccggcggccagcctgtatattattatatcatttccattgaataagaaacgaggggctttcgcccctcgtttccggcctcgccctaaaaaaagaaaaacggaggtaatttttatgaatccgcgcattatgatcctgatttccgtcatcgcactgctgtgcatgttcttcttcggcgtgaaccttttcctgcagggaaaaggcatcatgttcctgctgatccccatcgccatggccattttcattttttatggctatttcaacagtacccggaaatgatgaaccgcagatttttcgctctgagcctgtgtgcctgcctgctgctggcaggctgcggcgcaccgggcgctgcagccggttccgcaccggagtctgcccctccccagcaggaagaaacgctttcaacgccttacgcggtggacttccgtctgaccagcggccatcacacagccggtatcgactttcccgccggcgtgtatgatctggaagcaattcagtggtgtggtacagtgaccagcagcaacgacgccatttccctggatatgggtaccccggaatacaacaccgacggccagagccattatgagcaagcagctgaaggcgtcgatctgcctgccggtaccgtactgtcactgtctgggggcgtgacattgcgtttaacctgccccgacgccgacccggcccccctgatgcccagagaacaggatatcacagaggatgtaaagcttacgcccggaaaatataccgccggcgccgatttccccgcaggcgtatatgattttaccgcgctcaacggcgtgggcaatgtggaaagcagcaatatgcacgacggtggtatctgtgacgtcatgggtaccacatggcgtattgccgagggcttcggattctgtaaccagaaatacgaaaatatatctttgccggaaggcaccgcgcttaatatctccggcgttgacctgctgctgacccccagcgaataaaaaagcggacggcctgtgcaaatgcacaggccgtccgtttttcttcataattactctaccacatggatccagcccttgggcgcttcgatgcgacccatctgaatccccgtcagcgtatcatacagcttctgtgtaacaggccccattgtttccatacccgcagggaaacagatctcctggccgtgatccacaatcctgcccacaggcgaaatcacagcggcggtgccgcacaggccgcactcggcaaaatccttcacctcgtcaaaagcaatctcccgctcttccgcttccaagcccagatactccttggccacatacatcaagctgcggcgggtgatggagggcaggatactgtcagacttgggcgtgaccaccttgccatccttcgtcacaaaaaggaaattcgcgccgccggtctcctccaccttggtatgggtggctgcgtccagatacatgttttcatcgtacccttcagcgtgggccgttacgatagcatgcaaactcatggcatagttcaggccggccttgatatggccggtgccatggggcgcagcacggtcaaaatcagacacgcggatggtcagaggcttgacgccgcccttaaagtaaggccccacgggcgtggcaaacacacggaactgatattcatcggcaggttttaccccgataacagcattggtgccgaacatataggggcgcagatacagcgtggcgccggagccgtaaggcggcacccaggcggcattggcacgcaccacctgctccaccgcctccacaaacttttcttcgggatacacaggcatttccaggcggcgggcagaatccgccatgcgggatgcattcagatccgggcggaaaataacgatgcggccgtcttccgttgtataggctttcatgccctcgaacaccgtttgggcatactggagcacgccagcacattcattgatggtaacctgatcgtctccggtcagcgcgcctttatcccaagcgccgtctttatagttggaaacaaagcgcttgtctgttttcaaatagctaaagcccaaattgctccaatcgatgtttttcttttccatggtgttttcctctcctgtcctcgtagggaaaggcggcaaggcggcgcaaagctgcagcccactgcgatttcctgccgaaattgattatggttattgtaacaccaccaacgaaaaagtcaaggaaagatagaagaatcagcagattggataaggatattcccgctctatttttcctttttgcgcacttttctggagtacagcgctgcataccggcaaaagcgcgccagtgcacatggttgtgcactggcgcgctcatcacacagaaaaagtcaaatgcggtgcttttgcttcagatcgctttcctgtaagagatgtctctctgttttctcagccttccggcagagcattataattggaagcttcgtccagaacgtctacaatatccacgatttgagcgccggcaggcggttccactgcgggctgcgcattggcctgcaccgttttggcggacagatcaaagctcaatttgagatcaccgtccaaatccatgtccatattcatggtagtgttcgtaccgtcctcacgtacgttcatctgcagcgtcatcccgtccataccgtcgtcaatcatcatttccatcttcacacccacaagacgatccccgctggtctgatacgtcattttgatttggccgagaacgctggaattgtcccccagcgtccaattcacagtgtagttactgccgcttttggccatagcctggtcggacagcaacgcgcaaagcgcttccgctgaggtctgcagcatctcgtaatcataggcggcgctggtcaactccagacccgagagcatcgacaccatcagttccctgaaaccggcgtattcacccagcatttcttccataccctgcagataggcctggtaatcgaaaccgccggcctcgctcagtttggccagatccataaggtaccaaacatttccatcgcccaagccttcgccgatcatagccagcaacagagggcagtcaatggtgaaataaatcttcccggattccagatccatacgtgtttccactgcagcctggctcagttttttcagttcggctttgtccgcggcgctcagctcagatccctccgcaaacagggcaaacagttctgcaaaatccatttccatctgcagctctgccttggtatctgtggaaataccgctgaacgtggcggagagcggatatgtctgcgtcttcccctgcccatcgggcagcgtcatttccagagccatctgcccggtagtctttgcagggttgggtacttctctttccagatctgcccgaacccaaccgtccagattgtcaaacgtagcgtcgcccagcagggtttccacatccacaatcatcaccgtatgttcatcgccgtcccagcccacagcgcaggaaaacgcttctgccgcaaaacgcactggcacataggtacggccgcctttgctgtaaggcgccacatccatcgtaagctcttgttcctggccgtctttggttacctcggccttggtgctgtccagcgtcatgaccacagtggtatcgcctttgaccgcggtaacacttttgtccgcctgatcccaggtcaccacagcacccaacgcttcaaaagcagcacgcacaggaataaaggtgcgcccgtttttcgattccggctcagcatcggggaacgtcacttcctggccgttcacctgcaccgtaataccggaaggcacagcccatgcgctgaccgaaagaacactgaccatcatcgccgcagtacacagcgcagcaacaatttttttgtatgctttcattgggattgctcctttccatttcttctatttacagtgtaaggggcttaagctttttggtcaatttggaaaattgaccaaaaaacaggactgttttttgccccgccataatgcggcaaaaccgcggaggcttgctcaacctcctgcggttttttaaagattcgaccaatcgatcacatgcttgtttttggtaaaatattccacaccagaatacaccgtcgtgaccaaaataatcccccagcacaccgtattcagtaccggcgggatcggcagcagcatcaggataatacataccatggtggaggcagtctttaccttgcccgaccaagccgccgcaatgacctttccctctgtagctgcaatcatgcgcagcccgctgaccgccagctcccgcgccagcaccaccgccagtacccaagccggcatctggccccaggatacaaacataagcatagccgtcatcaccaggaccttatctgccagaggatccataaattttccgaaatccgtcaccagattccggctgcgggcaatgtacccgtccaggaagtccgtaaagctggctatggcaaacagggccagcgcaacataccggcatccttcaaaatccgcatacaaaacaatcacaaaagccgggatcatcaccacccggagcatggtcagtttattggcaagattcatgttacttgtctccttttgcgcaatagggcacctctttccagtaccaccacttcaatttttccggatccggcaccggatgctcagcataatagacggcaagacggtagacatacagggcgcagcggtcctcctggaatcccttctgccggcagtccaggcagtacagctcctccggatcacggcccacaagatccgcaatgcagcggataccaattgcctgcatggcctgctcaatgcgcgctcccacaccgggaatcttccgcagatcgctcatgcttcagatttgtacggcctcgccggtcatgtcaccatccatactgccggtaatgcgcaccggaacaaaggccccagggacaagatcctcttcggcagtaaaatacacatggccgtccacatcgggagaatcggcatagctacggcccacatacatctgagcctgtccgtcgaagccctcgcaaaggatctccaccgtgtcgcccagccagctttcattgaactcatccatcacgcgggattgcaggtctaccagcagttccacacgacggttggcctcctcttcatcgacccggttttccatggcggcagcaggcgttccctcctctggagaataggggaatacccccgcccgttcaaacttctgctcccgcagaaaatcgcaaagctcttcaaaagctgcttcatcttcataaggcaggccggcaatgatgctggtgcgcagcaccagtcccggaatgcgcgcgcgcagccgtgcaaacagctcggcaagatacgctttgtcccctcggcggttcatggctttgagcacagcatcgctgcagtgctgaatgggaatgtccagatagggcagaattttcttttccgctgccaccacatcgatcagttctgcagtaatttcgtcgggatagaggtaatgcagccggatccagtggataccactgatgccgcacagtttgcgcagcaattccggcagtttgtgcgcgccgtagcaatccagaccgtagcgggtaatatcctgcgcaatgacaatcagttctttcacaccgctgcgggcaagttcctccgcctccgccacgatattctccatcgggcggctgcggtattttccgcgcagagagggaatcacacaataggaacagtggttgtcgcacccttccgcaatgcgcagataagcgctgtattccggcgtggccaggatacggtcgccctcatccaccggcgcatcaatgctgccaaaatactttggtgtgccgccagccatcacttcttccagcgcatccacaatatccacataactgccgcagcctaaaacgccgtccacctcaggcaattcttccagaatctgctcaccgtaacgctgggacagacatcccgttaccagaatcttactgatttgcccttctgctttcagcgcagccatctgcagaatgttatcaattgcttcagacttggcactgtcaataaaaccgcaggtattgatcaccacaacgtcggctccctccggcgttttcagcagggtatggccgctgtcacgcaccagggccatcatctgttcacaattgaccagatttttcgcacaccccaaggatataaacaatactttcaaacctatgtctctccttcaatcggcaggcgcggagcgctcaaaccatggtatagcggccacctttgcgcttgtggggctttggatcctccgccggatagcccagcgtcagggccgcaacaaattcaccgcggccggcggcaaaacccgcctcaaaaagtccggcgcagtccacatggttgggcgcgccgatccagcaggagccaacgcctcggttccacgccgccaactgcatattctcaatggcggcggaaatgctttcgataacattatcccggccctccgcgccgtagggcttatcggcatacaccagcacgcaggccggcgcgccgcccagcgttaccagaaaattgttcgtctctgtgataacttccgggtgatcatggaactgcttttgcaggattgggttaaaccgcagtgccacgaccgacatgacagcccgcacctgagtcattttctccggcgtgcgcaccaccacaaaataccagggctgcaaattcagccccgaaggagcgtacagtccggcctccacgatctcttggagcacctcatcggacacattcaccgcccggtatttgcggatactgcgccgctccaacagcactttcaacgcatccatactttttattcctcctcccaatcctctgcgtccagacggcgcagggcacttttgatatcttcccactgaaatccccggcggcgcagcgcgtcgcacagacgtctgcgcattttatcatccagcggcgcagcacgcagcctggaacgtatgtacgcgtcgatcgcctcggtgctctcactgcattccgacgcgatcgcctcatcccacagctcccgcggcacaccccgccgatacaactcgtcgcgcattttggccgggccatagcgcagccccgcataatgccgcactacgcttttggcataacgcaaatcatccagagcaccgatctcctccagccagtccgccgccgcgcaagcatcctcctcgttttcgcccttttgtatcaggcgtctgcacagttcctttttggacagcgcacgcacaccgatcatctctgctgcccggttccgggcaccggaacgcccggcggccgcacgcagagcgcgcagctcctccgccgaaagcacccgccccggatacaaagaaaaggtcaacgcctcctgctcagtggctttcagcatatccccactgtccagatacaccagaatgcggccctttacatggcgggacggctcgattttactgaccgtcatcctcatcgtcaaaatcgtcggcagatacgttcaccgggcggcctgcggcccgggccgctgccttggactggttgctcatcagtttgtaaaaatcccgtcggatatccgcgtccagcttttcggccacctcgggattatcccgcagatactgcttggctgcatcacggccctggccaatgcgcacttcgcccatagagaaccaggagccggacttctgcaccagatcgagcttgacgcctaaatccaccatttctccccaacgggaaatgccctcgccgtacataatgtcaaattccgcttcgcggaacggcggagccaccttgtttttgaccaccttggcccgggtgcggttgccgatgatctcgctgccggacttgagagcctcgatccggcgcacctcgatacgcacggaggaatagaatttcagcgcacggccaccggtggtgacctcagggtttccgtacatcacgcccactttctcgcgcagctgattaatgaaaatcacaatacaattggtcttattgatcgcgccggtcagcttacgcagagcctggctcatcagccgggcctggagccccacataactgtcccccatttctccttcaatctccgcgcggggcaccaaagccgccacggagtccaccaccacaacgtcgatggcgccagagcgcaccagtgcttccgtgatctccagcgcctgctcgccggtatccggctgagaaatcagcatatcgtcgatgttcacgcccaaagcacgggcataagtgggatccagcgcgtgttcagcgtccacaaaggccgcttcgccgccttttttctgggtctctgctacaatgtgcagtgccagcgtggttttgcccgaggattccggaccgtaaatctcaataatacggcccttgggcacgccgccgatccccagcgccaaatccagcgccagagagccggtgggaaccgcttccacattggcgtgcaggttttcgcccagccgcatgatggagccttttccgtacattttttcaatttgctgcatcgccgtttcaatggcgcgctttttatccgatgcgggcgccgcctgctccaccggcgctgatgcctttgcctttcctgccatttgtgtcatcctttctgttttcgattgccgcagcgcgccctcagatttccgtgcagcgcgttcccgcaattacccgggaaatcccctgcgtatcttcataaaattccaaatcgccgaacccctccgaccgcagcagccgcatcacagcgtccgcttcgccgatgcccagttcaaacagcaaccgcccgccgggcagcagcgcctctttccaccgggccgcaatggcgcggtaaaacttcagcccatcggctccgccgtccagcgccagatgcggctcatactcccgcacggaaggatccagtcccgccaaatctcccgtgggaatatagggcggattggatacaatgcattgaaatgcatcaaacttcgcgccggggggggccagagcgtccgcctgcagcactgcgatgcggctctgcaaatggttgagccttgcattggtgcgcgcaacgcgcagcgcttcttccgagcagtccgccagcaccacgcggcagtccgtccgctgcgaagcaatcgccagccctacgcagccgctgccggtacacaaatccagcacccgggcgctgggataatccttcagatagtcgatcgcctgctgggccagcacctcggtgtcactgcggggaatcagcacatgctcgttaacaatcagcggcaggccgaaaaactcccattcgcccacaagataggccaccggttcgccctgcagcctgcgctgcaacagcgcgctcacacgcgcttcaatctccggggtagcgtacagccggttgtcccggtaaaattcctctttatttttgtccgcagcgcagcagacaatttcccgcgcttccagcgcggcgctgtccactccgtttcgtttcagcgcgcggcgcgtatccaaatataaatcgttataagtagacggcatattcccgcctgctcctttccggcagccaacgccgcctgatggttccgtcaaagcacgccggtacgcggcacgccttttcaccagcggtcgctgccatgttcttccggcagcactgcctttaatgcttcgataccaacttcgatcatgctgtcgtccggctcaaaggtggtaaaattctgcatccaaagtcccggcgcccggaggatccggcagaacacattctcatgggcacccacatagcggttgaattcataagtcacgcccatcaccaccggcagcagcagcaaatgcagcgccatacgcagccatacattgctgatttccagcggcgtgaacagcgccacagaaagaatgatggaaataataatgaccacaaacaggaaactcgtgccgcagcgcggatgatgccgcggctgcctgcgcacattttccaccgtcagctccaagccgttttcgtagcagaaaatcgtcttgtgttcggctccatggtagcagaacacccgctgaatatccttcatgcgggaacacaaaaacagatataatacaaaaattgccgctttcagaacaccctcaaggattcccatggtccacaggccgatgccgccgggcaccaaccggtttacaatgcccaccaggaaactcggcaaaaagatgaacagcagcagcgacagccccacgcccaaaaggacggacacagtgagcataatattcatcagcttctcatccgatacatggctgctcagccattgttccaattttccgggcggttcgctttcttcttcctccattccggagacttccgccgaatacatcagcgcttttacaccgttgtacatcgacatgacaaaggtgtaaatcccccggaaaaacggtattttccaaaaggccggccggcctgcattttcctcaattttacgatccagcgtcccatcgggctttcgtaccacaatggcccgcttctccggcccctgcatcaggataccctcgatcagtgcctgaccaccgcaagtggttttatagggcgtatcgcagcatccccattttttctgttcttctgccatggcataactcctttgcgctctgctgttcagtatactatgcacttcgtctgtttgcaagagaatcgcaaacttttgttctatttttatgaattagactgtttaagcggcaaataaatctgcacaatgcagccgccgccttcggcgttgccgatctcaaaacgtccgccgtgacgggtaacaatctcttccaccaccgccaaaccgatgccgctgccccgggccttggagcttcctttgtaaaatttctgcttgatgtagggaagttccgcatctggaatgccagggccgtaatcccgaatcgtcaaaacgactgtttccggcccaaccccaatggctgtatcaatctgtccgccactgccgccgtgcttggccgcattgtccagcagattgcagaatacctgcttcaaccgctccggatcgccctcgatgatgggaaactcctccaggccaccgtcgtcgtaacgcacttcaatgccgtcctgagcaaacagctccttgtaagtaaataccgcatcctcaaattccgcttggatatccaccggttccacttccaaggtgaagcggccgtcctgcatacgggaaaactgcagcaactcctccaccatattcgtcaggcggcgggattctttcagaataatgcccacgccccggcgcagctgaacgggatcgttgctggtatcgcccaacagcgtttcaccccagccgttgatcgccgtcagcggcgtgcgcagttcatgggataccgaggaaatgaattcccgctgcattttctcattctgactaatcttggaggacatctcattgatgctgtccaccagcgcaccgatttcctcgtgataggtattctcgatctgcagcccgtaactgccggaggaaatgtgctgcaccgcctccgtcacttccgccacaggctccacaattttacggataaacaccatattgatgcagtaaaccatcaccaacagcgccatgcccacgccgaaaattacagcacagttgaccagaatctgctgatcgaccaatcgcgcggaggtcacatagcgcatagcgccaatcgatacaccatcataagtcagcggacaggaaacggcaataattttctcattggtatgcccgtcgctgcccacatacattccaagatttccggccagagccgccgtaatgtccgatgtccccggagaaatgcccgccgtaaaattataggacgacacctcaattttaccgttggcgtcgatgaactgcagctcgatcttatctttgtccgaaaaattctgcgtatagctgtacgccagggcgtaatactcatcgtaccccgacaggggcgagcggttcataaaactgaccgccgctgtggcctgcgctgtcagcgcattctgcaccgtattgtaataatatgtgacgatactggccgaaaacaggccgcagaccatcagcatgatcgccgccacaacactcatgctgttcgccatccagcgctggcgcaggccgtgtacttttctcttaacatggattttcatgctcctgcgcctcttttcctgttctcccggcccgcatcagtacttcgcgccgcgtttcggtgttctgcgcttaaaagccccacttatagccatacccccacacagtagtgatataggtgggattctgcgggttatcttcaatcttcagccgcagccgccggatgttcacatccacgattttgacttcgccgaaatagtcgtgtccccagaccatatccagaatctcttcccgggacagggcctttcccggattttccataaacattttcataatggtgtattccacctgcgtcagcttgatgcgctgaccgtttttctccaatgtgcggttgcgggtgttcagcaggaatggatccttgcggatttccccctccggcacctcctccacatcgccgccggcccggcggaacagcgcatctacccgggcagtcagctccgcaggggaaaatggcttggtcacatagtcgtctgcgccggtcatcaggccggtcactttgtccatttcctgcgcgcgggcggtcagcatgataattccaattttggtattggtggcccggattcggcggcaaacctcaaacccgtcaatgcccggaagcatcacatccagcaacgccaccttcacatccgggttgtcattgagccgttccagcgcttcttcgccggattcggcctccaccacatcataaccggcgcgcttgaggttaatcaccacaaagctgcggatactggattcatcttccaagaccaatacttttttcatattgtgtacacaccctttccgcgctgtcttctacttgagaatcaccttaagtcaaataccattcgtcccggatcatacggaacccgtctttcaaagcgtcggcgctcatagcgccgctccacgtgctgtagtccggcaggaactccgccgcataaatcgtagttgcctggcgcatcaggataaaccgatcccctttcgtcgctttatactcccggctctcaccgctttccgtataaatggcaatcacctcgagcggatcagtatcctcaccctgatacacaccgaacgtaacaatacgttcaccggcagcgctggtcacagaagtaaccatcaacacatctttccaactttcgggcagcacaagataccagccgtccgtcggattatgataggtcgtctcctttaccgtctgtctgccatccacagcaaacgccgtccagcgaattccccaataagtcggtgcaattgagctggttttgtgcagcgcataagggatcggcagttccaacacgccatcctggtcaatatcctgtgcctctacgcctgcagcatggtacaccaggccgctgattccactctgttcatccatagtacggttgaccagcacaccgttttccatcaccaaaagatccgtgatccggttctccgcatcgacgactcccgtgacaaacaacgcctgggcaccgtccgtcaggccgcccacacgtacgctctccagcatcgccggcggcacggacagcggtaccgacgctatttgctccagcgcccccaatctccaactatatgcactggcagtacagtttccggaagttccgccggcaatgacaatcatttccggcgtcccgtcgcagtccaaatcggtgataagacaccggttataatttacttccaatattttctgcgtattgtaacgttccaaattgtaaaccgaaaccacacggatcagagcgcgttcattcaaaatttcctctgtttggcctatgccgctgtctccagtcataatgcggcaccccacgatcagttccaggacaccatcgccattcatatcttgataatcaacacgctcgatcgatgcgccgctttcctccaatacagctgccgtctgatacccttcgctgctctgcttgaagatataaattttcagcggcttgctttctccgcttttacgaaggaacaaaagcgcttcgtcttctccgtcgccgtcgatgtccaccatttgcacgggctgcacgttctcgccccccgtgggtgcagcatattcataaccgctgtccaccagcgcagcaatctcctgctccaaatccacatattcttccggtagtttcggcaagctgtacaaatcatctggcgaaagagcaaacatacagc

SEQ ID NO: 3988 - DNA, 32759 bp, Unknown
  16S sequences of unknown bacteria
cctgtaaagttagaccaccactaacgtccaaccactaaaagcgttatagcgccaatttttattgcttaatctttatttgttttctttgaagtattcgtctatgctttctgccgctgttttgcctgctcccattgcaagaattacagttgcagcccctgttacggcatctccgcctgcaaataccgccttatggcttgttgcagccttttcgtctgtgcctatgccgcctctttcgttcggctcaaggttttctgtagtgttaagaataagcttgtttaatcttgttcctatcgacatgataacctcttcaacatctagcacgaaatttgacccctctatttcaacaggtcttcttctgcccgacgcatcaggctcgcccagcttcatttccacacattcaatgccgcagactctgttatcctcatctcctatgattttaacaggattgttgagaagcttaaactcaatgccctcttcaatggcatgctctatttcttcccgtctggcaggaatttcatccattgaacggcggtatatgatatatacgtggtctgctcccattctcttggcgcatcttgcagcatccatggcaacgttgccgccgcctactacagccacatttcttgctttctgaataggtgtatcataatcaggaagataagccttcatcaggtttattcttgtaaggtactcattggcagaacatacgccaagcaggttttctcccggaatattcataaatgacggaagtcccgcgcctgtgcctataaataccgcttcataaccgtcggcaaacagctcgtcaacgttcatcgactgccctataactgcgttctttactacctttacgcccttttcctcaagctttgaaacctctttggcaactattgccttcggaagtctgaactcaggaattccgtaggctaaaactccgcctgccttgtgcagactctcaaatacagtcacatcatagcccatacctataaggtcgcctgcgcaggcaagacctgcgggacctgagcctaccactgcaaccttatgtccgttaggctcaggcgctttgaaattatcggtgccgtttgcatcgtgccagtcggcaacaaatctttcaagtctgcctattgccacaggctcgccgaatgcgccctgaacgcatcttccctcgcactgattttcctgcgggcatactctgccgcatattgcaggaagcgagcttgtctgtgatattatattatatgcttcttcaaattccccttttgataccgcatctataaattcaggtatgtgaatttttacagggcagcctttagtgcatggcttcttgcggcatttgaggcatctcattgcctcattaactgccatttcctctgtatatcccgttgcaacctcttcaaaattcctgtttcttaccatagggtcctgctgaggcatcggattttttgttttttctaaattaatcattgtaacgaacacctcctgtcagacggcagatatgacttctttcctctgcttcttcttctctgtaaaaaccgtttctcataataaggtcgtcccagtccacctggcttccgtcaaattccggaccgtcaacgcatacaaatctgctttcgcctccgattataacgcggcagcctccgcacattccggtaccgtctatcatatatgccgtaagtgaagctaccgatctgatacctgcctcctgtgcaatgccgcataccagcttcatcattacaggtggtcccactgctatgatttcatcgtaattattaccgtcagcaagaagctgcttcagcttgtctgtagtaaaggccttttccttgtatgagccgtcatctgtaactatgtaaaggttttccgatatttcattaaattccttttcgagaataacaaagtccctgctcttaaagcctgctatggtatcaaccttaatgccctctgtgtgaagtccctttacaagtccgaaagcaagagcattgcctgtacctccgcctacaacgcagactcttttgagtccctccatttctgtaggtctgcccagtggacctgccacatcgcagaggaaatcaccctcgttaagctggtctaaaagcattgtagttcttcctactgcggcatatataatttcaactgtgcccttgtccctgctgtagcctgccattgtaagaggtattctttcgcctttttcatctgttctgagtattataaactgacccggcaaagctttccttgcaaccagaggcgcctctatctccagccatgtcatattatcgtttaatcttctttttcctgttatcttatacatcactatacttcctcctccggatcaaaactgcgtttctggttaaccagatcatcatacttctgagatgctattttttctgctcttgtgaacagcttttctgctctcttcggatctctaagcataagtgaattgtatcttacctcgcccataatgaaatctctgtatttttcagtaggcttagggttgtctattgaaagcggatttacgccggcctcacgttttccagggtcatatctgagcaggttccagtagcctgatcttaccgcattcttcatttcaagcatagccttgtccatacctgccttaagtccgtggttgatgcaaggagcatatgctatgataagtgacggtccgtcgtagctttcggcctctttgatggctgtaagcgcctgagccggatttgctcccatggcaatctgcgcaacatatacatatccgtaggacattgcttcctgcgcaaggtcttttttcttgacactcttaccatttgatgcgaactgtgcaacagctcctataggagttgattttgatgcctgtccgcctgtatttgagtaaatagtatcacggggaatgcggccgagcctgtatttgagtaaacctctgtatcaaatacaagaatgtttacgttttcgcctgttgcaagcacgtggtcaagtccgccgtaacctatatcgtaagcccagccgtcaccgcctaatatccacattgacggtttaatcagcatatcctggttttccactacgtatatagctgacttattactgctctgctcacagagcttaacaagcttctgtccgtattcctctgcctttgcggcattgttcatattgtcaagccagttgtttgcagcttcttcaaatacagggttttcagccagctgctcaacctcggctttaagctcgtttcttcttacctttacggaaatagccataccgaagccaaactctgcgttatcttcaaacagtgagtttgcccatgctggtcctctgccctgtgcgtttacggtatatggtgtgcttggcgcagagcatccccatattgatgagcagcctgttgcgtttgcaatatacattctgtcaccaaaaagctgtgtaaccagcttggcatacggtgtttctccgcatcccggacatgctcccgagaactcaagcagcggctgtctgaactgtgaacctcttacactgctgtcatcataaggcgcgctgtcatagtctgcatgttcaaatacataatcaaacagtttctgttctttttcggcgatttcctctgcaggaaccatttcaagagccttgtgtcttgacgggcatacgtttgcacatgagccgcagcctgtgcagtccatagctgataccgcaacgataaatttaaggttgctgtcgcctctcattttaaccgcctcgtcacattcgcattcaggctttaatacaaacggtcttattgctgcgtgagggcatacatatgaacaccagttgcactgcatacatttggtgctgtcccacttaggaactgcatatgcaattcctcttttttcgtatgctgcagttcccgacggaacagagccgtctgctgtcgatacgaattttgatacaggaatgctgtcaccgtccattgcatttgtaggcatgagtatgttttcaacatagtctgtaagagctttgtctctgccctttattctctgttttctgctgctgtcggaagcgtttttccatgattccggaacctctaccttaacaacattggcaatacctgcatcaactgcggcgcagttcatatttacaaccttttcgcccttgttgccgtaggttttcttaattgcttccttcatatatactgcggctttatcaataggaattatatccgccagcttgaagaatgccgcctgtaaaactgtattggttcttccgcccagacccagctctcttgctattgtaacagcatcgcaggtatagaactgtatatcgttagatgctatgtattttttaacgtgcgcaggcagatgcttttcgagttcctcatcgctccagctgcagttaagcaggaatatgccgccctttttaacatcctcaaccatattgtatttgttaagatatgaagggttgtggcacgctacaaaatcggcctgctttacgtagtatgtggatttgataggcttgtctccgaatctcaggtgggaaatagtgataccgcctgattttttggagtcatactggaagtatgcctgtacttttttatctgtgttatcgcctatgattttaacgctgtttttgttggcgcctaccgtaccgtctgcgccaaggccccagaatttgcatgataccgtaccttctgcagctgtatcagggtttgataaagctttgattgaaaggtttgtcacgtcatcgtctattgaaaccgtaaatctctgcttaggttcctttgaagccagattgtcaaatacagcaactatatctcccggctgtgtatcctttgagcccagtccgtatcttcccccgataatcttaatatccatatctgcaagggcaagcgcaatatcaagatacagaggctctcctattgagccgggctctttgcatctgtcaagaaccgcaattctcttaacggactgaggaagagcttttttgagatattctgtgctgaaaggtctgtaaagtctgactttgataatacctgtttttctgccggaggcattgaggtagtcgattacctcctcgattgtatcgcacactgatcccatggcaaccacaacatctgtggcatcaggggctccgtagtagttaaacggcgcatagtctgtgcctgttcttctgtttacctcgtccatatatcctgcaacaatttcaactgtttcgtcataaaatctgttgcagctttctctgtgctggaaaaacacctcaggtgactcagatgaacccatattgtacggatgcatagggtggcttacgcgttttctgaaatccctgatagcatcccagtctgccatttcttttagttcctcatagtcccacgcttctatcttctggtattcgtggcttgttctgaaaccgtcgaagaagtgcatcataggcaccttgcctgatatcgctgaaaggtgcgcaactgctgcaaggtccatacattcctgcacgctgtttgagcaaagcattgcaaagcctgtctgtctgcagctcattacgtccgaatgatctccaaagatagacagtgcgtgtgttgtcagcgcccttgccgcaacgtgaagcactgcgggagtctgttcgcctgccagcttgtacatattcggaatcataagcagaagtccctgagaagccgtaaatgtgcttgtcagcgcgcctgccgcaacagaaccgtgtacagcgcctgccgcgccgccctcggactgcatttcaactacatgaacctcctgtccgaatatgttttttctgttttcggttgcccactggtcgatgttttcggccattgttgacgagggtgtaatcgggtatatcgctgcaacttctgaaaaggcgtaagccacgtgggcggttgcagtgtttccgtccattgttttaagatttctcatattacctgtcctccttcattttgagcgcttttttctgcagatagttatattcgggaacgtccatacgcttgattacgtttcgcgagcacatatatgtgcagacgtcgcagttctcgcatatgttaccgtttactatggcgtgggaatccactatttctatcgcccggttaggacagttgtgcacacagtcggtacagtcgatgcagccgctgtagcacagatcatatctatcgtctataggtgcctttgaggaacatgcaacaagcttgcttcccacataaggaacctctactatcaggtttttaggacatgcgtgaacgcagtcaaggcagccaacgcatttttcaaaatcaactgcagcagtaccgtttactatatgtattgcatcgtatctgcatactttggtgcagttgccaaggcctgtgcagccctcattgcatatattcataaggcctgcgtcaagctttgcggcgtgagcgcagtcctcaagacccagagccttgaatttgtcgttggcttttttgccgccgttgcattttacaaaggctacggtttccttgagctttgtaaggtcgtgagcctcgtcctttattatcttcttcctgcatttaactgagcatacaatgcagccaacacatttgtcatagtctataacagcgcagttgttcaccattgtgattgctttttcagggcatgtatcagcgcattcaccgcaaccgatacagccgtagccgcatattttccttgtgttcacctcacccagctgtgatgcgcaaggaataaatgtacttgcatcaggcggcaccatctgtaccagattctgaggacatacgttctgacaggctttgcagccgttgcactttgctctgtctacaactacacgtccgtcaacgatactgattgcgcctgcatcgcacaccctggcgcaggagcccagtcccacacagccgaatttacattcgttctcattaaatccaagcttcacaaactcagcacaactgtctgcacctgcattgcggctctgtcctgcagaagttccgctgcagcgtacaaacgccacttcgtcgatgacctgctctgtttctctgcctaaggcctctgctatcttgtctgcatcatcctgtgaacaggcagagcataaatttaccgctcccccggaagctatagcctcggcgcaggcttcacaggtttcaaatccgcatccgccgtagccgccgcagtctccaccgggcagtacctttagaatttcttttatcatcgctacctccagtatttatgtattgcatagtttgtgtgtatgtgttttgtgttctgtatacagtgtattgtactactttttttgaaataatcaacactttttgataatgttttaacaaaaaacaaaacgcccaaaatcattaaaatttcaagcgttttctgtctattctgattatgaatttaaagtataaattaatttttgtactggttttaatacaatattatgtctttttttaacaaattatgtttttttgtttacctgctgcacaaatcaataaatgcctccttgaccggcgacatccatttgcgcctgtcatatatgacctgcaggtaaagctccgcttcaaagtcgtctacatatatctcgctgatactgccctgcttcagatactctgaaatgcagtattccggcaggagtgatataccaatatccttgctaacaaaatcaattatcgccatagtatcccctatgtcaaggttccagttaagctcaatatctctggcctctatgtagtcgtctatgacctttctgtaggtgcagcccttctctgtcaggataaaattctctctgccaagttctgcaagctctacatgttttcccgaaaagccgttgctgtttcccgcaaaaaacagcaacggctcttttatctttacgggacattcccagttgtcactctgaacttgcctgtcatatatgactattacatccagcatgccttttttgagcatatccataagctccactgttgtggctatttttacaataagttttgcctccggatatttccttacaaactgttctataatctctttgtagtaaaaggaagccacagactcaatcattcccactgtaagcataccctttatttctgatttttcctccattgcagagcgagcctccgcttctgtcttgacaatactgtaggcataattcataaattccctgcccttttccgaaagctcaattctcttgcctgtcctgttaaaaagcggcactcccagctcatcctcaagctgctttatctgcagggttacagttccctgcgagtagcccagttcatccgctgttttagtgaaatttcctgtttccgccgctctgataaaggttttaatattccttatttccatatgctccccttatttgttattttaatatgctaattcatatcttttaattttactgatttacataaatatattaatataattatatacaaaaaacaatatcgcaggagaatatttatatgaataacacaataatggacaaaataaacggcagaccttacggactcaggatactttacgcggcactgggactgttcatatttgctttcggagtatatcttaccatacaggcaaatgtgggacttgctccatgggatgctttcagtatgggcgtcagctatcatgttccccttacatacggcgacattgtaactcttacagggtttgtaattctggcaatagacctgctgctcaaagaaaaaatcgggctgggcagtatccttgatgtatgtattgtaggcaagtccgtagacctgtttacatggcttgatatagtgccgcagcttcacaatatatggataggtattccagtgcttctggcagggcttgcaatcgaggcctttgcaatgggaatatatatggctcagggactttcctgcggaccgagagacgctctgcttgtcgctatgggcaaaagacttaagaaattccctatcggcgcagtgaaaatgataatagacggctttgcagttgccataggcttcattctcggagccaaggtgggaataggcactgtggttgccgtattcggaatgggatttatattgcagggcgcatttaaggttatgaaatttgatgcaacggcggttacacacgaaagtataatcggaacagttaacagactcaggaggataaatgaaaacacaaggtaacggtaaaacatatttcttaatggttatagcagcgcttgtatggtcaggcgcatttatcgcgggtaaattcgctgttccctatgtgcctgcctttactctgacgttcctgaggtttctgatatcctcagctgtgctttatcctgttatgaaactatataacagggctcacccgaaggataatttcaaactgacaaaaaaatatataccgctgtttctctttaacggtattgtcggtatgctgggttaccatgctctgttttttacggcactcaaatatacatctgccatcaactccagcataataggcgctatgaatcctatagttacaacagttatagcctcaataaccatgaaacagaaaacaccgccggttcagactgcaggtattgctctttcatttaccggtgtggttttaacaataacaggagacaatctcagtatgctggcctcttttgatttcaacagaggcgacatatttatggcggccgctgttatctgctgggcctcatatgccgtaatgagcaaagcaaagggcgcagaggttcctccccttgtccttacattttacagctttgtgttctgcaccataacccttataccgtttgtgatatgggagcacccatggacactggaaaaaatacccgtatccgcgatacttgcaataatttttatggcggtattttcatcggttatagggtatatgctgcagcagatagcaataaaaaaaataggagcctccaaaagctccatatttgtaaaccttgttcctgtattttcgataattctttcggtaatcatactgggcgaggaacttatacccgtcaagatattcacttcgcttctgattattgcaggagtatgcatatgccagatgtcaggaaagagaaaacatcagacagaagctctcaagaataaattttcataattacacaaggtaaaacagctgcacaggatattaccggcggctgttttgctgttatctgtttgctttaattttcttttcgcttaccgattttacctcatctctcaggctgtttatgtactcattaaagctgcactcctctataccataggtcagctgcaaatcatattcgagaggcagccatgtggaaatatcggcttcattgtgctgtattacagcctccagcttgtcaagagccttgtagagctttgcctcaggggttttaagctcgttcatttcactgtacatctcaccaagctgttttttccagtattccggcagctgatttacaaagcctgacaccgcgctgtcctctgctgcctcgtcactgtctgttttttcaaatgacggtatatctcctgtgatagcctctcccaagtcgtgtataaggcacattctgattaccttgtccgtgtctatttcaggcacctcatcgcttaccatatatgccataagtgcaagtctgaagctgtgctccgccacgctttcgtgtctgtcagagcttgtatatgaatgtcttgtattgcatttgagcttttcggccattgccagaaattcaagcagttctgccggtttcatttcttattgtactccttacatctgtatcttcttttgcccacgctttttttgccgtattctatggcttctgccggacattcgcatatgcacgccatacagtgcgtacattctctgccccactgcggtctgttgtctataaagctgagtcttatgttgtcaagaggacagagcttttcacatttgccgcagcctgtacatttgtcatctgcataaaaggctgtggcccttatcgcaaagtttcgaaacagagtatttacaaagccgcttttacatttgtctgtaaagcgggtgcttctctcatcaaaatcaaggtttatcttcaccttttcggccgccgcatccatatctccgtaagcctgatctacgattttttcggattccgcttcatcaggcacattaaacatcgctatatagttttcgggcataacaatctcgaaaacgccccgataattaaagcccttgcgactgcacagctttttgatgcgcttttcgggcataccgatatcagtcccgcagtccattacaaaatatgcttctttgctgccactgaactccgaggaaattataaattcctcaaacacacgaggcagctgccagccgtatgtcggagcaacgaacacatacggtttttgtgatgaaaaactgccgcccgaatgtttcctgatatattctctgctgtctgtaatctcatcttccagtttgtcgccaagcatatcagctatatatttgctgttgcctgtacctgtgaaatatataatcataagttatctcccctttttgcctgccgcattatcatacaatttattatgcgactttcttgttatagtcagttactacaacttcgctcgcaatctgttttgcgtgtgaaataatatcttcaattttctccataacttcatcgctataatatttttcaccgcattgcacacattcctcacaaggaacgttttttactataataatacagtcttttagtgtggctacatatgttgtcacactatcagtcagaatatctcctttacagaaaacacacattttcattcatttatcaagtatatttagtaccttacaactcccctaccatcttttcgggatttacatattctctgaattcttcttttgtaagtatgcccagtgctgtcgcagcctcctccaacgaggtgttattgctgtaggcatacttggcaatctgcgccgccttatcatagcctataaccttgtttaaggctgttacaagcataagtgaacctgccatattgcctgccaccttatcctcgtttactgttatgccttttgcgcagtttatattgaatgagtttaccgcatcagaaagaagtctgatgcttcttatcatattgaaagctataaggggcatatatacgttgagctggaagttgccctgtgaggcagctattcccactgtaacatcattgcccataacctcggcgcataccattgtaagggcctcgcactgcgtaggattaaccttgcccggcattatggagcttcccggctcatttgcgggaattacaagctctcctatgccgcatctcggacctgaagcgtaccacctgacatcgtttgcaatcttcataagatcgcatgcaagggctttcattgcgctgtggcacacagctgccgcatctttgaatgcaagtccgtaaaatttatctccggaagccttgaattctctgcccgtaagctctgatatttctgctgccattgcagtatcaaagccttttggcgcattgagacccgtgcctacggccgtaccgcctatcggtatgtttttgagctctgtaaggctgttttttattgctgtatatgatttttccattgcatactgccatcccgcaaattcctgtccgaaggtcagcggtgtggcgtcctgcaaatgggttcttcccgtctttataacctgcctgtatctgtctgaaagctcaccgaaagtgtctgcaagagcctttatctcaggcagcagtctgtcctctgcttcgatgacacaggcaatatgaatagccgacggaaatacatcgtttgagctctgggacatattgacgtgatcgttgggatgagccctgccctctgtcagatgagatataacctcattgacgttcatattggtctgggtaccgcttccggtctgccacactgaaagcgggaactggtcatcaagcccgcctgcgagaattttatcacaggccgctgtaactgactgtgatatttcctcgctcatattacccatattaaagtttacgactgccgccgcacgctttattattgtaattgccctgattatctcaacaggcattttttctgtgcctattttgaaattctcaaagcttctctgggtctgcgccccccacagcttatcgctgtctacaaggatttctcctattgagtctttttctgttctctgtttcatctatctgtttctccatgcatcagccactgctccggctactgccgccgcaataccgtcctcaaaggcatcgggcagaattctgtctgctgacagtctgctctctcccacaaaatcagcaagggcgtaggctgccgcaaccttcatttcctccgttattctctctgcctttgcagcgagcgctcctctgaatattcccggaaacgccattacattgtttatctggtttccgaaatcggatctgcctgtaccgactactgcagctcccgcattctttgcaagctgcggcataatttcaggctccggatttgccatggcaaacactataggcttgtcagccattgtttttatcatatcctctgtcagtattccaggcgcggatacccctataaacacatctctgccgcaaaggccctcagccatacttccgctgatattattgctgttggttatctcaagaagcgctttctgggctttgttaagcgtcagctctgtcgacagaatgccgtcaattccgcacaccagtatatccctgatgccaagtgaataaagcattctcgtaatcgctgtacctgccgctccgtctcctgaaaccagcactctaatatctgtaaggtttctgcctgtaaccttgcaggcattgataagggctgccgaaactacaacggcagtaccatgctgatcgtcatgaaataccggaattggaagcaactcctgaagccgcctttcgatttcaaagcaccttggagctgatatgtcctctaagttgatgccgccaaaggtagcagacatattcttaactatatttattatttcctctgtatcctgtgtatcaagacatatagggacagcgtctatatctgcaaattccttgaacagtacggccttgccctccataacaggtatcgccgcctctgctcctatattgccaaggccaagtaccgctgagccgtcacttatgacagctacagtattgcccttagaggtatatttatatacgtcctctctgttgtttttgatttcaaggcagggctgtgcaactccgggtgtgtatgccagcgcaagctcctgtctgcctgtaactgccaccttgcttttcattgcccatttgccttttgtttttgcatgtaatttaagtgactcactgtaataatccataatcagtccgcctttatcattttgttatgtaaattctgcattttcacatcaagcgccgcgctctcctctgcgcactgtttgagctctgccataatctcatctgtacactcaatatgttttttgtatttgagcttgtgctcaagactggcccagaaatccatagctatagtccttaactggatctctacattcataagtcttgtttcgcctgcaagaaatatagggattgaaacgataagatgaaggctcctgtagccgttggctttaggtccctctatgtagtccttcctttcgacaagtactacatcgtcctgtcttaaaagatgctcctcgaggaaatacacatcttttaaaaacgagcatattactctgacgcctgctatatcaaacatctgctcctcaagagccttaggatcaaaaggaatttttctcctgatcattttttcgataatgctctcgggtgttttgagtcttgttttgatgctctctataggatttctgtcgtgctgcagtgacatattttcgttgaggaccttgagctttgtttcgatttccatcattgcgcacttgtaatacgacattatctttcgaaactcgcgccccgaccttataacgtcttcgagctcctccatggaaaacttctcaagcatggcctctatcggttttaattctttgtccataagttccctttcttttctaatcaaaaataccccatctgtttattttaccacgatatgccctgcattgccatatccaccggttaatctccttaatatattatacggctcacgctgcctgtcaggcaagtgagattttagtgaaatatcagcccgcacttcaaaagggctgccgcatcaggttaaatctaatggcaacagccccttatcgctgcattttgatttcagatacaaaatgcagcatatagaggaacgatttttttgttgtcctcaaagccgaagtttttggctgagagcttgatagcataagcgggtttgtaggtgtccatatagacatttaagctcttggctctggtgttgtcggcagacttgacctcaatgggaatgagctgaccgtcacgctgaatgataaaatcaatttcagccccacgctcggactcccaatagtatgtgtgatagccgtttatggagagctgcacattgacatagttctctgccatcccacccttgaaatcgttaatttcctcgaccatatagagaatgtcattagcggctaaatctttcttggcgcaaagcaagcctaagtcggacacataaatcttgaacgcatcgatattacggtagttttcaagcggctttttgatttgctcgaccttgtagacctgtgacacgataccggacagacaaagccattcaatcgcattttcaaattcagaagcccgtccgcctttcttaatcagcttatactggaaacgggtatttttctttgaaagctgaacggttatattatcgtatgcaagtctgattttcttgatttcattcagtttgttatacttgctcatatcattgagatagcttgcaagtatcgtatcctgcgtatggcggacaaggatataatcctttgtttcggcaaactgcatcacgcactctggcataccgccgaccacaagatactgacggtaaagctgcattgcggcatcgtgcaaggcagacggcagcagcgtatcggtttggaagcactttttaatctgctctaccaaatcgtcctcaccgagcgccaacataaattcctccatatccataggataaagcgttttcatatcgacctttcctacggggaaagagaatttcgctctgttgactgcaacgccgagcaagctgcctgcgacgatgatgtggtaatctggagcgtcctcgcaaaagtatttgagtgaagtcaacgccctttcgcagagctgcacctcatcaaagactatcagcgttttttcctttacgatagtctgacctgcgatatgggacaaaatcggtatcagataatcggggctgatgttttcctcaaaggtttcgttcagctttggattggtttcaaagttgaagtatgccacattttcatagtgggtgcgcccaaactccagaatggaataggtctttccgacctgtcttgcgccctgtaaaataaggggtttgcggtatttgtcttctttccaagcttctaagaagcccataatctttctatacataagcattcctccttaaaggtactggccatagtataacagatattcgtgtaaaaatcaacggaatttccttgaattttcgcgctaatcaacacgattatttttgccaatccatcacaatacgacatgaataccgcaatttctgcattttatacctctccgaacttggtcgtcatcagcttgtaaagctcggtattgcgggaggggaaacttgttgacgaatggtacaagagagctgaaggtcggagatattaaggtcgataagcacccttacggtagcctctctccattgatttttccttaaatactgcccgttagcctttcgacaggaactctgaacggtgagcagggctcgcagtttaattagatgaaatatcagcccgcatttcaaaaccgcctgccataagacagacggttctgtttatataaggtttgattatttttcgttgtttacaactgcctgtgctgctgcaagtcttgcgataggaactctgaacggtgagcatgatacataattcagacctgttctgtagcagaaatctatagtcttaggatctccgccgtgttctccgcagataccaagcttgatgttaggtcttgtttccttaccaagctctacagccatcttaacaagtttgccaacgcctacctggtcaagctgctggaacggatcttcctcgaagatgttcttgtttctgtattccttgatgatagcgcctgtatcgtctcttgagaaaccgaatgtcatctgtgtaaggtcgtttgtaccgaatgagaagaattctgcttcttctgcgatttcgtcagctgtaagtgcagctcttggaatttcgatcatagtacctacaagatacttgaagcttacgccttctcttgcaaatacttcgtcaattttcttagttactgtcttcttaacgtctgcaagctctgcctttgatcctactaacggaatcataatttcaggtacgatatcatatcccttttcttttcttacttcaattgcagccatgattatagcctctgcctgcatctcagcgatttcagggaatgttactgcaagacggcagcctctgtgacccagcatagggttgaactcatgaagctcttctgccttctttgcaagtttttcgtaagatacattgattgtctttgcaagttcgtgaagttcttcatctgtgtgaggaataaactcatgaagaggcggatcaagaagtctgatagttacaggtctttcttccattacctcatagatgcccttgaagtcgcctttctgatacggaagcaggaatgcaagagcttctcttctttcttcttcagtgtctgccataatcattcttctgattgcaggaattctttcttcttcgaagaacatgtgctctgttctgcaaagtccgataccctctgcgccgaattctacagcctgttttgcatctctagggttgtccgcatttgttctgacctttaatgttctgatttcatcagcccatttcatgatagttccgaagtcgcctgaaagttcaggagcctttgttgcaacaagtcccttgtatacgcttccgtctgtaccgttgagtgatatatagtcgccctctttaaaagtatatcctgcaacttctaaagtcttgccttcttcgtttactttgatttctgagcagcctgatacgcagcacttacccatacctcttgctactaccgcagcgtgtgaagtcattccgcctcttgcagtaagtatgccctctgcagctaccatgcctgcaaggtcctcaggtgatgtttcaagtcttacaagaactgctttttcgccgtttgcagcagcctctacagcgtctgcagcattgaagtagatcttacctgcagcagcgcccggtgatgcagcaagacctcttgtgaggatttctgcttttttaacttcgtctgcatcaaatgtagggtgaagaagctgatctatctgacccggttcaagtcttgtaactgctgttctcttatcgataaggccttcgttttccatatcaaccgcaatctttacagcagctgctgctgttctcttgccgtttcttgtctggagcataaacagcttgtttctttcaactgtaaattccatatcctgcatgtcgcagtagtgtttttcaaggatttcagcaattcttgtgaagtctttgtatacttcagggaatgcctgttccatttcagctataggctgaggtgttctgatacctgcaactacgtcttcgccctgcgcgtttacaaggaattctccgaagatcttgttttcaccgtttgcagggtttcttgtgaatgctacacctgttcctgatgtctcacccatattaccgaataccattgactgtacgtttactgctgtacccaggtttccggggatgttgttaagctgtctgtaaagtatagctctttcgttgttccatgatctgaatactgccattacagcttccataagctgatctttaggattctgagggaaatctcttcccatttcgttctttactaatattttatagtcagcaatgattgcctttaagtcctctgttgtaagatcaacgtcatatttgcagcctttttcttcttttttggcatcaaatatggcatcgaacttggtcttagggatttccattacaacatcaccgaacatctggataaatcttctgtagctgtcgtatgcaaatctttcgttttctgtaaggtttgcaagacctacaaccgcatcgtcattaagaccgaggtttaagattgtatccatcatgcccggcattgagaatacagcacctgaacgtactgaaaccagtaacggattgtctacgctgccaaactttttgcctgtaacgttttcaagctctgcaagatgttcataaatctcatcgattgtagcatcgcttatttttctgccctcttcgtagtagttgttacaagcttctgtagtaacagtgaaaccgaaaggaaccgggaggccaatctttgtcatttctgcaaggttagcgccttttccgcctagaaggcttctcatatcttttgagccttcattaaatgaataaacaaactttgacataacatttaatctccttttcaattaaaatactagtctttcttctatatagtttcgaacctgttcaacaggaatacgaacctgctccattgtgtctctgtctcttacagtaacacatccgtcggtttctgtatcaaagtcaacgcagatacagaacggcgtaccaatctcatcctcacggcgatatctcttacctattgagcctgcagcgtcatagtcaaccataaagtactttgaaagctcttcgtggataggctctgcaacgtctgacagcttctttgcaagcggaagcacagcagccttgaacggcgcaagcgcagggtggaatctcataacaactcttgtgtcctccttgcccttggcatctgtcagtgtttcctcgtcataggcttcaaccagaaatgcaagcgcaactctgtctgctccaagcgacggttctatgcagtaaggtatatatttttcacctgtttcggaatcaacataattcatttcctgacctgaatgctcactgtgctgtcttaagtcgaagtcggttctgtctgcaatgccccacagctcgccccagccgaacgggaacagatattcaatgtctgttgtagcgttgctgtagtgtgacagctcctcctgctcgtgatctctgagcttgatatgatcctcgctcataccaagtgatctcaggaagtttgcacagtagtctttccagtaagcaaaccattcaaggtcagttcccggcttacagaagaattcaagctccatctgctcaaactctcttgttctgaaagtgaagttgcccggtgttatttcgtttctgaatgatttaccaacctgagcaataccgaacggaattttttttcttgcagctctctgcacatttttgaagtttacaaatataccctgcgctgtttcaggtctgaggtagatctctgactttgagtcctcggttacgccctggaatgtcttgaacataaggttaaactgtctgattgacgtaaagttgcttttgccgcattcaggacacactatgcctttttcggttataaagctttcgagcttctcgtttgaccagccgtcaactgtaacatcatctataccgttttcgtgaagatagtcctctataagtttgtctgctctgaatcttgccttgcactccttgcagtcaataagcggatctgcaaatcctccgacgtgccctgatgcaacccatgtctgagggttcataagaattgcagcgtcaagacctacattatattttgattcctgtacgaatttcttccaccatgcttttttgacattgtttttgaattcaactccaagcggaccgtaatcccatgtgtttgcaagtcctccgtaaatatcagaacccgggaatataaatcctctgttcttgcatagggctacgattttttccattgttactgctctgtccatcttttaaaattacctgctttcctttattctgtcttatctgtaatatcaacgattttaactgcgctgtccagttcttctgccatttcctcttcaacggcatccgcagcttcctctatatcctctgcgatattgattgcaaaatcgtcttttgattctttaaccgcgtcgattcttgtctttgcggcctctgccacatcctttgccttgtccctgacattctctattgtctcatccaggtgagcctctgccgcttttgttttcattgtttcgtacagatcagctcccttgtctacggctttttctgtcagatcctttgctttatcctttacatttgcaaaggtttcatcgagatttttttcgactgccttggctttggctgcctcatatatatccgcgctcttgtttttgacgccctcaaatacaactgcgcttttttcgacaacgtcgtcaaatttatcgttggccatttcgcttacatcaatcacactgccgtcgtccttgataacctcgatggtgcatttgaagccgaatgtggccgctgtagcgattataattgcaaaaggcgcaatcagagtgcttacgatgcctacattgataggaacgttgagtataatctctccgtcttttttgactactatctttgaaacattgccttttttgacaagctctttgatcttattaagtatctcctcaccttttttgctgaaactcttagatgttttttcgtctattgactcttcgattgcgattattgcgtcaacaacgcttccctctgatttctcaagagcctcttttgcctctttgtagcttactccggttctgtccttaaccagttcgatcttctctaatgtaatctccatactgttacctcctgatactctcctcaatgaaagcctcgcttttgagtctgcctacatcgaggtgataagaaatatatttttttattatttcctctatctgatccagtatcggtttctgtaatgccagatttttaaaatcagaaagaggtttttttacaaagtaccttaatatacctactatatcaaacttgattgtataaatcaatccgtcatcatcattatttgctgtattttgataacattttttacatagcaggcccccgtcaggtatactgaatacaacaggttcggacttttgcccgcattgtatacagcattcaagctcaggcataatgcccagtatctttaaaaccttaatctgatacgccagcaccagcgtttcaaatctgctttctcttttttcaagttcggaaaaaaaatcacagataagcttcattaccgcaggctgcggctgttcatagggtactattttttcggtaaattcaagcacatacgatgcggccatatacttgtccacatcttcgcccagcccgtagaagcttctgatggtttcggcgctgtcgatgttatatatgtctctgcttttgaatatctggtatctgccgtaggtaaaaggcctcatggcaagggctgatttgtttctgccgccctcattgatgcggcttcccgcgcttatcttgccgtatcttgcagacagaagcacaatcatgcgcctgccgcccactgtctttatctgttttaatactataccttcggtttcaaacttcatttctggtccctgtatccgaaattggaaagcgcaaaatcgctgtcacgccagttttctctgacctttacccagagctgaagaaaaactttcgttcctattaaagcttctatctcttctctggcgcttttgcctattccttttagcttcttgccgtccttgcctatgattattcccttgtgggatttcttctcacagtatattactgcgcctattctggtgagtctgccctcctcctcgtaggtttcgatttcaacggctactccgtgaggcacctcgtccttgagataaagcagcagcttttctctgattatctcgcttactataaatctctccggatggtctgttatcatatcctccgggaagtacatagggccatcatccaccatgccctcaagcattgaaagcagctcgcctacattaatctgattaagcgccgatgtacctattatatgttcaaatattcccatgctgtcataggcctcatatattctgctgtatttgtccgggtccattgtatccattttgtttatgacaaggactttgggagtatctattccgctcagcatatctgttatgtatctgtcccccggtcccttgtcgatttcatcatcgacaagaaaaagtatcacgtcaacctctctgaaggtgctgatggctgtttcagtcataaagcttcccagcttgtttcttgccttgtgtattcccggcgtgtctatgaatatgaactgaacgccgtcgccactctcatcaaggtttgtatatatacctctgatgctgtttcttgtagtctgaggcttgtccgttgtaattgctattttctctccgagtattgaattaagcagtgtcgatttgcctacattgggtctgcctacaattcctataaatcctgatttcaaattattcctccagtctgaagcccttaggcagcagctctcttaggggtactgcttccagatgctcctcatccgttcccgaaaccaccttgagatccggtgcaaattcatacataaactgtctgcatatgccgcagggccagccgtcctgctttgcagtagctataactatgcggtcaaattctctctcgccctccgagattgctttgaccatggcggttctttccgcgcagattgtccctccgaacgatgagttttcgatatttacgcctgaataaactctgccgctttttcctacaagcattgcgcttacaggaaactttgaaaacgggcagtatgagtttttgaggttttcctttgccttattgtacaggtctatatcatactgttctactttcatgtttacctcccaaggtctattctgttcattacagcttcttctttttgtctcattatccgcttttcgtcctcttccatatggtcatatcccataaggtgaagcaggctgtgggtgaaaagatatattatctctctttcagggctgtgtccgaattcctctgcctgaagcattgccttttcggtgcagataaccacatctcccataattatctctccgactttcggaaactcgtccttgctctcaaactgaggaaaggacagaacatccgtaacagagtccgtgtccctgtattctctgttgagctgctgtatttcctccatatccacaaaggtaagacttatttctgcaaggttttcatctactccctccatttcaaggcatgcctttgcggcttcttctattttgttcatcatcgcctgcttaggcaggttttctccgtctactattatattcatctgttattcttcctttggtggatttttttcgtaatatttatcgtatgcgttaattattttctttacaagctcgtggcgcaccacatctgtatccttgaggaaacagaaatcaatatcatctacgcctttgagaactcttactgcctctgtcagccctgaggtttttcctctcggcaggtctatctgcgtgacatcgcctgtgacaaccaccttggagccaaagcccattcgtgtcagaaacattttcatctgctctcttgtggtattctgcgcctcgtcaagtattatgaaagagttgtcaagggtacggcctctcatatatgccagagggacaacctctattatttctttttctttgagtctgagcgctgtatctctgcccagtatgtcataaagcgcatcataaagaggtctcagatacgggtcaaccttatcctgcagatctcccggcagaaatcccagccgctcgcctgcttcaacggcaggccttgcaaggattatcttctgcacgtcttttttcttgaaagcgtttaccgccatcgccaccgcaagataggtcttgcctgtgcccgcagggccgattccgaataccacgtctttgtttcgcatactcttgatatagtatttctgtcccagagtcttgggctttagcggtttgcccatatgggtatagcacactatatccttatccatatggctctccgcataggatattccctgtttgcacaggtctataatatatgttaccttttgtgtatcaagcttctctcctttttcgataagggtcataagctcgtttattactttttctgctgtttcaagcttatcgcctttgattgtgagcatattgtccctctgtataatcaccacgcccagatgctcttcaatgagcttaaggttgcagtccagattgccgaacagttctcctctgtcaaaggtatcctcaattataattgcttttgctgtgttgtttaagctttgtgtcactagctgttatctcctcttctttacctattttctgtcttacttccagttgcacatatataactattatattttcttctgatgaaaatttcaaacttttattaataatttgtgcatcttccggcatattttcttttatttccgctctgagcttggcttctgccgccttttttatatcctcttttgagcgtttgtgcttttttaaatgtatttcatttatcttccccacttctattttaacgggaattattgtgctttttaatgttttcagggtttctctacgggatatttcatagcttcctgtaatattctccgatgaaaatgtcatatccccaagccttacatttatatacggtataaatctgcctgtattttcttttatgtattcttgtttttcttcataaaaaatatactcgcagggccttacgcccgtgacctctccctctgcgtgaacataatactcctttattttttcggcgggcgtgccgtaggctgtgctttccataggcactctacccgatatgagcaccttgccttttttgacgtactgtccctctctgacgtttctctccccattatatactttaattgtgtcgatatagcaatcggtatctgaaactatgttgcagggctttgtgtttttgcgcttttcgatttccctgtattccgcctccacgatatccactattgcttttcgcccctcgtatttaacggatatatatgtgatattatccgacatggaaaacaccgcaagctttatatctgaggtgtccgggtttatccttgccccctcgtaaagtcccgcctctgcaagtgtctgtctgatgtctttctcgctgatgctttcataccctgtaacctctatttcagccacaaaaaggctctgatagaatatgagaaacgcaaatatgcctattccgattattgttgtttttcgtttccatatatattttaaaaccggtgtatagcctcctgatgagataacggttatcctgtatctgcttcctgccgtctgcctgagtctgtcaagatctaccgcctttattacagcttccactctggtgtcatctatatatataaggtttttaaatctgatatgctgcttcatacatacggagatcagccggtttatttcaaagccgtcaatccttactgttttcctgtgtgccaaaaaactgtattttttccacctcacctgcaacctgcaccctttcttcttcaatttcctgtattttaagtccgtttccgtttaccgaaacaaacctctgtccgcaggaaacggtcagttcactgtctgaaagcagtattatctgcttgacgttatctattatcactgtgttgccgccgtacagaattctcggcaggttcacattaaagtcaaaaatcatttcgtcaagtattgcgcccattaaactcacctcgtttaattttatgtaataaaaaacaggatagactaatttctatcctgtttatattctatgcaagaaattcttcgatgactttgcgtacatcgtttccgtctgcaacgcctttgaccttgcccataacggctcccatgagcttgcccatgttctgcttgccgccctcgataccaagttctgccgcagtggctttaactatatctctgatttcatcagcgctaagctgcgcagggagatatttctgtaaaacctcaatttcctgtttatatgcatctgccaagtccattctgccggctttctcaaaatcagaaagtgcatcttttctcatctttacctgctttgcaagtattgcaacgatgccttcgtcatcaagttctttacggttgtctatttcatactgcttgaccgcagcacgagcaaaacttattgtattttttctgacttcatcctttgccttcatggcatccttgaaatcagacataagctgttcttttagtgacaattcaattcacctctaatctgtactgctttagtatttcttagccttttttcttgcagcttcagatttcttctttctctttacgctaggcttttcgtaatgttctctttttcttacttctgccataacgccatctcttgcgcaagaacgcttaaatctttttaaagcgctttcaagactctcgttttctcttactataacctgtgccatacctgtttcacctcctgactttaaataaatatctggctgaatggtttgcatatagcgatattatactatcatttctgccaattatcaaggggttttttgtatttgttttacaagtcaaaatgccttacctgtatatgatttctaattcttcaagtatatcttcctttgactttcctaaaatgccgatctgcttcagattcacatcctctgccctcatactctctgcaaatttactcatatctgcttttattgcatccggcaaaaatgacaaaggctttatgttacggtcaagaagttccgtcagcctaaatacatcatttttgtgtttgcggatgcttcggctgtcaacacgtcctccctctgcctttctttgtgaaagatcgagccatgctttcgccttaaaaggtatcaggtatggcacatccagcactgtaacttctgatagctgaattcttccttttttcaggaattcatagtagtcctcgtccaggagaattgcggaaaggctcgatatgtcgtcttccatcggcagcggtgaaagtgtggcattttccggcagtattacagcatccggcagtcttgtaaataattcaatcattgtcggatattctttcgttctcgggttagtaaaacggtaaaactgaggctcacctgtgctcctgtttcgatgttcataccctgctgcaatgacatattcccaaaatctatgtccaaaatcagcatcgacagcttctataatcagcacaagatctatgtcctttgtagcacgaaaatccaaaccttcatctgtcatcagcaggtcgcatgccgtaccacctataattgcatattgttcctcatatccttgaaaccattttctaaagttctctattcctcttaccattaatttccctccagacatccgtcagcatttcctcaacagcttcctctatcctttcatctctgtcttctctcagcgccaaagcaagagacagtctgtcaacacaatctccacctgcaagttttcgtggatcatacctccaaagctccactgcgcactgctcatcggaattctgcagttttactgatgctgatttttcccatattgagatgcttgacgcagcaaaacactctactgcaggcggattcagcatcgaatattcggacaatgccgtatacccgctgaaaagcagtttatctcttatttctgtttttggtacatatatcgttcgctttaccggattttgcagataatcttttgctgcttcaaaaagctctccaggctctctgtctgaacagattatcttctgcacgcctcttttttctgtccgcaatagccctaaagcttctaactgttttgatgctctggacacagatgtaggcgtaaatgcaagaatttccgctgcatcacttgtcatcatttcaccacatccatgataaatataacagagcagcagcaactgcgccgacggaagtatgcttgaagtttttactttttccgagtctgcgcgttcctgcaaatatgtcgccataaaaggcagatatatctgcttcccgtcaacaacaaacggaatacggtcgcgcaaaaggtattccttttgtctataggtaagatgattaagcacaagtactgccggaactcccactgcattttcaattctttcaagatgcttttttaacagattaacagcatccggctccgttttaggataaacaaacaccgctttcctgccgtcaagcgacactctcttcagcctgtatcttgtatcaataaaattcggaacggattcaatttcacagtcatcatttatgacatgtattccaagcacatgcttcaggtattccattgtgtacactccttcttaacttttaattgtattataactcattttaagttgtaatacaatatttatgttaagatatgcacacccttatatataccaaaaaattttaatttcctttatcacagctattacatactctcaatgcgctttgcagacaggcctgaaacctcagcaattatatcaacgtcaacacctttatcctttaaggctttgaccatctcctttttctctgctgctctgccctgctcaattccttcttctttggcgtcagacaaatctgccttatacttatttattatctgcatcttcttacaggcccaattatcagccgtcagtcttttgaatatattctccgccagaacaattgccttatctccgctgtctataagctgttctagcaaggcttccttgtccgggtcatttgcatacctgaaatacagcgatactctctcaagcggtgtcatatcagatacagccttactgctgtctaccttatctatctctatgaaatggactcttaccttgtcgaacggtacttccccgctttcttcatctctgatgatgtgtacattatgatatgagtccgcatctttaaacagatttcttccggcaacaaataatacaattattaatttttgtaacttgtcacttgattccatcatagaatccatatacaccatacatctgccggtgaagtactcatccggttcattctccatctgcaggctaaacagactgcctgtatcggattcaaggcatatatcaaatccaaatccgcaatactgtccatttgaatattcaatggaatcaaacgcatcaatatccttaatcagtgtatctgatatttccggtttatcttctgttacagtattaatcaacgctataagagcctgatttgactcctctgtatcctgtccgtatatcttgttaaatgccataaaatcggtaagatcaaattcttccctatgattatctgcaaataaactcacaccctcgcctccttatgtatcctttcatattttcaaagcagttttatttattatttatattaattatatataaacaatatattttagtcaaacatttttctagctatatgctattatgcttcagaagtaaccggcaataaaaaatgggtatccaaactttttggtggggtaacaatttggtggactggtttggtgggattgcatttttcgtcattggattggtgggctggtttggtgggctggtttggtggggcagcagtttcagacagaatttaaaaagagacaggttgatgtctgtttagagtctcgtgtatttaaatgaacactcattacctccgattaacagtaccgctgtaaatgctgttattaccgataaagaatatttcaacaggcttaaataatcctatatatactgcaaaggacacgatttctcgtgtccctgttgatttcgggaaacatcgtggaccacagacagttctcatcatccattaggtctgccgccggattcccggtgcagcccccacttcttatgaaatccgctttgcgtcccagccatactcagcagaaacagtaatccgacatcggctgccgggctacgtcgctgccgcctcctgctgtttttcaaagtcaacctcatttccatcgagtctgccccggttcaccggtgcaggccccctgaacctccgcctgctcacagcttcatttcagttttctggtttcagtgatctgtgatgcagcccacgatgggctacaaaggcaaaactgcctggggcaattttgcctttaacattttaccatacaaggcgcagtttgtatatagaaaataaaatctttgcaagcaaaaagacccggaaattccaggtccttttgaggaatatttacataaaccaactatttagtagttgcatcatataaagcttctgcattatcccattctgcaatgatttcagggattaccttgtaaaggtcgccaacgataccaaagtcagctacttcaaagattggtgcatcagggtccttgttgattgcaacgatcatatctgatgtctgcatacctgcaaggtgctgaatagctcctgaaataccgcaagcgaagtagattttaggttttacggttgtacctgtctgaccaacctgatgcgaatgatcaatccagcctgcatctacagccgctcttgatgaacctacaactccgccaaccttgtcagcgaacttcttgataagttcaaatcctgaagcatcgccgagtcctcttccgcctgagcagatgatatcagcgtctgtaagtgataccatttcttttgctgacttaacgatatcagcaatctgaatatggatatcttctgccttaaccttagggtcagcaactacgatttcacctgtagctcctgcaactctttctctcttctgcattacgccaggtcttactgttgacatctgaggtcttgttctagggcagatgattgtagccataaggttaccgccaaatgcaggtcttgtctgcttgatacctgttgaagggtcattagggtctaatgtgcttgtatcaagagtagtgttcttctttgcatattctatgtagcttgaaaccttaacgtcaagtcttgtacagtctgctgtaagacctgtgttgcatcttgctgcgattctaggagcaaggtctcttccgatgtgagttgcgccgtagagaacgatttcaggcttgtattcgccgattactgtttctaaagccttagtgtaaccgtctgtagtgtagttcttaagaagcggatctgctacaaggtaaactttctctgcgccgtattcgaaacattctgctgccagaggttcgatatcagccttgtcaccgagaagaactgcacagatttctgtatctgcactgatttcctttgcaagtctgtagccttcgcctatgagttcaagagcaacgttcataagcttgccctgtctctgctctgcgaatacccatactcccttatagtcgtcaaggtcagcagcaactgcaactttcttttcttctattgcgccgaacttacaagctgtaaggcactggttgcagaaagtacatttagcgttgattttagctacttttcctaatttatttccgctgtatggttcaaattcaaatgcgtcctgaggacatgccttaaagcactgaccgcagccgatacatttttctttaataatattaatagccattttctttcctccctattagattgaatgtttagccttaaggttgataagcaggttctttgcctgttctttttcagtatctccttcgatcttaacgcccggctgtttaggtgcaggtgtaaatgatctgaatacgtttgtaggtgatgcttcaagaccaacctttgtaaggtcaacttcgatatcctttgcattccatgtagtcatcttcttttcgccaaagatgcctttcattgtcatgtatctaggagtgttaagttctttgattgttgtaagcagacaaggagtctggatcttgataagttcgtatccgtcctctaactgtcttttaactgtgatatccttgaggttatcagcaatttcaaattcctctacatatgaaacctgaggaattccgagtttttctgc

SEQ ID NO: 3989 - DNA, 16443 bp, Unknown
  16S sequences of unknown bacteria
gctgactgtggaagagatccctgcttcttcccgccgctatccctatgtggctttctctcccgaccgggaggtaggaaaggacatcctgtttgtcaccgacgtgagcaaaactatcgacggcgtgaaggtgctcgacaaggtttccttcatcgtggagcacggggacaaaatcgcctttgtgggcgaaaatgaaaatggccagacagcactgttcaagattctcgccggcgagatggagccggacgagggcactgtaaagtgggggcaaaccgccacgttcagctactttcccaaagacaacaccccttacttcgaagacaacgacgacaacctggtacaatggctgcgtcagtattcctccgatccccacgaaacctatctgcgcggtttcctgggccgcatgctcttctccggggacgaagtatacaaaagcgtgaaggtactttctggcggcgagaaggtgcgctgcatgctctcacgcatgatgctttccggcgccaatgtgctgctgctggaccagcccaccaaccatctggatctggaatccatcgccgcagtgaacagcggcctggagagcgtcaaatgcaacgtgcttctggcctgtcatgaccatcagctggtggaaaccgtggctaaccgcgtgctttgttttaacgctgacggcactgtgacggattaccgcacagattacgacacctacctggaaaaaaccgccgcccatgaagcggaggcataagaaacaaaaagtcaagacgttttctgcttttgcagaaagcgtcttgactttctcctttttttcgatatactatataaggttttatgaaatccatctgtgcgatggagcaacagtttctgccaactgccctcaattgactattgtgtccccggcgggacaagccatagtcccggagcggcagttcttttatgctgatcgaccgaaaggagccacagccattatgaaaaaggacatcgtgatcatcggcgccggtcctgccggcattttcaccgcgctggagctgatccgcaagggcagcaaaaagagcattgctttggtggaaaagggcgcggccattgaacaccgccgctgtcccaaaagcgtgacgcaaaaatgcgtcaactgcaagccctgctgccatattaccaccggattttccggcgccggcgctttttccgacggcaagctgtccctctcctgtgaggtgggcggcgatctgccggatctggtgggcgccgatctggtgcaaagcaccatcgcctatgccgacagtatttaccttgagttcggcgcggacacccatgtggagggcgttaccgacggcgatgaaatccgcgccatccgtaagcgcgccattgccgcagggcttaagctggtggattgcccgatccgtcacatgggcacagaaaaagcccagaagatttatctcggcattgaaaaatatctcgccgaacacggcgtggaactgctgttcggcatggaatgtgtgaacatcatcctgcaggactccatatgcaaaggcgtcacgctgaccgacggaaagaaagatctggaaatctacgccgacgaaaccgttatcgctgccgggcggcgcggcgcagactggttggaaaaagtgtgtgccgaacataacattgctcatcagagcggcaccgtggatgtaggcgtgcgcgtggaagtacgcaatgaagtaatggaaaccgtcaatcgcgcgctgtacgaaagcaagctcattggctatcccaagcctttcaaaaacaaagtgcgcacattctgtcagaaccccggcggtttcgtcagtcaggaaaattatgacaacaatctggccgtagtcaacggccactcttataaagaaaaaaagtccgacaataccaatctggccattttgtgctcccacaatttcaatgagccgttcaaccaacccatcgcctttgcccagaaagttggcgagctgaccaatatgctgggcgcaggccatatcctggtccagcgctacggcgacattcttgatggcaagcgcacctgggccaaagaacttgcccgttccaatgtgcgccccaccctgcctgacgccgtagccggtgatatcacttccgccatgccttaccgctccatgctgaacatcatcaactttattcaggctgtggacaaggtggtgcctgggtttgccgcaccggaaaccctgctctactccccggaattgaaattttattccaaccgcatcaaaatggacacccatctgaacaccaacgtgcagggactgcactgcctgggcgacagttccggctggacccgcgggttgatgatggcctcggtcatgggcgtgctgatggggcgctatctcctgtaattccatctttcttttttcttgagccaatataaaaggcagggcatacgccctgcctttttcccgtctgagccaaaaaattcttacatccgccgtctatttgtgctatactgttcttataatgtgggaaagtagcgggaaaacagctcatagaaacccacacagtacgaaaaacgggttcaaaaggaggatacagcatgtacgagcgcggcgtattgattatgtacggcaacagcggcgtttgccgtgtggaggatgtggcgcctatgaagggcagccgcggcgcagaaaaaaaccggctttactacaaactttcaccagtttatggcagcggcacgatttatgtccccgtagacacgaaaatttttatgcgcccagtactcagccgccgtgaagccatggatctgatccgccgcatcccggaaatcagcgacgattgcggcgaagatgtttccgactggcacgctttgtccgccatctatcaggaacagctccattcccatgactgcaccgatctggtgcatctgatcaaatcggtttaccttaagaaccgtaccaatgccgagaacgggcgcagaccctacaaagtggatcaggaataccaaaagcgggcagaagagctgctgcacagcgaactggccgccgcgctggatattcccatggagcaggtggcaggctttatcgccgccgaattggaaaaaagtgctctgtaacgtaccatacagcaaaaccccggctcaatttcagagccggggtgttattctgcggcatcctccttctcagagtcggaggcattatttcttcagcgtaccgttggcgctggcagtcagataggcattgataaagccatccaaatcgccgtccatgacattgtcgatgttgccggtttcatatccggtacgcgtatccttgaccatctgatagggcatgaacacataagagcggatctggctgccccattcaattttcatctgcacgcccttaatatcggagattttttcggcgtgctgctgagctttcagttccatcagcttggcccgcagcattttcatacagttgtcgcggttctgaaactggctgcgctcctgctgcgaggaaaccacaatccccgtgggcttgtggatcaggcgcactgcagaagacgttttattgatgtgctggccgccggcgccggaggagcgaaacacctgcatctcgatgtcctcttcacggatctcaatggaattgtcatcatccatttccggcataacctccactgcagcaaaagatgtctggcggcgggcattggcatcaaacggagaaacacgcaccagacggtgcacgccgttctcacttttgagatagccgtaggcattgtcgccctccactgcaatggtggcagatttgatgccggcttcgtcaccgtcctcataatcgaggattttataggtgaagccgtgacgctccacccaacgggtgtacatgcggtagagcatttcggtccagtcctgagcctcggtgccgccagcgccggagtgcagcgccacaatggcattattggcgtcatattcgccggaaagcaacgtcgccaggcggcgagccgcaatttcgctctccagcttgtcataagactcggtcaattcttccagcagagactcgtcgtcctcctcaatggccatttcacacagcgtcatggcatcttcccaatccgcgcagagcttttcatgggcgcgtattttattctccaagcgcttaatctgctgggccactttctgcgaatgctccatgtcactccaaaagccctcctgagcgctttcgtcctgcaaacgggcatactcctgccgcgcgccgtcaatattcagcgcgtttttcagctcctccagcgtgggcttttgtgcgagcaacttctgcttgtactcatcaaattcgatcatgctcatgcttgttttctccacctgtatcgtaaaataattctttgatctgcatattggtactattatatccaattcttccccatctgtaaagctgttttggtagaaaagtcccggcctgcactctggctgtacaggctattctttcgttatttttttcgcttccttcccaaaattcctcccagtaaagacaaatggccgcaatataggtaacatccattgcacacgcgccgaaattccgacacactcttgtcatttatcactttaccatgtaaaatagtttcagcgcatttttcactccgccgccgcataaggtggaccagcacactttatccaccacacaaaagcacatggcaacggtcagtttgaaagaggaaagaggcatcgcttatggatcaatttatgtatattctggaacttatcgacaagtatatctggggtatcccgctgtgcgccctgattattggctgcggcatctggctgacactgcgggtgcggttcctgcagatccgtcatctgggccgggcactcaaatacatggtgcataacgaggcccacggagaaggcgaagtgaccagcttcggtgcgctgtgcactgccctgtccgctaccatcggcacaggcaacatcgtgggcgtagctacggcaatcgccgccggtggaccgggcgcgcttttatggatggaaattgccgcttttttcggtatggccaccaaatattccgaaggccttctggccatcaaataccgcagcattgataaagacggtcatgtgctgggcggcccgttttattacatcgagcgcggcatgggcaaaaactggaaatggttggccaaaacttttgcatttctgggtgccacggcgggccttttgggtatcggaaccattacgcaggtcaacggcattacctccgccgcgcaaaacttctttgaccccagtctgcagcatgtggtcttttccatcggccagggcgaaagcgccgtccccattacactgacaaccattgttgcaggcctcttggtcacactggccgtggctctggtggtcatcggcggcatcaagcgcattgccggcgtatctcagatcatcgttccttttatggcgattacatatattctctttgccgttcttctgctgctttgcaatctgcagcaggtacccggtgccattgtcacaatcgtcacctcagcctttgcaccacaggctgcccttggcggtgtgatcggcgtcaccatcaaagacgccatccagaacggtgtggcccgaggcatcttctccaacgaggccggacttggttcggcccccatcgccgccgccgctgcccagaccagagaaccggttcgccaaggcctggtcacaatgaccggcacctttattgacaccatcgtcgtgtgtaccatgaccgggctggccattgtattaactgaatcctgggtgcctgaactgggcttgaaaggcgtacagatcacgacccgcgctttccaggtaggactgcctttcccctccgcgatgtccgcgtttatcctgatgctgtgcctgatcttcttcgcctttacaaccattcttggctggaactactacggcgaacgctgcctggaatactttacaaacggcaacaaagccgccgtcaaatgctatcgttggctgtatatcgccgcggtctttatcggcccttatctgacggtggccgccgtgtggaccatcgctgatattttcaatgccctgatggctctccccaacattgtcgccctgctggcgttgtccggcgtggtagcaaaagagacccgcgcctatttccatcgggatctccaacaccgtcttctgcaccaaaagcattgatgccgcacacattccttggaaaaacagcccccatccggcagtgccggatgggggcttgcactttacagcgctttattcttccgtcttttgaatccctttgcgagtcagccagattttcataccctgcagtcccaggatcaccgcaccgcccagcaggaaaaacagagggcggaaagtgcccaacgccatcgccgcgcggggcggctccagcgtagtgggtcccaagaccacagaatagagtgatccaagcatcaaaccaacaatcaggaaaatcatctgcgcacggtaatgctccatcaaatagcgcagcagccggataatcaacgccacgccggcacatacgcccagcgcaaacgcgataacagtgggcagcgcagaaaaatcaaagcccatcactgcgcgcaccgcagtgattaccggcaaatacagccccatgatcagcaacagcgtagaaccggaaatcccaggcagcaccatggcggaaatggccacaaggccgccaaggaacacataaaccaggctccctacaccgctcaccgcaccgccggacacaggatgaacggaggacaccaccaccacaaagacgatacccgccaaaacaaagggcgaccatttccagcgccctcgcagcgtcattttttcctcatgcagtaccaatgggatggcaaacaggataaagccgatgaatacagaactgatagcataaatatggctttcaaacacacggctcagcgccaagatcgccaagcccatgccaatcacccagccaagccccaactggatcaggaatttcagcgccggacgccgaccctgcccgcttccgtggatcaggttgtccagcgaagaaagaaagcggtcgtaaaatcccagcaaaaaggcgatcgtaccgccggaaacaccgggcacactgtcggccagcgccatacagaatccccggaacatgttgatgaaaatcaaatctgcgtcctcctattcttgcccaaacagcggctcttggccgcgctgcgtacgctttagcgatcaatggttatcatacaggaaaaaattgtattctgtcaattgccatagtctttttttcacagtttttatacaattttaagaatcaatccgatcttccccggccaggaaaccgcagatcagctttctctgccgcgcagtgtttccaagcttctgcatgcgccaacgtgtccctgttccgctgcctgctcccacaaatgaaaggccgcctccttgtctctgggcacgccgtcaccgtaaaaacaacacacgccacggtaatactgggcctcggcattgcccagcgccgccgcccgttcccacagctgcagcgccgtgcgcaggtttttttcccgtccccggccgtaataatatccttcggccagccgggcaatcgcatctccgtcctctgaagccaacaccgccgccagcactttttcctcctgccgctttgccaccgccgtacgcctccctccgcatattctgccgtttttaaccgcctggtttgcgtttcttcactttaccatagcaacacccgttttgcaaggggctgcagccagcgcaggatctgcagactgctgcattccggtgtctgctggtcctcgcccgcgtgcaaaaaggccccggcagcctgagcgtcccaggctgccggagcctttcggtttatttatgatggacattccaaatcgtatcggcatactccgccaccgagcggtccgcagcaaaaataccactgcgggcaatattgtgcagcgacatccgattccagtgttctgcatcctgatacgctgccaccatgcgttgctccgcgtcacaataggcggcaaaatccgccaggagcatatactcgtccgccgcaccgtagcgattgtagagcagccgctcatacagctcctcaaaacagacgccgccaaaaccatcgcggatttgatccaccacacggcgcagcatctcgtcacgctgatagaacagcgacggatcataccctccgcgcttcatatccgccacctcgtcggcatgcaggccgaagaggaacatgttttcatcgcccagcacatcgtgaatctccacattggcgccatccaaagtcccgatggtcagtgctccattcatcatgaatttcatatttccggtgccggaggcctccttgccggcggtggaaatctgctgcgacacctccgctgcaggcatcagcctttccgccagagacacgcagtaattctccagaaacaccacctgcagcttgccgcggcacagcggatcgctgtcgatctgccgggccagcacattgatcaggcggataatatctttcgccaccttgtagccaggcgccgccttggcgccgaacaaatagacatgggggacaacatcccggttcggatcgtcgtgcagctgctgatagcgggcaatgatctgcatcacattgagcagctggcgcttatattcatgcaggcgcttaacctggacgtcgaaaataccgtccacatttaacaccacgccggagctgcgcttgacagcgcgtgcaaaagcctctttgttcccgcgcttgatgcttcccagacgcgcaagcacctgggcatccccggcatactgatccaatttctgcagctccataggatgcaggaggtaccgatccccaccggtcagatcacagatcagcccatgcaggccgggattgctctgagccagccagcggcggtgatcgatgccgttggtcacatttttgaattttgccggttccatctggcaggcttcgcggaacacatccgtgcgcaaaatctccgtgtgcagggccgacacgccgttgacagcactgccgccggcaatgcacaaattggccatgcgcacctcgccgccccataccaccgccattttctcggtgatggcgttgttgtgatggaaaaactcctccacgcttttctgatagcgcttgctgatttcgtcaatgatctgccagatgcggggcagcaggctttcgatcagcgtctggggccagcgttccagcgcctcggaaagtacggtatggttggtataggccacagaatttcgggtaatctcccaagcctcgtcccaggaatagccggcttcgtccatcaaaatgcgcatcaattcaggaatgaccatggccgggtgggtatcattgatctggatcacatttttttcatggaaattcttaagcgttccgtagacctccacatgcttgcgcaccagggactgcacggtggcggaaacaaagaaatactgctgcttcagacgcagggacttcccttccatatgctcgtcattgggatacagaatcttggtaatcgtctgtgccatggtctgttcttccgtggcgcggacatactggcccgaggaaaacagcgccatatccagcgtacggggcgaacgggcctcccacagccgcagggtattcacatggtcagtgccgtagccggcgatctccatatcacagggaatggcaatcacggtattgtaatcttcatgcaccacatgcagatggccgtcatgccacacttcgcgaagctttcctccgaagcgcacctcttcgcgctcttccggtttggcaatcagccatgctccacccactgctttccagtcgtcgggcagttccacctgctggccgtccacgatgcgctgtttaaaaatgccgagttcataacacaaagaatagccagtggccggaatccccagcgtggtcatagagtcgagatagcaggcagccaggcggcccaggccgccgtttccaagacccgcgtccggttccatttcaaaaatatccgcgctcttaaagcccatgttttcaatggcgccgttcatcgcctccagaacgcccagattataggcatttttcatcaggctgcggcccatcaaaaactccagagagagataatgcaccctgcgctcgtgggcacgctccacgcggtccatggtttctgcgccgtgcagcgccatcatatcccgcaggactaacgcgcaggctttgaacaaatattcctcgttgacatctttttctgaaataccgtaattgaggcgcagcttgccgcggatcgcctcttccatatcctgaactgtataaagttgctgcatgggaaaacgtcctttcctgttttgtttcaattccaatttatccaagggtgaaaaccaaaaaacgggacccccggaggggtcccccgtttttaaaacgccggaacattccgccgctgagcggcagagaaaggaaacgccctgttccggaaacagacgcttccgcaaccgtacacaacacctgcacgacaggcaggcccggaggacggctcactttgcggccagaaccctccctgcctttaacggatctgctcgtaaatctgatgatattcctttgcactgcctgcccagctgaaatcttcagtcatggcacgcttctgcagcacggcaaaggcttctttgttgtcccagaacaaacgcgcagcttcgcgcaccacataccacatatcaccggcattgtaattggcaaaggtaaagccgtttccgccgcagcaccattcctcatagggatgcactgtatctttcagcccgccggtctcgcggacaatcggcagcgtcccgtaacgcatggcaatcatctgactcaatccgcacggttcgctcttggacggcatcaggaacagatctgcgccagagtaaatccgcatggaggtcgcctcattgtattcgatccgggccgccaacatgccggggaagcggtattgtgcattgctgaaaaattcctcatactgccaatcgcctttgcccagcaccacaaactggatgccaagatccatcatgccgtccagcgtttcacagatcagatccaggcccttgtgggataccaagcggctgaccaccgccacaatgggaaaattcggatcctcccgcagccccatttcccgctgcagcgccgccttacatgcggccttaccggataggtcttccaccgagtaattctgcaccaggcagcgatccacggctgggttataacgatccatatcaatgccgttgaggacgccgtgaagcttccaatcgcacaaattcattacgccttccatcccgtgggcaaaataggcgtatttcagttcctgggcataggtcggactgacggtcgtcaccgcatctgcggtaagcagggcgcccttgagcagattcacatcaccggaaaaagccagcgtaccgccgtcaaaccagccgcagggaaggccgaaaagatcttccagcgtttcgcggccgtagcgcccctggtactcaatattatgcacggtaaacaccgttcgaatactgcgcagcacatcccagcgcacagcatcgtccgaaagatagatgggcaccagggccgtctgccagtcattgcagtgaatcacttccggcataaagtccagatgcgtcaacagtgacaccacagcacgggaaaaataagcaaagcgctccccgtcatcgtagtaaccgtagagatcgggccgggcaaaatagtgctcattatcgataaagtaataggtgacgccgctgcgctcgcagcggaaaaggccgcaatatacactgcgccaagccaaagtgacgtaaatatatttcacaaacgtcagctcttccacatatttatccgccacggtctgatacagcggcagaattaccgccacctcgtcgccaccggcagcaagcgcttggggcaggctgccggccacatcgcccaatccgccagtcttacaaaatggaacgcattcgctggttacgaataataccttcatcttttcctccgatccgatgtccagccgttccgccaccggaatggcggagcgcgccgggctgttttattatagcagttccttccgggagatacgagtgactttttttacaaaattccaacgttccagcgccatttcttcccttgtttcgatagccgccggaacaagatccacaccgtcttaaacgatgctgaacttggaaatggccagcggatagttgctgtgccccatcaacatgcggttttccgtaatcgtaacatttttgtcggcaatggcatatttcagcgtggcgccagcgcggatcactgtgtcctgcatcacgatgcagccacagacttttgcgcctttttccacacggacaccgcggaaaataatgctgtcctccacttgaccctcaataatgcagccgtcggataccagcgaattgacgcacgtgctgcctgggccataataggtggaggcatcgctgcggtctttggtgcggatgggccgctccggcaagaacagatccgcgcgcacttccgcgcgcaacagctccatactgcgtttatagtagttgtccacgctcatgatgcgggcggcatatccccggaacacataagcgtgcagtttgagccggttcttcatcccctgcagcacagcgcggtggaaactgtactcattgtgcccgtcgcattcggcaatcagctccagcaacagctttttactgatgatatacacttccagcgcatcgcagccgccccgcacctcgccgcggctgaccacatcggtgatcgtgccgtcttcgtccatcaaatagctggtggttttcccgtctccgccgggcgcacagacacaggtaatgtccgcgccggaacggatatgctcctccaacacatcccccagcggcatattacagatcagcgcaccgttggccagaaccacatattcctgccggatccgctgcacataactttcaatggcagccagcgcctccatcttaccgcggaactcccggctgggatcgatcttgggcaccgaaggcaacagacgcagcccgccgtgcttgcggctcagatcccagtccttgccggagccaagatgatccagcatactctgatacttatcctgcagaataatgcccacatcggtcacgccggcattgaccatattggagatggtaaagtccacaatgcggtagcgggccgcataggggatagaatctgccacacgctgctccaccagcgtctgcagtttcgggcatttgccgtaggcaaaaatgataccatgcatccgggtcattttctcagcacctccttgtgatcgctgtccagcattttgccaggggccacaacttccttttccgcaatccggcaaaacggcccgatcacagcaataccccaagcggacgggtcttccgccgtctccggcggtgcccctaccctggcatccggaccaatatgcgcgccctcgcccagaatagcatattccactgacgcgccgtcttcaatcaccgcgccgggcatcaccacgctgtagcgcacgctggcgcctttgcccactgtgacggaatgggctaccacagagttctccacacttccctcaatgatgctgccctgcgtgaccacgctgtggcttaccatggcccgcgcaccgagataggccggtgctttgcgcggcgtacgggcatagatcggccattcgctgtcgaatacatccaacccaccgttgcgggccagcatatccatattggcgtcccacagactgtccagcgtacccacatctttccagtatccggcaaagcggtacgccaccattttcttgccgtctcggagcatattgggaataatatttttcccgaaatcattctgggaatccgcgtctttctcgtcttcaaccaggtaatgccgcagctccttccaggagaagcagtaaatccccatagaagccaggttgctctttggttgggacggtttttcctcaaactcgacgatgccgtcttcttcatccacattcataataccgaaacggggcgcctcgtcccacggaacctccatcacggaaatggtgcaggccgccccgctttccttgtgtcggttgaccatttttgcatagtccattttataaatatggtcaccggacagaatcaccacatactccggctcatacaggtcaataaaaccaatgttctgatagatggcattggccgttcccttataccaggtaccctgatcgccctgggaaacatagggcggcaaaatatgtacgccgccgtcgctgccgtccagatcccatggctgtccgctgccgatatagctgttcagttccaggggctgatactgcgtcaacacacccaccgtatcaataccggaattgacacagttggacagaggaaaatcgataatgcggtattttccgccaaatggtatggccggctttgccactttgcccgtcagcacataaagccggctgccctggcccccagccaggagcatcgcaacaacctcttttttcatcgtctgccaatcctttcctgtcaatacttcttatccgcttgctcaggcgcgttctttagccgaagcctgcccggagcgtcttatgggcatatcctttgccggaattttcttcactgtgaccagcttctggtcaacggtcttattcttcggcatacgcaggtatccctctccccgcagcaccatgccggccatgggaggaatcgtgacctccacactgcagggatggccgtgggacggaatccattccgttcgcacccgcgcaggattgcctgcgccgctgcccccaaacgcgggatcatcggaattaaaaatttcaacatattcttttttctgtggcacgccgaagcggtaatggtgcagttccactggagaaaaattcaccgcacagaccacttctttaccttttttatcccgccgcaggaacaccaccacattattattgcagtcgtcggccacaatccattcaaagccttcccagtcaaaatccacttcccacagctctttggtgtccagataaaaatggttcgccgcttcgaaaaatgttttcagctttgcgtgcagaggctcattcagcaaggcccaatccaactggccttcataatgccattcattgatctggcccagctctgcacccataaagatcagttttttacccgggtgcatcagaatataagagtagaacgcccgcacaccggcagctttcagtgtttcatcgccgggcatctttcccatcagcgagcctttcatatgcaccacctcatcgtgggacataggaagcacaaaattctcagaaaaggcatacataaaggaaaacgtcacatcccgatgattgtcctttcggaaatagggatcgagcttgatgtaatgggtcatatcgttcatccagcccatattccatttcaaattgaatcccagcccgccggcgtccaccgggcgggacaccataggccaagccgtggattcctccgcgatcatcagcacatcgggattcgttcggaacgccatgcggttgagatcctgcaaaaaggcgatggcctccagattttctttgccgcctttgcggttgggcgtccactgaccgtccctgcggtcataatcgagatacagcatggacgccacagcatccactcgcagtccgtcaatatgatactgggtgatccagtactccgctgaggacagcaggaaagatttgacctccggcttttcataatcgaacacccgggtaccccagccgtagtgctcccattttttaggatccgcatactcataacagggcacaccgtcaaattcatacaggccgaatgcatccttgcagaaatgagccggcacccagtccagtaccacgccaatacctgcctgatggcactggtccacaaaatacataaaatccttgggcgtgccgtaacgtgaggtaggggcaaaataaccggtgcactggtagccccaggaggcgtccagcggatgctctgttaccggcagcagttcaacgtagttgtatcccagctccttcacataaggtaccagctgctcggccagatcccggtaactcagggaatcgccgttttcatagcgtttccaggaaccaagatgcacctcataagtgttcataggtgcttcgctgatcttgcgccggtgccgctgcgcccgaaacgcctgatcgtgccattcatacccccggatatcatagagtttggaagccgtgccgggccgcgtctcagcgtggaaggcatagggatccgccttcatgcggatctccccacccgggccggtgatggcgaacttgtaaagatcatactcctgcagccctggcacaaacccttcccaaatctcccgctcgacgatgctcatcgggtttttttcggcgtcccaatcattgaaatcgccgaccacggccacctttttcgcatggggcgcccacacgcggaacacataaccgtccgtactctcgcgctgtgccgcgtgcgcgccgaaaaactcatacccctgagccatggttccctcgtgaaacacatggctgttaaaggcgagactgtcttttcttcccatgtttatcagctccttgtcttttccacagagacaattctattctatagaacatttttcgaaa

SEQ ID NO: 3990 - DNA, 3617 bp, Unknown
  16S sequences of unknown bacteria
ggaacaccctctacgccgcagacgagcggatcgcggacggcactgagtgcgcggtggaagccggagagagcacgatatatctcagcaactcaaaggggctcaacctgtcgaaccatgtcggaaacactctcgcgtatatgttcgccgttatcgacgacggcaaggagaaggtcttcgattacgacatggacttcaataacatcgagaacttcgaccgcgaaaagctcgcgaagaaggtcgtcgacggcgcgaaggcaaagctcggcgcgggcgctgtcaagaccggaaagtacgacataatcttcgacacgagcgaggcttcaagcatcctctcaaccttcttcagcgtctttgtcgcggagaacgcgcagaaggggctgtcgctcctgaagggcaggaccggtgagaagatcgccgccgacagcgtgacgattgtcgacgatccgttctatcccggaaacacgatgcagattaatttcgacggcgagggcgtcccgaccagaacgaagaacgtcgtcgaggacggcacgcttaaaactctcctctacaatctctcgagcgcgaagaaggacggcgttcagtcgaccggaaacgcggcgagagtcggctcatcgatcagcacgaagccttatgtcttctacataaagcccggcgagacctcccgcgaggatctcttcgcgaaggtcggaaacggcatctatgtcaccgagatgaagggcttccacgccggagcgaacgccgtcacgggcgacttctcgatcgagagcgccggattcatgatcgaggacggcaagaagggcagaccggtcaaatccttcacggtcgcgggaaacttctttgagcttctgaagagcatcgacacgatcggaagcgagatcgacctcagacgtcccggatacacgaacatcgccgcgccggatatacttgtccgcggaatgtcggtcgccggtgaataaaggttttccgcaggcaaaaaaactccccgccggggagtttttttgcacctccggggtttgattgaaaattgacggacgatataatggttcaaggttacaaacagttcacataagtttgccgcggatattgcttttttggctgtatacgacatataatttgatgagatgattgacattttctccgtaatacgctataattgacttacacggctgccgcagttatcattcaggagaaacagaaaatgaacatagaaataacatccggcgcgctcactgtcgcgctcacccccgacgcgagacggctcgcgtctgtcagactcttcggaaaggaaactctcgctgaaaaacagagaccgcttctcgccgtcggactcagaggagaggacggaaagatcacacggctcgacaccgactcgaaaaagctcgacatctacatcggcgacgaaatcattgagtacaccttcgacctcggagtcagggtcttcctgaagcccgaagtctcggacggaaagattgtctggaacgcgaaagtctccggaatcaggggatacgccgtcgagtacattgagcttccgtcagtcgatttcgcgggcgcgctcgaggacaacggcggggacgcgtctgtcctctggccttacaatgagggggtgcttatcaccgactcgcgcgtcaggaaatcgtttgtggagccggaatacccgtctgacgcgagatatccgctcttcccgaacatcatgctgacccagttcatggcgtacatgacggcgggcaggggaatctacatggggctcgaggacccgtcccgcacgctcaaggcgctcgatttcagatgcgccatggaggacggcagctgggttaccggcttccgcacacgcgtctatcccggggcggagttcggcgaggacgcggcgcccgggttcggaattgtctggaaggcgttctccggcgactggatgaccgcggcggaaatataccgccggtggtttgaggagaaccttcccgcgggactgaaaaagctctcagaaacgccgttgcccgattggtatacgaaggatatgccgctcgtcgtcacatacccggtgcgtggaaggcacgacatggacataatggagccgaacacgctcttcccgtataataacgtcctgccgtacatcgatgagttcgcggaaaagaccgggatgaaaatcatggttctcctgatgcactgggagggcacggctccgtgggcgccgccgtatgtctggcctccgttcggcggagaggagatgttccatgacttcgcggaggagcttcatcgtcgcggcgaccttctcggagtatattgcagcgggttcgacttcacggcgaagtccaatctgaacgacttcgatatgcgggagaagatcgggaaagaggatctgaagcgcttcttctgtgccggtccggacggggaagtgcggatctgccgcatctgcaccggtcagcgctccggctacgatatctgtccggcgtgcgacggcggaaaggatattctcgacgaggcgctggagccgcttctgaaatccggcgtcgattatgttcaggtgctcgaccagaaccacggcggaaatatgtacctctgctattcccgtgagcacggacacccgccggttccgggaaaatggatgagcgaagccgtcaacaggctcctgtccggatggagaaggatggcgccggacgtgctccttggctgtgagtcggcggcgtcagaggcgttcatcgggaatctcaggctttccgacacgcgcttcgagttctgctacgactacggaaaagccgtgccggtctacagcttcatctatcacgagtacctgcacaatttcatgggcaaccagggaggaagcccgctcgagtggactaccgaggcgttcaattaccgcgcggcgtacgccttcctcgcgggcgacatgctgaccctcatcatcggcgataacggcgagctcatgtaccagtggggcgtgcgcgactattcgaagcatcccgaccgtgagagtgtcctcgggttctattcggagctcgcgaaggtatatcgtgagtacccggagattttcggcggttcgaagattctccgcgcgccggaatacacctgtgacgacttcacgataaggtgcgggaaccgggacatggtcgtgcccgccgtgcccgcgtcgtcctactcgaccgggaagggaatccgcacggtcttcgtgaacttcaccgattcggagcgcgcggtgacgctcgacggcgagaccttcacgatgccgccgagatcggttaaggttatctgacaaaaaaacgctccgatgaacgattgattcatcggggcgttttcatcaatttcacctttcagacaaacaggcaaagcgctttcagcagcactgtaacgaaaagtgtattttatcgaattttctcgccgcgagatcgtcttttctgatatagaaataaagcatgccgcaatcgccgaacatcaattcaaaaccgcctttcgtaacggtagaaagctgaagaagcagcatccaatcgcccgcgtgcttttcgatatccgctttcacttcatccggcgtattttcgtagctttccgcatcgccgcaataaagtccgcggctcacccgttcgcattcggtaagtatctcgccctgtattgtatcggcatatccgaga

SEQ ID NO: 3991 - DNA, 13555 bp, Unknown
  16S sequences of unknown bacteria
cccggggccgggcgccctcccgggcaccctccccgtccggaccgcgccgcgtcatgtgacccgcggcgcgtcttctcttggctttgaaaaaagaataggttctatctgggattcaatggaatcgactctcccccgcgccctcgcgggcgccggggtcccttaccatcttgtatttggcttggtctaagtaatgaatgaatgaatgtatgccatccgtatttctcgtcccctgccccgcgcctctcgcgcggtgcagcgtccggttttcaaggttccgcgcggccccgccggggccgccccgccttccgtccggggcaggcgccccgtccagcggcgaggaagtaatttaccctcatgggcgccccctgtcaaggaaaacgggggattttttcggaaaaaattttccagggcaaaaaagaaaggatgccggcatacgtgccgacaccccttcctcatgtggccagccttcttgagaagacggctgtattaaggcgttgacctgcggtttagtcctcagagtcgctgttgagccacgggaacatggcgcggatcttggcaccgacggtctcgatttcgtgggtgttaatcttctcgcgctcttccagaagcttcttatggccgttgttgcagtcgtcgacaaattcctgcgcgaagctgccatcctggatgcgcttgaggatctccttcatggcctcacgggacttgtcgttgatgaccttcgggcccgcatagtactcgccatactccgcagtgttggagatggagtagttcatgaagtggatgcccttctcgtacatcaggtcgacgatcatcttcatctcgtgatagcactcgaagtaagccagctcgggcgggtagccagcctcggtcagggtctcgaaaccggccttgacgagctcgaccaggccgccgcagagaactgcctgctcaccgaagaggtcctcttcggtctcttcggcgaaggttgccttgatgatgccagagcggccgccgcccaggccccatgcataggagagagccagctcgaatgcgtcgcccgtagcgtcctgcgccacgcatgcgaggtccggcacaccggaaccctcggtgaactgacggcggacgatgtgacccgggcccttgggagcaaccatgatgacgttgacgtcctcgggagccttgatgtagccgtagtggatgttgaagccatgtgcgaacgccagggtatcgccggacttcagatgcggagcgatctggtctgcgtaggtctttgcctgcagctcatcgggaaccaggatcatgatgaggtcggcctcttcggcggcttcctcggtggtcatgaccttgaggcccgcgtcctcggccttcttccaggacttggagccctcgcgcaggccgacgcgcacgtcgacaccgctgtcggcaaggttcagcgcatgggcatggccctgagagccgtagcctatgattgcgaccttcttgctcttgatcaggtcgggattgcaatccttgtcgtagtaaatcgtcactgccatggtacttagatcctttcgttaggctgccggttccttatgccggcgtatcgcctgtgtaaccttctatgtcaacgctcctcgttgccatacgattcgcgggattgcctgatatcgaaatgcctgtgcagatcttttcctttagctgttggaagagccgcgggagattgcgatcttgcccgagcggatgatctccttgatgccgtaggcacgcaggagcttttccatcgcgtcgatcttgtcgtcggtacccgtcacctcgatggtgaggctgctcgacgcgacgtcgacgatgcgcgcgcggaagatcgaggcaagctcgacgatttctccgcggcgggcgggatcgcagttgaccttgaagagcacgagctcgcggtcgatgtggtcgacctcggtcaggtcgttgaccttgtagacgttgatgagcttgtgcagttgcttggtcacctgctcgacgattacctcgtcggcatcgacgaccatggtgacgcggcttctggtggagtcttcggtatggctgactgccagagactcgatgttgaaaccgcgacgggcgatgaggccgcagacgcgggtgaggacacccggctggttgtcgaccaggacagaaatcgtgcgcgacatgcctactttcccttcttctcgactggatggccggactcgtcgagcttgacgacgccgatctggccggtcagcgtgccgccggcgggaaccatcgggaacacgttctcgtcgtcggggatgatgacctcgagcagggcggggccttcctgggaaagccacttctccatggcgccctcgagctgcgcggggtcggatacgctgtctccgtaccagtggtacgcctgtgcgagcttcacgaaatcggggttgcccgtgaagacggtctggctgtagcgcttgctgtagaagaggtcttgccactggtggaccatgccgagcgtgctgttgttgagcagcagcaccttgacgggggtacccgcctcgtaggccgttgccatctcctggatgttcatctgcagcgagccgtcacccgcgacgcagacgacgaggctgtcggggcagccctcctgcgcgccgatggccgcggggaacccgaaccccatcgttccggccccgcccgaagagaggaacgtgcgcggacgcgtgcagtgcaggtactgagcagcccacatctgatgctgaccgacttcggtcgtgaagatggtgtctttgtccttcgtgagcttgtcgagcagctcgagcgcgtactccggctggatggcgtcgtcgcgcttctcgtagtagaacgggctctcgcggcgaatcgcgtcgatctttgcgacccattccgcatcgaccggctgcgcctggtctttgtggagttgctcgttgatggctgcgagcacgagcttggcatcgccgacgacggggatgtccgcattgcggttcttgccgatttcggccgggtcgatgtcgacgtggatgaccttggcgtcgggcgcgaaggcagacaggcgccccgtgacgcggtcggcaaagcgcgtgccgacggcgaagatgaggtcgctgttctgcagtgcggcgttggcggcgcgggaaccgtgcatgccaggcatgccgaggcacagcggattgtcctcgggcatgcagctcttgccgataagactcacgacaaccgggatctgcagcgtctcggcaaggtcgagcagctctgcgctcgcgttgcccgacaggatgccgccgcccgcgtagacgatggggcgctcggccttctcgagggcgcgcaccgcagacttgacctgcttgctgttgcccttgtaggtgggcttatacgactcgagcttgacctcttcggggaagtggtacgggacgttttgcgccttggacacgttgcccggaacgtcgatgacgacggggccaggcctgccggtcgaggcgatgtagtacgcctcggcgatgatttccggcaggtctttggggtcgtggaccaggtagctgtgcttgacgatgggcatcgtgatgcccgtcatgtccgactcctggaacgcatcgctgcccagcgagctcgtcgcgacctgccctgtgatgaccaccatggggatggaatccatgtaggcggtagagatgcccgtgaccgtgttggtggcaccggggccggaggtcacgatgaccgtgccgaccttgcccgtcgcgcgggcatagccatcggccgcatgcgcggcgccctgctcgtgccgcacgaggatgtggtgcagcttcttgctgtcgtacagcgcgttgtagatgtcgattgcctggcctccgggatacccgaagatcgtgtcgacgccgacatcctcgagcgccttgatgaggcactgcgcgccggtcatcttctgtgcttctgtggctgtcactggagtattgcccccttgtctgcagacgtcacgagcttggcatagcgtgccagaacgcccgtcttgtacttggattccggagccttccacgccgcacggcgcttcgcgagctcttcgtcgctcacatggaggttgacctcgccgccctcgatgtcgaccgtgatccggtcgccttcctcgatgagggcgatggggccgccagctgcagcctcggggctcacatgcccgacgcacgggcccttggacgcgccgctgaagcggccgtcggtgatgagggcgacggtcttggcaagccccatgccgacgacgtttgccgtcggggcgagcatctcgcgcatgcccggtccgccggacgggccctcgtagcggatgacgatgacatcgccatcgacgatctttccgccgaggattgccgcgcaggcgtcctgctcgttgtcgaagacgcgcgcggggccggtgatgcacatggctgccggatcgacggcgctgcgcttgacgacggcgccgttgggagcgaggttgccgaacatgaccttcaggccgccctgctggtcgtacgccgtctctttggtgcggacgatatcgccatcggggtcggggcagcggtcgagccattcctgtaagtcgccgtggcaggtggtggcgctcatgtcgagcgcgccgatacgggcgagctccttcatgatggtgccgacgccgcccacggcgttgaggtcctcgatgtgcatgggaccagctggcgcaatgcgcgtgaggttgggggtcttttcgcagacatcaacccaatcgtgcatgtcgatggggtgctctgccgtcgcggcgatggccgtgaggtgcagcatcgtgttggtggagccgccgaaggccatgtcgagcgccatgccgttgtggatggcggcaggagtgacgatgtctttgatcttgaggtccctcttgaccaggtcgacgacgcgcatgcccgcgcgctttgcaaggcggtcgcggtcggcgtacacagcggggatggtgccattgcccggaagcgcgatgcccagagcctcggccaggcagcagatggaattggcggtgaacatgccggagcagctgccgcagcccgggcacgccgtgtgctcgtaccaatcgcaatcctctgccgtcatagtgcccctggtgacctgcccaaccgcgtcgaacagcgtgttgaggtccgtctcggtcttgcggtcgcggtcgcggccggcgagcattgggccgccggagacgagtaccgtggggaggttgacgcgcagggcgcccatgatcatgcccgggacgatcttgtcgcaggaggggataagcacgacgccgtcgaaggcatggccctggaccgcgcactcgacgctgtccgcgatgacctcgcggctcgtcagggagtacttcatgccctcgtggttcatggcgatgccgtcgcatacgccgatggtgccgaactgcatggggatgccaccggccatgtagatgccggccttcacgtcgttgacgaggcgctggagatgattatgtccagggataatatctgcctgggaggagatgatggcgatgagcggcttgtcgctcttgagttcttcgtccgtcatgccgtctgcatacagcaggctgcgatgcggggcgcgctcgagcccttttctgatctgatcgcttcgcatttgcagcaaccctacctttccgtcttcgcgctggatgcactcgggaaactgtgtagggcgcattgggaagaactcccagggtgctgtagtggtacagctgcggccttgcggctgcgtttcatgcgtccagattgcggttacccaaccgatccagcttactgaccgtacgtgagtgcgaagatcgtccgcaaacccgcacgatgttgtgctgaactgctcgggggtggctttcaggtcgtccgacaccggctctcagcatgtgcaccggctctctgtgggagggattggcccttactgttccccgtcaacgcagatctgcttttcaaagtggcgctcagtatacgcttacggatatcgatgtgaagaggttaatggattatttttcgccgacatgaaagcgttgcttttttggcgcgcgtctacagcacgccaagctcgttgagagcgagcatgatgccggcgacgccgaggaagccggcaaagatgaaacgcaaggtcctttcggggattttggggacgatctttgcgcccaaatacgcacctggaatcgcgccgacgcacagcatgatacccgcgagaaaatcgacgtgaccgagcacgatctgctcgatgacgccgggaatggcgaggatgatgatggcgatgagcgaggtgcccgacgcgcggtgcatcggaacgccgagccacgaggtcatgagcggcaccatgatgaagccaccgcccacgccgacatagcccgaagcgaggcctgcgacaagcccgatgccgacgccgccggcaatctttttgcccgtgagcgcgaactcctcctctgccagcgacgtgggctcgatgtgatgcatctgcacctcggcatcggcctttgcggcggcacgcgccgccttttccttcttgtcgctgggcagacgcagcgccttgcgcagcatgttgaacgcggaatagaggatgatcaccgccgcgaccaccatgatcgcccatgcgggagaaatcgaaccgaggtacacacctatcgaggaagtggcagcgccaccgagaccgagcgcgaggccgagcttgggatagcaggtctttgcgcgcaggtgcgagatcatgcccgaaagcgaggtgggaatgatggcgaagagcgaggtcgccgttgccatataggcgtccaggccgaatacgaggcgcagcagcggaaccatgaccgtgcccccgccgatgccgagcatgccggacagcacaccgatgaagatgcccgcgaccgcaaggccgatgaatgttcccagtagctccatggcacagatgatagccatttctttgtgcctcatgaagaataatcacatgtcttcttgctgtcggcgccgtacggtgggcggagcatgtgaagcaaatgtgaacgaaactgcatgattttcgcgtttgcgctaaagttctaaccccacagcaatacacgcagctaacaagaggacaacattgcttaggaaatttgcacagacggcccttgcgacgggatgcgcattggcgcttggtctcggcgccgctccggcagtgaccgccacccccgcatcggcgccctctctggtccagactgcggcagctgacgaggtctccgacctggagcagaaggtcaaggagagcgccgacgcgtacaacagcgccgtctcgcgccaggaggagctgcaaggccagatcgacgacctcaactcgaaaatcgccgacttggaagacaagctgcccgcgcaaaaggagcgcagcaacaccagctacaaggcgctctacaaataccagtccgacacggcgagcgtcgtcatgatgctcctgaacagcagctccatcaccgacatgctgtcgatggttgattcctacaactgggtcatcgagtacaacacgggcgaaattaagaagaccatcaccatggaaaacgacctggaaaactccaagtcgcaggtagaagcggacaaagcagacgctgacgctgccgcaaacgacgcgtacaactcgctgcagcaagcgcagcaggcacgccaggaggccgccgagcgcgccgcagccgcacaagccgccgagcaggccgccaaagaggcagagattgccgcgagcacgacgatgacgagcgaggagaaaagcacggcgaccgagcaggtcgcgcagacctccagcaccacgagctcgagcaacgtcggctggactgatgacaagaccgccttcatcaacaagtgggccccgcgcatcgacgcctatctctccggttcccccactgcgggcaccggcaagtactatgcagaagccgcatggaacaacggcgtggacccgcgctgggcgccggccatctcgatgatcgagagcacgaagggcgccgcctgcttccgctcccacaacgcctggggctttggcagcagcgggtactcatcatggcaagaggggatcaacgccgtcgtctcgacgctgggaagctcgatgtacggtgggtacctcacccgcgacgcggcggccaagtactgtccgcccacagcagacgagtggtacaacaacgtgtccgcccagatggccatgatctaggagcaggcagcaaacacgctgctcatatgcaataagactgagggggccggtttccaggtggaaccggccccctctacgtgcgtctgggttgccttgtgggctatgcgttttccttctcgaacttgcccatgaagtcgacgagcgcctcgacgccctcgatgggcatcgcgttgtagatgctcgcgcgcatgccgccgacgctgcgatggcccttgatgttggcaaagcccgcatcggttgccgccgcgatgaacttcttgtccatctcgtcatcgcccgtcacgaacggcacgttcatgagcgagcgcgcctcggggacgacggtgcccttgaacagtttgctctggtcgaggaagtcgtagagaatcttcgccttcttctcgttgcgcgccttgatggcctcgaggccgcccagttgcttgagccacttgaacacgaggccgcagatgtagatgccgtagcacggtggtgtgttgtagagcgagcccttgtcggcatgggtcttgaagcgcagcatggtcggcacgcccggcaggtcttcggggatgaggtcttcgcggacgatgacgatctgcacgcccgcagggccgacgtttttctgcacgccggcatgaatcaggccgtacttggtcacatcgaccggctcggacaggaacatcgagctctggtcggcaacgagcacgtgccccttggtgttgggcagcgtcgagatcctgttgccgtggacggtctcgttttggcagatatagacgtagctcgcgtcgtcgcggatgtccagatcggacaggtcggggatgtagctgaagttcttgtcctcgccgctcgccacgatcttggggtcgccgaggatctgggcctccttgtaggccttcttagaccagttgccagtgacgatgtagtccgccttgccgttggtggcgaggttcatgaacaccgtggcaaacagcaggctgtcgccgccttggaggaacaggaccttatagttgtccggaatccccatgagctcgcgcagatcggcctcggcggtctggatgatgtcggtgaaggcggcagatcgatggctcatctccatgacggacatgccggtatcctgatactccagcatctcgtcagctgcttgcttcagcactggctcgggcaaaacggccgggccggcggagaaattgtaaactcgtgccatcgttggttcccttctcatcaccttgaattctcaacgccttgtggcgatgtggactcagatgataatacaagtctactaatttaggggaatttaaaacctacctttttggtctccgatagcggcgagcatctcgaactgttcgtcgcacaacattatttttcctgcacgcatgccccaagaaaaagcgggtccggtttcccggacccgccacattcgtgtatgtacggctggcctatgccttgacgaccggcttgatgatgccgtaaccaccgttcttgcgatggtagatgacctggatctgatgggtgtcctggtcgaagtagacatagaagtcatggccgagcaggtcggtctggacgagcgcatgctcttcggtcatcggctccatctcgatttccttggtgcgcacgagcaggtcgtcctcttcgtcctcggggatgaagtcgggcagctcgtcgagcggggcctcgaccttgcggatggtcttctcgccgcgacggtcgacgaccttggtcttgtacttgcgcagctggcgcgtgaccttgtccgaggcaatgtcgattgccgcgtacatgtcggtgtcagcctcggcgacgcggatgacggcgccgatggcgcgcaccgttacctcgcagaccgcgctcttggggttggccgggttcttttcagcgcgaaggataacctcggcgtccatggtggcgcggtcgaagacctcgagtgcacgcccgattttctcgtcaacgtaatccttcagtgcaggggtaacgcttgttccacgtccggttactgtgatagccatgatgaacctccttgttcgaaaggactttggtcggatagtgccgacacgcgacgctgcgtctagtcgcctccccccgaagcaccagacgaggtctgagtgtcgcgcgtatcatcgcccgtagagctcccgctcgtcgacgacgtgctgctcgccgtgggggtctgagcagtggtctccaccccaaacgacgtcgacggaagcttggagatatctacttggccgggcagcagcgtcgaagcgtcgcttccgagccatttggccatgatcacacgcaaaacgccgttttgcgtgatggtgtcgatagcttgcgataccttgctcgacacctccgagttgctggtaagcgtgacggcatagataggagccaccgcgtttgagctcaggaagccgacgcgcactgcgtcgctgtagttgcgtgcgaagtaatcgccgatgacggcatctgcgacgaggaacttctgatcgccgcgctcgagcgcctcgaaggcctcttgcattgtggagcaggcctggatggaatcggaccccagcgcctcttgcacttcgtaggctgctgccgtctcgccctgcacgatgaccttgccatcgcccagagcctctttgaacccggagagggtcgacggcttgttcttggacagacagtacagcgacgcgccgtcgttgatgtaggcggacgtgtagctgacctggtcgctgttgcccgatttggtaaggcccatcgcaacgtcgaccttcttgttggcaagtgccgagcggccgttggagttcacgtcgacaatctggagcttcatgccgagctcgtcggcaatcgccgccgccacgtcaacgtcgaggcctaccgtctcgttgctggagttcgtgccaccataaggcgagttagatgcgttgatgccgacggtaagcgtgccatcggtaatggtggtgccgctttcgagctgtggcgtcaggtccgattcgggaggctgagagccaaactggcaacccgtcaggccagacaacacgaccatggcacacgccacggccacaatcactgcgagcatgctttttttcttcgttacagcttcgaacatagcacctcggatgctctcgtcagcggataagcgttcctcctgactgacctggtttttgaccccacactcgcatacggagggtttcgcttgatgctatctcactactaaccttctcgcccgggacaccctatgtgtccataacggacggtacgtcttacccctaagatgcgccatgctcgcgtggccccggagggccgcgtttacgtggatcctttcgaccgcatctgccttggacttggtttgccgccttttggccgctcccctcaaccacagacccaggaggaacaaactaaagtttagcacacgctatccgcgtttaagcaggtagcagcgatgtactttggggtttctctcaaagtcagaaggaatggtcttgtccgagatatcgcggatgatgacgcccgccttggcgagggtttccacgtcgggtttgaacttgcgcaggttacacgagaagaccgccacgccctcgcgcgtgagcagacggctcacgccgatgagcagttctgcatggtcgcgctggacgtcccaatcccgcgtccccatcttgctggagttggaaaacgtgggcgggtcgacgaagatgaggtcccagcgctccttgctgtggcgcttttcctgaacccaggcgagcacgtcggcgcggacgaactcctggtgccggtcgagtaggcggttgagcttcatattgcgcatggcccattgctggtaggtgttggagatatccaccgtcgtcgtaaacttggcctgacctgccgcggcatagacgcttgccgtgcccgtgtaggcgaacaggttgaggaagctcttgcccttggcgagcatgcgcagcagcacgcgggtgttgcggtggtcgaggaacagccccgtgtccaggtaatcggcaaggtcgacctcgaacagcagcccgttttccttcgtgataaggcgcccggcgcggcttttcgagccctcttcgcccaagcccgccgtgccggaatactgcgatccgcccttggcgcgcacgcggcgcttgaggtagacgtccttggggtcgacctcgaacacgacagggatgatgcgcagcgcatcggcgatgcgacgcgaggcctttgccgcgtcgatatcgcgcggggcggcgtattccgcgacgtggacgaggcgcttgcccttgtccgggcccgcgccgcagtacaggtcgatggccatgttgtagtcgggcaggtccgcatcgtagacgcggtacgcgtatacctgctccttcgccgcccatttgcggcgctgcttgtagaccttgttcaagcgcgaggcaaactgctgggcggcggcatcgctcacggcgatctgggtatcgcggaccttgaccgtcgcgtcgagcgcgttgagctcgccttttaggtcgtacatcctgaagctttcctcggcgcgcccgttcatcacgtcgagcgtcgtggaagcctccatgcccagatgggcgtcgagaccaccatcgtcggagagcagcgcgagcgtgcccacgcaggcgtcggagcgcgcggcgtcgaggatgcgcgcgtacagcaggggcagctgggcgagcaccgcatgctcgatgctcggcaggttgcacatgagaagaccggcgcctctcgcgccgaggctctcgagcgtcggggcgtcttctttcgacgtgtcgacaaaggtgatgcaatctgccacggaggcacggcgtgcgcaggcgcgggcgtactcgagcgccgcggcatccgcatcacacgcgatgatgggaaggacatgccccctgccctggtcgctttcgtaatccgcccggtcgagcaggtcatcccacatgccggggttgtgctccgcgatcccctcgaagccccagtgcgcgcgcatgatgccgggcgcgatgcgcgcgctcatcatggccgcctcgatggcgagcgtcccgctcgcacacagcggattcaccagaccgcaaggaccgtcttcgcggccccagcctgccgccatgagcatcgccgccgccaggttctcgtggagcggcgcaccgtgcggcttgcccggcgcacggtaaccgcgctgctcgagggcagcgcccgaaaggtcgatggagaccgtcgccttctcgttgcggacgtttatgctgatgcgcacgtcgggagacacggtgtcgacatcagggcgttcgccgcgcagcgcgcgcaggcggtcgcatagcgcgtctttcgcgcgcagtgccgtaaagcgcgtgtcgcgcaagttcgcgttggtgccgcgggcggaaaacgcgatggtcttgccaagcgggatgtggtcttcccaggcgatgcgcctcacgtcctcgtagagggagtcggcggaatgggcatcgacgcgcgcgaccgtcatgagcacgcggctggcgatgcgcgaccacaggcacgcgaggtaggcgtccctcatgtc

SEQ ID NO: 3992 - DNA, 32759 bp, Unknown
  16S sequences of unknown bacteria
ttcttctcttatcccctctttcttcctcatcccactgagtttgacgaagagcgtaaaaacaaagacttttggaatgtaatattcgcaataaagctaaacgacaacggctttgatgacgcacagaatagttatctggaacattattttataaaaaaggctactgatttaggaatgtccactttggtcgagaataaacagatccccaaatgccccaaattgtcagctcctgcgctctcagacctacaacattatataaacactattgaaattttactttccactctcgggttgaaatgttttcaaattatggagaccaaatccgaatctgtatttgtatgcaaggacaagtacggaaatatcggcgaaggcgaatacctcgaagacggttttatgttatataaaggcgccaaatgcagcttggaactgcataaaggaacaaaatctctgccaatgcgggaagccctaatacaagacggaactttaaaaaagtccggagaccattacgtattgcagtctaataaaattttttcgtctgtatcgtcggcttcttctatcatccttgggcgacgttctaacggatggacggaatggaaagactctaaagggaaaactctcgacgaattaaaacgttagcgaaacttcttattagaaagatgtgtaaattaatgttcgattctctgtggggtcattattttttgcttatcatgttggtgccttagacatgttatttttgccataagcttaatttcgtaagttcctgatattttagctaaattttcaaaattcgacttggtgtcttggcatttttagctgtaaaaatttcgaatgctaaaaggtttttctgtttaggagtgaatattcagctatttctcctattatgtcatagatttatctgttcatgcatgaagcagtattttttctattttaatataaaactcaaatattagataaatcaatatgctctgacgaattacaacaaaagaaatctaaatcgtacttccctgcgtatgaacaaataggcaaatagggagatagaatccaaatgattagtgggtaaaaagaaaataggtatttagagcaaataagtaaataagttccatacattcaactgatggtagataaaccttacttttcccataccaatttgttcaaaatggtatatctataaatgtgttgagggatcgatttgtctaaatagctatttgtcctatttacctattttccctattttgctttttatatgaggccgaagatcccaagtagattagctaagtgcgcttttatgcctataaggagcgtcaattctgccagttcctaattttgtatttatcttatttgtatattattttgccttctttagggatttttcgccgaagccctcttagaagggcaaggcgagaaaaatccctaaggcaaaataaagactaatagatttgttgtaatgtagggagcactatgatgttcccgaaggggaaagtagaaatgagtgcccacttttgttcatttatgtcagagcaaatattgttccaatgcagatatagtaagtgagtcgagagatagattttattatcgctaaatagacagggggggctgaaaggaatctattaaccaacaacatacggcaggaacgttcggcagacccgtttctccttgcgagtatatttttttaaatgtcccattttttctattcaaacttcacccaatcactgtaaaatagcgtacttgcggacattctttatatcaggggaacgcgtaaaaatgtcccatttaattaaatattttaagtatatgttatggagaagatcttaatatattttcttggatttgagtttagctcagaagcgggagggaaagttcacctacgcttactttgtccaaattcgtttttgggagaggatattgcgtagctagtttatttgtatacaataggcaatagcctttacgttcaactaatgtatgtatttcttttcttgtgtaacgttccaacacatatttgtggctgttgataaacgatcttcggacgatcttagtatgtttatttacgaatcaaaacattgtcagatattgttcgctattctatataactacttaaaggacataaagttcaaagactcagcattgctgagtatatagctttattatgggctgtgagcaaagctattttataaggtcaatatttgctatatatttaggaaggcatttttgcacaagtgttatttgatcatctctaaaattgtggaggattatcttaaagctacgattgacagagtcacatctaattataaaaaagcttcgctagaatctaaagtaggtatgtatctgagacataatgcgacttatatcattgaaatcggtatacctaaggcttggattatgtcttttgcgatttaagggctttacatatgttaataaatatgtttttttgtgctaagttagtaaacacaacttcttctttgtttcatagatttattcttatgcaaaacttctattgacatagtttaagtacattgtctaattctttctttgtactgaatagtaggttccgactttattttaatgttacattttaatattctaatatggatcagaatcaaataaaatccatttttgaggaatatctaactggggatatatccacgcaagctttattgtttaatggagattgggggtcggggaaaacatatttttgggagcaaactcttcaaggaatggtaaaaaattttaatttaaagccaataaggatatcgctaagtggagtagattctattcaggtattagaagagaagatagtgaaaaaaatattagcttctacattagaagagataaatggacaaaaaaatgctaaatttttgaatttgtttaaatcattaggtaaaatagtatctgatgcaacaaaaagcaaactaggcgttaatataagtgaatttcttatagcgaatataatagaattacatgattattcaaaagatgttatatgttttgatgatcttgaacgttgttcgttacccataaaagatatcatgggatatataggtgactggattgaaatacgtaaatcaaaagtcgtaattttagcgaacgaaaacgaaataggatatggtcaagaaaacattaatgaaataagggaaatatatcaaaagataaaagaaaaggttgtgagcatttcttttgattttgaacaagatatttcggacatattttcttctttgtcaccgcatatcgataaaaaaatattcaatgaaaaagaatatctaataaatttatgccaaaagctcaaaattaacaatataagaactcttatacaattttttaagttatctagaaatgttgtttgtaatcttagtgaaaagcattgtgtacagctaaaaagtatattaacgtttatattatttatattaaatgaggtgcgcagcggttttatttcttccaaaaacatagaagaagtttttgaactgagaagtattgataaaatacaactctatatctcattgtcgaaatctaagaacagtgataataaaaataagaaaagttatggggaacgattttacgaaaaatatttaaaaggcgtggattgcgatttctatttttattcgtctttactaaaatatattctttctggtttttttgataaagaaacttttaaaaccgaaattttgcagcgtgagaaagagggagttttaccagaatatataatgttgaatgcattttatcgtaaacatttttcagaatttgaggagtcagatttcaagtcaatgataaaagaactattcaaatttgcgtataaaggagtttacaaattagatgattattattcaatcgcgaagcttttatttgagttaaataatctcaaaatgatcgattattctcctcaacaaattctttctatgtgtcagaaaggaatttcattagctaagaaaaattatagagatgtctttaatgataatgattcattcatctttagatcagcgcctgaaagttcagaggtaacgcaagtttatgaaatgataaataaagcaaaaaatgatagaaaggttgatttgctcaagacaattgcatgtgaatttataaatatgctttcagacaattcatatacggaaagacagtttaaggaatttgtttctaataatttatatactaatttcataatatacatagataaagtaaattttgctcgtattttgcgcaaaactacaaatgcgaaaatcaatttaatatattgtttccttgatgaacgatataaaattcctcaaaatctaaaagcgctaaaagatgaattaacttgggtaaaatgtacatgcaaaaaggtggaagaagttcttaagaaaattggcaaaaagaatgtcgttagaatatacaatttaaatttccttatagcaacaatgaagagaattaacgacgattgtagtaatgatcctacattaaatatttcttaagataagttataccttttaggttaatatgggtaatagtcatgaaaaatagatgtattccataagatattttcgctgaaaatagagacaatatcgggaacaattatattaatacaacactgtgaactgttgaaacgagtgtgatcagctataagaatcgcactgagaattcaagctaacgattctaggattcttcaaaattgtaattttttagtcctaattgatttgagttctcttttactgtgcgcacgactgcttcactaaaaccgtttggagattccgcctctatatcaatagttatctttacgttagattccttttcaagatgtgcaattatgttctcaattatctgagcacactccattcctccacgccttgtatcaagttctttttgcccaaaaaacctgtgcgattttggagtatctgtcgctgtagaggatcccttagcaccttgcttgggagtagaaactcccgatggcgtattatcgtccccagcagaaactccattgccaaccaatttcttatctagttgctcctggtaagagttcgcagcatcaacagatatcaatattccagattcatcataaaagattcccgtattcgtcccgaatttaaaatccacatactgatcgccattcttgtctgctgcgtatgcgaagtattccttagaggaaattccttgttcaatggttctgagaaatacatctacatcctttatacggggcaaatataaatattttgccaaatcttcccaaagtgtctttatccttacttcgctgctaccatttttaaaatagaatttttcaagcactttttttagcattatgggagaccactgccttacaacatcttgattatttagtaagacttgttcggctgcggatgaaatatttgaccccaaagcagatacttttctttcaataaatgaaatctttcttggagcagattctgacggaataagaaatggcaatatccgtctattatggcacgtttcatgacttcttcactttttattgagaagtcttttacttgccttacttgttgcgtgcctaaattcattcttccgctttcaatgtcggagcttatgtcgcgccacgcatgcaatgttctcgcgcagtcacagagtcgcgacgcagaattaaaatcaagagctaaaaataaaagcctatttctatacgagcggggttgatctcctcgctgttccattacaatctcaagctgtttgaatagttcgcttgtattattcttttgatacaaataactcccattggcaggaaggattacaagagtaggtcctcttccaattacgtcgggaatatctccaatatttgtaagaggatgaattccttcgaaaaatccacccgatacgggcgatgctgccacgacatatttctttattagagccaagacatcgctatcgttaaggcgttcttttcgactctccatttctcgccttaaattcggtcttgtgtcaaaccagaagtattctcgtttgtcatcgcagaagagataatgtagcttatcgcttaaatggtctagagcatccttatatttggtaagatcatctcccggttgagcgcacgcaagcaatatgtgttccctatctatgcccctaactgctgtctggagaatggaaatcgaatcagacattggcgctgtggcaaagaaaatagaccttgcaactctgcatgccgctctgacactgccgaatcttggattttgaccgtcaattattctgaccgccacagaatcaggcccatcaatttcacctgttacaataggatcccagccattgggcaaatactttaggcattttgttctgacttccgggtctgaaaggagaacggatgcaggcattatcattgcgtctcgattgtccgaattccaaaggtgttggattaaaatagctaaaagctgcaagactccgcgcgtgcgttggaaattttgcagggttgaccaatctttatagagcctatcgaaaaactcgggatgaatagggtatgatttacgtagcctttccgaataagaattctctttagtctcgattgggaaatatgtctggtttgaatggtacatagcatcaaactctctgcaaaccgattccatttcgtgctcatcgcctattttttcaaacaaacgtcggcgcacgatttcaaaagattcatcggttgatacaggtttccatacgctttccaaacggccgaagtacttttccaaagtttcgagggcaagtttaccgaggttccctgcggcttccacgtccgaggaaggcagagttgccaaaagcatagcgttgggcacaatcttaacgctctctgtcaatatttgtatgaaggacatattggcgccgaatgatcccatattatgcggggtggactcatcaagctggcgatataacgccactaattcgtccattagaatcacacatggagaggcgttttttagaagctgaacaaatacttccttgcccggcgcagttcttgcaatatcgctttgtttcacaagctcatatccagctttgcctaagagttggtaggctatgtatccccatagcgtatttatttttatgccgtcgcgttcaataggctggtctgcagaaaaatcatttccgtctataacggcaatcttagcttgtggaagtgcatctacacccgcatctcccattatttcttttataccctttaagagcttaaagtctgttttgcatgttgccaagtgatagaccgccaatagtgtatgggttttacctccgccaaagtttgtttgcagctgaacaacagggtcgccatctttcccgcttgcgagccgtcttaaaaccgatacaagcaattggtgcataccggcagtaataaaagttcttgagaagaacatttcgggcttttgatatatttcaggggctgtaccctttagaacttccgatatatcggctgcaaattcggactgcttaagtgtgccggaaagcacgtcatggtgcggtaatgctatttctctccaggatttcattttaaaggctcaactcgtcttgttttggttttttgcttatatttgtaaattccatgctctttaattctatagagctccagcttgttattaacatattgtaatatctcgcgtcttcagcgttgcccgaacgctcgcaaagcgtgtaaagatgataggcaagctggcggattttctctgtaagaggcgccatttttgagagcaattctccggctcctgtttctccgttttgcacgagaactcttatcatatggtggcaggcttcccatgtaggcagattcttatcatcggtaggatcgtaatcttcgggataatctttccaatgaataagcgaaacttttcctccctttgaattgagaactccgctatctgatattcgggaaaccgacgttccctttgccctcgccaaagtgtctgcctcgccaaatggagactctccccaagtatgaattttaaaccattcattgcaaaatagggtttgcggatcgaaatcgcccatgtctgggtttaagtagtcggatatggatttatttatgagtatcattgcgtcgtggacactcatccgcgtgccgtcttggtttaagacagatttatactttgaaaatatctccatgcccggtcctattgcggcttgcgcaaggtcaaccggagctatcggagaagacactccatcaagacccaacatatctctaagagcttctggcatgacagcgtttaactcatttacaaaatcattgcggcttacttcctctgcgtcgtcatctctcttgcgacacactattacaattgaagatgcaagcgcgttagagcccattccgattaacctactattacattctgtatttagaggccatgttcctgtaattaaaagtcccgctcttattatagcctcaaggaaagtttcccaaccagtatttgaagtttgagaatctgaagtttccgaagccttaaacgcataataaattgtgacagggaatgccggatttgcactattagcaatatttcgcattgcaacagtcatcccatttaaaaagaaatctgcagcctctttttttgaatttccgtgtctataaggaacagctactaattcatcgtttttgggggtagatagagttgtaaatatatcgggatagaatccacataaatttctttttagccaaatataaaagaaatctgagagatcagcgtatcctatattatcataatatggagggtctgttgaaattactttatcaacagatatattttgtacctgtgcgttagcttgtgttgccacccctattttataattattttctatagaggagaatgagctggaaaatgctttagaatacatttttattatcgtattccaacttccagaggaatctgaaaggatgttagcttcagcaaaatcccaaatcattggaattgcttgtctcccaaacatctgtcttggacattgtgcaacattctcccatcggcataagtttgtattcagatctataactttatcaaaacaaaacgccagatatgtaatgatagcgtttgcgtattcttctttgtcgggataattgcattctgaaattattttctcccttacgttttttaataaatctgaaaacgtatttaacgccaataactgacgcttggtgaataaatctccaaaggttgtcagcccgtataaaggtgttttaaagtcccttgtattgcctggcaatgcagttgtcggaatccatgtttcagggattgtttttgcaatactttctgctatagacgtaggagataagtaaactctctcatttttcccttccgcaactattgccatcaagtgcgatgacatccttccagaagtaccttccgctcttacataatcgtatccaatcgggatatttgacattaagcaaaaaaatccctttcgtttacccatggtcgttccattttccaactctgcggggacctttcccatacgaaccttaaattcataagagttctcatgtattataggttcaacataggcttcatgcccctttttcttagatattgcaaagcttgaaacaaggggaacatcaacatcgctaaattgaggattcgggctttttacagtccttgcccaaagccaagcaatgacagtcagcttcttgccgagataaggcttaagatcagggcgctcattaaccatatcttccgttatctcaacaggaggataatatttccctatctttttatacgcctcttcgcgcatccacattccatatctgcggacatcctcggcaagacccctggcgccggtccattcattatctgtggaaatctgttctccaacaggaattggacccaccggcgcgcgattggcaaatttgggcggtatttcaatcatcgccttatttatgagaacagccacggggtttaagtcgctcgcgtaagattccaaccctaagcgctgagcctcaagaggtatagcgcctcctcccgcaaaaggatcgtgaaatgccggcagcttttccggatcaaacccagccttgcccttattgagcgcacaagtttgcctccaactcttccatatctcctccttcgcacggtttaacacggattcattatttgtattttcccactttacgaggtctcttattatggaaaacaattcttccctctcttctgcagcctgagcttttgtcttcccggacatatatccgcgctcaccgcccggatcgtttaccatctgcgcaaaaagtacagctcttgccgcggcaagagggcgcctcgcccaatacaaatgcaatgttgacggatgcccatgccttatcgatttctcgcgaatgcaagcctcatttatttcatcaagtggcaaggccacttctataagcttctttggcgcctttatcttcattattaaattcctacaaagtgttttctggagaaaccgaaactctcagcatgtccgcaagatcataatttatagataccgcatccgtttcaggttcttgtgaaaaatggttctttatgtaatagggcccttccgttttgtctccgtcaatcaatacaacagcaaggataaatttgtcgctctggttaacagcgtagcatatttcattccgcgtgagggtaattgttgaacatccctttaacctgccttttacttcaatatgcctgtttgacttaataatgccgccgtcgcaatgcggcgggcgagatgtaatatcccaaccgcatttttcaagagaaacatcttcaacttcaaaaccaagctccctttcctggttcatcacaacttccattgctttcttctcaaccaattcccgggccagcggatctgtacaatattctccagagccgcacattttatttacaagacctttcggaatcacaagcattccacccatgcatattggagcatcggaaacaatatttcttgccctttcaagttcctcgcgtctggcatttaaacgcccttcaagttcatctgccttggccttggcatttataggttgcattctcggctgcttcccggcccgaacctcgtcgtttaaaatggcatagcgattagaccaatagcgtatagcccgatttaaacggtcttcaaccgcagattttaccttgtccacaaattcttctcggcgcttctttacctcttgatagtgctcctttgccaaatgttcggcagcataacttactgcgacatcttcaagatctttgcttatccaagattgcttcaacacctcgtcggcaacctgcttgtattgttcagggaaaggcgatagatctaaatgaggagcataacctgcattcgtcactactccggttgttgacattctaacaaattcaattctttcagatacagatttatcgccaatactctctttgactctatgccgtatcataaatatcaaagacggctccaaccccaaatcgttttcatctaataaaatagttccgggcttcaaagtattcttgtattgcgataaaatacgatctattagagcaatcatcaaaggatgtcccggatgtacaaactcggccatgatggatgtacgccctggaatgcgaatatattttttatcaaaacaaattctttcgtactttttgcctacgggagtgcgcgtagttccaataattctgtcggccaaccgtatcgaagctggcacgttgggaatttcaaaccggccttcctcgcgcttgcgaatttgcccgccgagatgttcaaatgcatttcggaaaaatgaccttataaaacatggctgaagtttacgagcttcggctctatccatcttttcctttattggataaatcatatcgggcgtcatatgttgctcaatcaacatatttctcctgcaaatctccgcaaggtgcacgctatctaacacgccgtctaatttctcaagcatcttgcgttttgtattgggatcatcaccctcacgtatggcctttatgaggagattcttcaatggctcattttcaaaagcctctccaagaatgtcaaatacgcggcctcctaaagatttccgttcgcgctctaatttctcaaacaacctttgaaaaaccataccttcgcgagtttcgtatgccacaaggctccaaagaaaacacatttccgtttgacctattctgtgaatacgtccaaagcgttgttccagtctattgggattccatgggaggtcgtaatttatcattaaattcgcattttgtagatttacgccctcgccggccgcatcggtggccactaatacaagaacctctggatagttcctaaattcgttttgtacccgtcgtctgtcgtcgcgtcccatagaaccatgaatagcgacaactgcgttggggtttcccaacaatccccttatatggtccacaagataagtgagagtatccttatgctccgtaaaaattatgattttcttgcgatttccagaagcgtcacgcatttctggctcatcttgcaaagttttagacaactgcgaccattttgtatcgttcccagaatctaaaagtgcttttgcctcgttaacaagcgagttgagtgcttctatttctttctccaactcttccaaagtacgagcagccgttgccctgtcagtaatattattaattattttttccgattcccccgaagtcaaatcatcttcaaagtcatcatcaatttcctcattatattgttggagaacgtcggataatcctcgctcttttaattctttcaattgggctgacaaacgctcatatctgcgcttcaaagagagatatatcgcgcttggactggacgccagacgcctctgcaacatagttagtgcaaatcccacattgcttttgcgattactatccaaattgtctgcgcgattcatttcatctacaacatatgaagtgacatgattgtagaggtgcatttccgcatccgaaagcttgtaatttatcgtatatgccctgcgttcagggaaaagcttggtcccatcaaattttacaagctcttcctttaccatgcggcgcataacatcgctcacatcaacgcgcgttgagtctcgttcttctccataaaagcggtccgaatccaatagcgatagccatagagaaaaatcagcatctttcccattatgcggagtggccgtcatgagcaataaatggcgggtacgcgcaccaagcaactcgccaagcttatagcgatatgtcttatttaccttgttcccattgcgcgatgctgaaagtttatgagcttcgtctattataaccaaatcccaatcgactgtttttaacttttgctggtagtcctcatttctggctaactgatcaatcctggctataacaagatcattttcttggaaaaaattcccagaagacgactgttcttgtttctctttgctaaatatgtcaaactttattccaaatttttcaataagttcatcctgccactgttccgtcagtgaccctggcgaaataatcaatatgcgacgagaatctgagcgcattatcagctcctgtataagtaagcccgccattattgtctttcctgctccagggtcatcagccaaaacaaatcgaagtggttgttttggtagcatcgcttcatagacggcggaaatttgatgtggcaagggctctatgtttgatgaatgtatagccatcattggatcaaacaaatacgacaaatgtatgcgcattgcctctaaagctaacttaacttccttagcatcagcatcaaaagaccaagatcttcccgtctgcgcaatggacagtttctttaagtcttcttggaaaagcatctgttgggccagagttccatctgactttctgaaaaataccgtcaaagcgttttcaccagtcttatttaccgcaatgactgtaacaacttcattaggaatgagtccagcgatttggctgtttgcttttatatcgtcaaaattcatcatcttatatctttacaatactacaaataatgtctgactcatcaaggaaataacatatcaaataaacggacttcagattagaatattcatgcatgatttccttaaatattttggtgtaatatactctctttagattttcaaatgtgaattcgttgtaaagatattctatcgttccacatttgatttgccatcggattgtagtacgatacctataactggacacgccaatataacttaagagtaagaagtctcttatcgtttactaacggttactaggctttcatataaatgttgcatgagcatctgcggaaactctcagcatgtattggaaaagtatggaactatatccgtaaaaatcatggatatagtgcttatttttctctgtgtgcgaaaagaagctgaaagttgatagaggacaactcagagaaatattatctaaaaataacaaataaaaatattgtgtattttatcatgatgtggtagtatagatgccataacgggacagggtatgatggtaagcaagacgaagatttcggctgaggggtttgagaaggttgaaattacggttaagatggcggaagtatttgggttgccaaagaaggcggtagggaaatgggctgtcgtttctacggactattttgagcatcgcttgagaaaggttcgtttagacggatattttgccgacgataagtacaacaatcatcagcgcattcccaacagaatttggggcgagatgtttggctcaaagcgttccgctaaatttgaaatttccaagcagactattcacaagcagaattgggtttatggcttgcttgagcagttatcaaaaattgaggaactaaaaagtgtcttaaaccttatggggcgcgatgaagtaattttgcagattctcgatgatacggacagctcccgcgcaggaggtaaattatacagctctacaagcactgcaatcgcccactggaagtataaatatgggagggcttgcaagtgagaatcagagccctaaatcgtcaaaatgattggtcagattttggtaagggatttatcgtaaaaatgcgtaaaaatacgtgttttttactggcgtttcaacatttcataatacgcaaatatgcgcaagaatttccaatttttcatttttataacttgtttaaaaacagcaaaatacaaaacataagaaaggcggatatgaatgcaaataaagagagattaggaaacgctcgttctatccgttgaactacaggggctgagttaagctcttatgtgaccaaatcttggatttaaagtctatattattttagttatcataattctttctctcgccttagctatttcatttcaataatagttgccccattccgccacatattaaaatccatataatataattcacaatttttattatagcattgtttatcttctttttcttctctttccaaattacactatcttttattttgaaaaattctctacacctagttttgtataagaaaatatataccaattcagaataatgcttttctaaggatttcttatccgctctcttttaagtattctttccggtatttactgtttggtatattattcaataaaaaattctttcataattaaagaatactttcttcatttcttcaataaattctataaaatataaatatttgaatttggtattgaacaatattaaggcatataaacttcttatatactttatttactatgaaaaatactgcccttgtttatatttgatgtaccagtctgttgcgcaatcgcaaaaatcggctataaaaaatttatgccccttcccagcaattgcacgtcctagatttattgaatttaacctaattgaaatgtcaataaccaaactattacaaaagacctggaaacagtgtaaaatatagattgtttgatacaatcttttgcaaatacttatatttcttctaagcctactataccccaatcgggctcgacggaaaagtaagcctgccctgtaatttctggaagtatagcagtgcgcgtcttcacgctcagagattttcgtggataaaaaatatggcaaatatgcaaccatatcaatttatcaaaaccctaaaatttttatatactataatcaaaaattttcgacaaattgctaataatctaccctacaagaaaatagaaatcagcaaggttcagcaggaaacagtcaatagaaaccacaatgaaactcgctcacgtttgaacctatattcaattctaaatttatacaaaatttgcaaatgccttttgattttctcttttacattttccccataaatgtcttttcaaaaagctgtacaactataatagcttatcacaatcgcatataaaaaaattgccgcaagtttttgcggcaatctttatttaaattccctacctcaatcccctattggttgggtctcagcagtatctgatactctcctgacggcattttatccactgtcaacgtgccgtcggagttccttacaaaatccttctccggaactttgtaaccgtttacgcgcacactcgcggaattgcttgtcgggaataccaccgtgcctgtcgaattcggcgggattactatccgccactccatcactccgtctgaaacgcgccatgacgatgaagccaacccgtacggagtctcgtgagttccgctcgcaaaggttatcccgccgccaagcttgggattgaatattatatttttatagccggggtttgcctcgtcgcgccatatgcctgccacgcttttatacagccattctcctatcgctccgtatgcataatggttgaaggaattcattccagcatcgccaaatccggtcttgtgcgaataactgttccatctttcccacatggtcgtcgcaccttgcgttatcggatacagccacgacgggaatccctcgttcagcagaagcctgtatgccaaatccgtgcgcccgtaccgagtcagcacttctgtcagcaacggcgtccctaaaaatccggtcctcaaatatacgccagaatcctccaatacctttacgaatctttcaaacgacttctcccttatttcatcgggcaataaatcaaatcccaacgccaccaagtaagccgtctgtgtctcgttatcgacagtgccgtcttcaaatacatattttttagtaaatcccttcttcgctttttcggaaattgccgcgtatttttttgcgtcgccttccttgcccagcactttcgcaacctttgacagcagctcagcgttccgcgcaaagtacgccgttgttataagctccgcattcgtgccttttctatgcgtgctgcgaaccttttcaaactcccctgccttcctgtactttccggaagctttcgggtctgccgacttctctattttgcgcttcgcaacgtctccgtcaagactgtccatggaaagccaatcgccgtagctccatgccgtgcatatgccgtcttttgaattcttgtccagaaattccacaaacgcgcacatcgcgccatagttttcttccaatatcttcttgtcgccgtactgcaaatatatctcccacgggcatactatcattgcagctccccatgtcgctccgcccccgcaatcgcctgtaaatatattcggggctattttcgatattgcgccgtcttttagctgtgcgtcgcgcaaatcgcgcgtccattttgagaaaaatgagcatacgtccatattatacgcagcagtcggaataaatacgtgcgcatcgcctgtccacccgagccgctcgtcgcgctgcggacaatctgtcggtgtggaaaagaaatttcccctctgtccccattgtatgcagctttgcagcatatttactttcggcacggagcatacgaaagatcctatttgcctcatatcgttgtgcaaaactacacccttcacccagtccgcgttcggcttcgcattctcgggaaatcccgacaactccacatatctaaatccatgataggtaaacaacggattccactcctctacgccaaaccccttgcatatataggaatcctgcgagcgcgcagaacggtaatttttcgtatacaatgttccgtctttttccaacatctccgcaacgcgcaccgttatcttcctgccgggcgcagacggtatttttatccgcggccagccaaccatattctgaccgaggtcgaatatgtatgtcccgggctttacctcccgcacggacacgggagtcaattccatttccgcctttatcgcagggctcctgcgcggctctatcaacggtttttcgcctatatcggcggccgcaactggcttgaaatctgtctcttcgtaatcgctctccgtccaatcgccaagctcgcggcgggcatcgtactcctctccgtggtatatgtcggaatacgttatcggcccgtacgaccatttccagctcccgtccgtcacaaagctcgccttgcgcccgtctttatagaccacctcaagctgcgcggcaatctcaggctttttgccgtataacgccctgttgtttccccacgcgaggttgccggcgtaccaaccgtcggcaattatccccgcaagcgcgttgtcgccttcgtaaagcatcttgcttacgtcgtatgttgttgcctggatacgtttgttgtagtcagtccagcctgggctccaatagtcgtcgcccacttttttgccgtttatataaaattggtatatgccgcgcgctgctatatacaaccgcgcactctctacatcgtcgtcaaggcttatttccttgcgcacgtacgttggcggaaatgatttcagaatttttttgtctttgccatcgcggccttttatcgtctcaaactcctgctctgccgtatttgatatccacttcgcggaccaatctgaattttttgtaagcccggcttcaaaatacgcaggctcggaccattcagacgctctgccggcctcgtcccatacgcggactttccaaaaatacctctccctagacttcggctcgggtatcccagcgccgacccacacagactcggaagaatccactttaccactatcccaaagcggattctcagatagctcgcctttgcttcgcgcaaccacaagttggtacgccgtttggcgcaatccttgcccgttggccggcaactgccaggaaaacttcagattttccaacgacattccaatgggattctcataaaattccccgaccgttagctttaaaggtttaaattttccctctccggcaaaagtgcacactcccgccacaaatatcgcggcaaacgccgcaaaaattcgcctcttcatacactgcatttttttaaaaattctacaatgcgtcaacttaaatcggaatctccactctcatatattcgcaattaacctgccaaataataaaaaatccgaactgcgcaaaaacgcatccggatttttagaacgcccgctattcccgggtgcgcctatttacaaaaccctttgctttttttgttggctcggactttttgcccttcccaaccttcggctccttcgctttgtcctttcctactttcccgcccttcgctaacggacactttgacgcctcgggacaattcccgaccgccggacatccgtccgatttcggacacgcattttgggccgatgaaccgtcagcgccagaaccttgcgcgcacaatgaaatcgcggatattaaaaacaccgccaacactcctgcaaacttcatatctttttccctttccgtttgtgttttttatatatcggaacttttttctatctcgacacccaaaaaaacctttgttcaaaaaaacttccgcataaaaaataatagtttacaaaggattcctttatgcgaaaatcccaatcatgactccccaagaattcaaattatctttcgaagaaaaaaggcaggctgtagaagccgcaatcaaaaaataccttccgccggcagatacgcgtccggcaatagtgcatgaggctatgcactattctatggaggccggcggcaaaagaatccgcccaatgcttctgcttgccgcacacgaaatgttcccgtcggaaatcgatcccctgccggcatgcgtcgcaatagaatgcctccacacttattcccttatccacgacgacctcccgtgcatggataattccgacctgcgccgcggtaaacctacctgccataaaaaatttgatgaaactatggcgttgctcgcgggcgacgcgctactcacatattctttcaaacttctcgcagacgcatatatgaaatacccaaaagtcgctacgggactcgtattcgacctcgcagacgcaggtggaagcacaaaaatgattggcgggcaagttgaggatgtgctcggcgagcgcgacggaaaaatgactcccgacaagctgaactttatccaccacaacaaaaccgccgcgctaattacggccgccgtcaccatgggtattaggctcgcagacgactacgacgaacttaaacttcaagccgcccgcgaaatcggcaaaaatatagggctcgccttccaagtcatcgacgatattctcgacgtcacaagcgacgaagcaactctcggtaaaaccactgggctcgacgccgcaaacgaaaaaatgacttacgtttccctatacggcatcgaaaaatcgagggaaattgccgcccaacttacacaaaaagcaatttccgactgcgaaaagctcagcccgaactgcgacttcctaaaagcgctcatctcttacatgcaaaacagaatcaattagcctatataatattttaagaaaggactctccaatgattgtcgaaccaaaagtaaaaggcttcctttgcataaccgcccatcccgaaggttgcgcggaaaacgtgcgcgaacaaatcgcctacgtcaaatcgaaaggagaaatcaaggacggctgcaagtccgctctcattatcggcgcctccacaggctacggcctcgcaagcagaataacggcggctttcggctgcggcgccgcaaccgttggcgtatttttcgagcgccctggcgactccgcgcgccagcgccctgcaagcgcaggctggtacaatactgccgaattcactaaacaggcaaacgccgcaggcctatattgcgcgaatatcaacgccgacgcattcagcgacgaatgtaaaaaacaggcaatagacgccatcaaaaaaagccccctcgggaaagtcgatttaattgtctactctctcgcctcaccgcgccgcacggatccaaagacgggcgaagtgtacaagagcgtactaaaaactgtcggcgaaccgcgcaaagacaagtctctcgacaccgacaaagcgcaagtcatagaagtcactgtgcccgccgctaccgaacgggaagtttttgaaaccgtaaagacaatgggcggcgaagattgggaactttggataaacgcactcgacgaagcgggtgtcatcgcagagggctgcacaagccttgcctactcttacatcgggccggaactgacttaccccatataccgcagcggcactatcgggctcgcaaaaaaagatctcgaagccgccgcgaacagaatcgacgccacgctaaaacttaaacgcggcaaggcgttcatatctgtaaacaaagcactcgtcactcaggcgagcagcgcaatcccggttgttccgctctacatatcaatcctgtataaggtcatgaaagaaaaaggcgttcatgaagggtgtatcgagcaaatacaaaggcttttctctacgcagctttacaacgataactgccttgatttcgacgatgacgggcgcgtgagaatcgacaaccttgaattgcgcgacgatgtccaaaaagccgtttttgaaatttggccaaaagtgacaaccgaaaacttgaacgagctcacagatttcgccggatataagaaggagtttttaaagctctttggttttgggcttccaaacgtcgactacaaaaaagacgttgaaatataaattcccgcgcggatatttccgctttattccaatcaaaaaaaggcgctgatttccaaccagcgcctttttattttcccccaaaaatcagccgctatcctacaaacaatatttgccaggtcatatcgaaaaaaatccgcattttttatcactgcccagaaatatattctcgccgcgcagaaattttttttgaaatcttccgtttacttttaggcttataaattttacacaaaaaaatttgccgtcgaaaattcttaatacttacaatttgctgccttactgttctacgtggaacatttttcagtccgcctaaatgcgggataatccggcagcaaattttccactttctcgagaataaaaaagcgcgcatatccgcgcgcttgcacagtcttttttttgattaaaagaacaccgaatgcgtcgggctcatatctgttgacccgcgtttaaaattgtcgcccgcgcttgcgaaatcgcacacctttgtttcaattatcttcccgtcgtctgccgttattttagccttccactgtccccatgtatggctcggtttttcgggaatgagctcgcactttgcccctgcattgtttacgctcggagacgaaaacatttccgcgcttgtgttgccgatatacttgctgcgcgcaagcaacagcggccctttctttatcgtcgcagccgccgaatggcgcattatcggcaagaagtctttgcggcatgcttcgtcgtacccgagccagcgcataactcgcatatctccgccggcataatactcggaagataaatccgaatttattacccgtggagtcatatcaaattctatttttatagaagtttcgcctttgccgatattcagcttgtgccagccggcattcgccaccttgccgtttatcagagttttcttgctccacgaaggcaccctaaaatttacggcgacctcctccggagattttatctttacctcggcagtgtccgacaccgggtaattccccaaaacctcgacttcaacattgcctaccttccctttgtatggagaataaaaattcacaaacaattcgccgcccgactttgcaagagaggttctcgcaaaatcgagaaacgccctcggcatattgtcaacacagcaatggttgtaatttagcttgcactgcggctttgctatgtagtggctgccgtgcgagcgaacgcatcgcgcgccccatttgccgtcgcgcgcgactcccgccaaaaatgcgttataaaaagtgtcttctatttcgtcgaggtattttgtatcggaggtaagcaaataaagctcgcggtttatgcgcatccagtgtatcgcgtcgcacggctcggtaatgccgttaatctggcgcgccccgcctacaaacatatcgttatatccaacgctcgacaggatatttttttcgtctttaaggagcttttcgcgaattttaacaacggcgtccaacgcctttttgtcgccagtcacacggtggtattccgccagcccctccaagcacgacatcatctcataggctttttcccaattttttagctgcggataccagagcctcactggctccgcggaaaatgcgtttctcagcaaatttggcggcggatttccgtctctatcccaatacgataccaactccttcgcaaaatcgagatactttgcgtctccagtctcacgatagagaattagcatcggtttaagtatcgacatgctcggcattccaacaaacgttccagtgtcgcatatcttgacgttttccgactttaacatggaaatgtattggtcggttgcgcgcttggccgtttccaacactgcggggtctttattgagtttgtatatttcaaggagcccccacagagtgtattttctgcaccacaaattccagcaccagttgcaatcccagccgactgcctcgcgcgctttgtcgaggtcgtttaccctcaaaaagtttttctgtttgtacgaacctaaatacccgtccgtgtcttgcaatgaagccaatactgccgcctttttggaaagaaaattcttaaggtttttatctcccgtatattcgcatacgccgcttgctgatattgcgagcttcccccaaaattctccgcgccaatagccgacatatacggattcgtcgtcaatcctttcgctaaacgccttttccgcctcttcaaatattttgttttttgcttcgtcggaaagaacgcgatttttgaaaaaagcgtccattttttctccgacatagcctcccatttttatatcggaaagctttgcgcactcaactttgtcatttacggcgggttttacttccgccgcatttttatctgcgctgcctgccgcattttcattcgtagcgcaggctgtacacagcgcggccacaattataccatacaaaaataatttattcattccccttatctttaaatttataaaaagaataaatcccaagtatttcaacgtcaatcaaaattcaagatattgccgcattgcggcctttattcgcgcgaatttttgattttgaccaatttttataataaagaaaaagccaaaattccgcgctataaaatactgcaatctccgcgcaccaaagtttttttagagtgcgcacaaaaaatgccaggccacatatcgtcacagactatacgctcttattttgagggaaagggcgaagatttaacgcattgcccgaatcgacactctcgatacgcagcctttaccaagccccagacattctacatcggttatagttccatcgtccgacggatatgtttcccccatcgcataggaaaatttatagcttccatcgggctgttttacatatagcgacgccaatttagcgcgcgcgggcacgcactccaaaaattcggaattttctgaaaaatccgccggataattcatattgcggatttccccgtcggcgaaatttttttccgccaaagcctcggatatatattttgccgcatgctctgaagccgccctcaaatgcggcaaaacctcttgcggcacgccttcatggcggattctgcaaatctcataatatttatgaagcagcctcatcgaacacgcaaacgaaggcaagccccagcctgccccttccacggctgcagcgaatgtcccgctgctccaaagaagcggcaacgcaacattctgcccaatattcagccccgacaccactgcgtctgggggattgtccgcgtacagatgcccaagcgctatattcacgcaatcagacggcgtgcccgacactgtccggcacttgaatccgcaaaattccctctcctccaccactatgtcgcaatggcggttgtaggccctgccaatccagctttgttcgcgcgcgggcacgacaatttcaacttcgccaattcgcgaaagctcctcggcaaatattggcagaaacggggaatctgccccgtcgtcgttagacagtagcaggcgcatcttttagcggctcgccgcgcaaatacctgtttatgctccgggcggcaatcttcgcctgccccattgcgctgattacggttgccgcgccgcttacgacgtctccgccggcaaatacttgcggtatcgacgtctgcaaggtttcagggtcgcattctatcgtccccttccttgtcgtcttcaaatccgggctcgtcatcggtattagcgggttcgggcggttgcctatcgctacaaccactacatcgcacggtatttgaaattcgcttccctttatttctatcggcgagcggcggcctgaggcgtcgggttcaccaagctccattcttacgcattcgagcgctaccaccttgccgttgtcgtcgagcacaaccctctttgggtttgtgagcatctgaaacacaacaccttcatcttttgcgtggtgtatttcctctttgcgggcgggcatctgttcgagcgcgcggcggtaaactatcgtagatttcgcacctatgcgcagagccgttctggacgagtccatcgcgacatttccgccgccaacggttattatgtgcttcgccctgattggagtcgttccgtgctcgggaaaatcgtaggccttcatcaggttaaagcgcgtcagaaattcgttcgctgagaacaccccaactccgttctcgccgtgtatgccaaggaacatcggcagccccgctccggaacccaaaaataccgcgtcaaacccctcatcgagcaggctttcgagcgaccttaattttcctacaacatagtttagatgtatcttaacgccaagctttttgagcccttcgacttcgtgagtgacaatctcctttgggagcctaaattgcggaatgccgtacatcaaaactccgccgggcaaatgcaaagcctcaaatacctccacttcatgcccggctatcgccaagtccgccgcagccgttattccggcggggccgcagccgattaccgcaaccctcttcccggtcggggccgccttctcgggcgtcttttcaagattgtgttggcgcacatagtccgccgcgaacctttcaagcgcgcctatcgcaactggctctccgcggattccaagcacgcagcttccctcgcactggttttcttgcgggcagacgcggccgcacactgccggcagcgccgtttgcgtcttgagcttttcggcggccgcctgcggattaccctgcgatatctctgctataaattgcggtatgtttatgttcacggggcacgccgtcttgcagcggggcttcgggcattgcaggcaacggcttgcttcgtccatcgccatttcaagagttataccgtagggaacttcctcaaaattggaagctcggcgcgacggatcctgctcgggcatcttcatgcgcggcagcccggacgcctttattttccttgctttctcttctgacatttcaactctccggaaaattttttatttggattgatagcatttgctattcagatggcggggcattgcctccacctccagaagcctgtacgccgaacgcctctttgacagctcgccgaaatcgactttgttaagccggaagaacgggccttcgacgcatgcgaactttgtctctccgccaactgtcactcggcacgctccgcacattccggttccgtccaccattatcgggttcaacgaacagaacatgtctatgccgtctgaaacgggcgcctttgaggcgcactgcttcatcataaatacgcacccgacggctataatctcgtcgaattctccgccgcgctcctgcatagcgtttatgcagccgcccttgcggccctcgctgccgtcgcgcgtgaacaccatgagctcgtcgcttacttcagaaagcttgtctttataatagagcatgtatgacgacgacgcctcgatagcgctgactaccttcaccccgcgcttcttcaattcgcgggctattgaatatattgcggctatgccgtagcagccgccaagaagcagagccttggagcccggcttgaattgctccatgtcaagcggcgtcccgagcggcccgctcaacaccgcgagactgtcgcccttttgcagcgacgctatttccgcgctcgagcggccgacttcctctattataaatttcacccagccctcgtccgcattccagtctatgagcgtaaacggcgacctctcgctgttggagtttgccataagtattgcaaactgcccgggcttggcaaattttgcggcctccggcgcctttaccgtaagctcgtggaagttcggaaccaacattttgttttcgagtatctcaaagccgtccgaatttttggcggcgtccgccgcgagcctctcatcggattttttaagccccagcatctgcaagtcgggcgcgtaatcggcaaagaaatgcccaagaaagcggtttggcagagccgacttgtcttccgtgggagatttaaaatcggcaggcagcggttcgagctcgaaatcgtatttcttgacgtccgccgcagtcttcttgcacacatcgcacatatagccgttgagcgggcgctgctcgccggcggaagccaccgccgcggtcacagctatctttttgccgtccgcgtcgcctatcgttccggacgtctcggcaaacagacttatcggcattaccacctccgccaatttctgcacgggcgttttcaacacgtcgcacacagccaaatgcggtatcttctttgcaatttgcggagtaatgtagttaccgtacaccaaaactgcggcgtatttgccattttccaaatcggccaatacgtcggcaggaaggtcggccgccgaggagtcaagaggcatttctatctccttgcctccaaattctccggcgattgcgcgcattgcctttcggctctcataggtcgcgcccttgttggatatcacaagcaacgaccccttattttcggaaagaatttcaaagagcttttcgaccgcgtcctcggggcttgcgggaacctgctccttgccgcgcctcaccgccgccctgcgcagcctcgtaggcgcgtttattatctggggaagcgcaaaccttccaagcgggcatatcgcgctttccttgttaagcgcaaccattcctgcagatatgatttttccgccctttatgcgcaggtttattttgcaatgtttcgggcacattgcgcacctgctctcgacaaccttgtcgggctcgccaaaccatttgccccacctgtccgtcaggcagcctgtcgggcaggcgtctatgcacgctccgcaaaacaggcattcctccgagctccaggaccttccgaaagccgcggatatgcgcgccttcttgccgcggttggctatgcttatcgcgggctttgagtgtattttttcgcacaccctaaagcaccttccgcacaatacgcataaattgtggtctttgtcgataaaaggatcgtcgcgctctactttcgacgggtcgtatatcatcggaagccctatgtcgcgcacgtatgtgccaagcgccattttgcgaagctcgcaaccggggcggtttgagcacgacccgcaccgcgtggcggacgtcgcgcgcgtgggtgtctttttctcgctctcgcactcctcgcgcgattcgcacaccaagcacggcgacggatgggagctcatcatcagctctatcgtgcgcctgcgctgcgtctcgagctgctcggacgtcgtgcgcacaaccattccgtcggcaacgggcgtcgtgcaagacgtcggcgttcccctcattccgtctatctcgacaacgcacaaacggcatgctccgtacggctcaagctcatcgtgcgcgcaaagtgaaggtatgaatattccggctttcttcgccgcctgcaataccgtcattccgggttctgcctctacttggcggccgtctattgtaatcttaaaattgctcatgctcttatctcctcgatattgccccgaatctgcatgtctgatagcaggctccgcaggatatgcacttgtcggcgtctattgtgtgcggctttttcactccgccggatatcgcgccggtcggacagaccctctcgcatgcagtgcaacccgtgcacttctcggcatcgaccgaaaaatgaacaagctgcggacagaccaacgccggacagcgcttttcttttatatgcgccacatattcgtcctcaaaatacctgagagtcgtcagcacagggttaggcgcagtctgcccaagcccgcatagcgacgactgcttcatcgtaaacgctatttttttcaggcgctccaaatcctccatttcgcccttcacggacgttattttctcgagaattgtatgcatgtgctgcgtgcccattcggcagggtatgcactttccgcaagactcgttttccgtgaagttgacgaaaaattttgcgacttccaccatgcaggagtcttcgttcataaccacgagaccccccgaccctattatcgagccgacagccgcaaggtgctcgtaatccaccggtacagacaaatgctcaggcgtaagacaccctcctgatggaccacccgtctgcacggccttgaattttttgccgtccgcgcagcctccgcctatcttgtttataatgtcgtcaagcttcattccaagctctacttctatcagccctgtgcgcattatcttgcccgcaagcgaaaacgtcttggttcccttgctcttttcagaaccgagggcggaatacattccggcaccttcgcgcataattgaactaaccgccgcaagagtctccacattatttatattagtgggtttgccaaaaagccccttcgccgccgggaaaggcggcttcgggcgcggcattgccctgacgccctctatgctcgccattagggaagtttcttcgccacagacaaatgctccggaacctttcttaatttttatctcaaacttaaatccgttcgggagctccttctttaaaagcccggcttcctcggcctgatttatagccttctttaaacgctgtatcgcaagcggatattcggaacgcacgtatatgtatgcgcattcggcgcctatcgcatagcccgctatcatcaatccctcaaggacactgtggggatcgccttcaaggacggatctatccataaatgcgcccggatcgccctcgtcggcattgcagattatatattttatcggcgaagtctttgaagcgcgcgcgaatccccattttactcccgtcgggaatccggcgcctcccctgccgcgcaatccgcttgccttcacttcctcgattacctcttccggcgtcatcgaaaaagccctttccaagccttcatatccgccgcgggcgagataatgcccaaaattctcgggatctataacgccgcagttgcgcagcacaaccctcttttgaagctccaccatcggatgtttgcaaaacggctttattccgcgaaattcactttcgcacattgccgcctccgctttttcagaaacgggatttccgtttagcagatgttcttcgactaattttataacgtcttttggctttacgtttgaatataaaacagaaggttcgccctcgcgttttatctcgacgagcggctcggcatagcaaagtccgatacaggcggtttccaccacatctaccttttcctccaagcctttttctttcagaacctttttaaattcgtccattaccgcgccggccccagccgcgcgtccgcaagttgcggctccgaccatcacgcgcgcgctattctggaacttttcccattcctttttggcggctgcccttaaattttcgagaatcttcatggctatttcagggattttaggattttttctatttccgcaagcgtcacgcgcgcatgaactttttcgtcaactaccattgcgggagcgagcgcgcaggctccgaggcatgcgactctttccaagctcacaagcccgtcgggcgtagtttcgccctcctttatcccgagcctttcttcgagcgccgccaatagggaacccgatccccttacgtggcatgccgttcccttgcatacttttatagtgtgcttgccgggctttttgaatttaaattgggcgtaaaaactcgcgaccgaataaacgtcggcctcggaaaccgaaaaatattcggcgcactcttttaccgcctccggacttataaatccgtccttttcctgaatatcctgcaatacgctcacgagattttcccgctttggcggatatgcctcgagaacgctcttaaacctgcattctgtcataatctaaacaaaagcttttacttttttggttaatacgcgtcttttattattcaaaaagcggccgctctttgaaatttggaaatgatttctgattatcagagtctattcaggttttttgcaatatttttccgcgctttttttctatttttaaaaaaaactacatttttggacattttttttattcaacctattttttcattcagactgtttacttaatcgtttgagctcatatctctattttttatctcttacaattttgtacttttttatacgcttctaaaattgtataaaactatgttgataaccggtaaattttagcccaataaattgtaaacttgtaaataaattgacgttctccacattatacacacttcaattccaaatattttaatttcataagtattttaaagacaatcttaaaaaaagttattacacttgttcgcaatttataataataaagttagatttaaattaaaattcttatctttataaaatattcctctcaaaaagaaaagaacctgacccgtccttaaaatcattaggcaaagaagtcccgccgcaaaccagtttaaattccggaaagttccttaaaaaccaattagcgttttcttcgttctcttcgggctcaattgagcaagtagaataaacgaaccttccgcctggccttacaaattcaccggcttttgaaatcaattttttttgaaagtcggcggatttgcttatatcgccttcggaaagtctgtatcgggcatccggacgcctccttaaaactcccgtgttggaacatggggcgtcgagcaaaacacagtcaaacttcaaaggcaagccgctggattcgagcttttttgcgagttcttccgaatttaagtctgcttccaatacgtaggtttttagaaaattaatctttgaaatgttttctctaagattgcctatgcgcggaccgggaatgtcaacgcttacaagagtgcccaataggcatttttcttcgtcaaaattagccgactctctaattaaatctgcgcaaagtcgcgattttcccccaggggaagcgcataaatccaatacgcattcgccaaattttggatttaaaagcgacggtgcaaaggaagttgaagggtcttgaatgtaaaattccccggattcgagcaactcctttgcgctttcccattcgccgctttttaaaatcttaaaatttttaaaaggcgcgtcggataaagcgtttttatgttcactttcaagcatcttggcttttttggaacctgaggatctcaaaaatacgcatgatggattttgatcgttttttaaaatttcaagcgtcttatccaaaccaaaagaatctatccactttttaaccagccattcggggtggctatatgccaaagaaatgctccctaatga

SEQ ID NO: 3993 - DNA, 5352 bp, Unknown
  16S sequences of unknown bacteria
gaaaatcgggtgggatttgatttctattttatgtaaaaactccgtacttggcgcgaatggtttttaaaatgcgttttaaaccctataatttcgcatcagaccgacgactttgccgaggacggatacttccgcagggtcgaaaatcatgtccgccagggcctcgttttcggggtgtaaaacgattttgccgtttttgtggaaaaagcgtttgaccgtagccgaatcttctatgagggcgacgacgatctctccgtcgtttgcggtctgctggcggcgaaccacgattttgtcgccgtcgagaatgcccgcgtcgatcatggaggtgccttgtacgcggagcataaatagatcctcgcccttaaattcgctggcggggaaggtataatagtcctcgtaattttcataggcgaaaataggctgtcccgccgtgacggtaccgatcaggggaatattgacggtggcgcttctgccgatactgacggaacgctttttgttatccgttttactcaaaaagccgcggtcttgcagcctttctatatagctgtggacagtggcggtggacttgatgccgcattcctgaccgatttcccgcacggagggcgtatagccgttttcttcggaaaacctcctgatataatccatcacctttgtcagtttttcttcattgatcacgtgggcattcctccttccgatattccttgtctatattataacacacttttttgaggaaagcaaacaaatgtttatggttttttcttgattttttgaaattttatgttataatagaaaggaagtaaagaagagaggcggataaaaatggaaaagacggagcagggacatacgcagaggtgcgttttatacgacagggattgcatcggatgcctggaatgcgaaacgtgcgatctggatccgaacaaagtttgcgacaactgcggaaaatgtctggatatcaaggatgtggtttcgatcaagatcgataaaatttatacgaatcccgaagagtacgaagaaaagtgagaaagaaaaaagcaggctcttttgcgcctgcttttactatttaaagatgatttctctgcgtgatgtacgaggtaaatttatccgcgtacatcgagggaatgactgcgtcaattttttgtccgtcgtccgtgaactcgatatttctttccgtcaggagggacttgacttttccgtattcggcgagtttttcgtaagggacgaacagatcgcagaaaaggaactcttccgaaaagcgcttcatgatttcccgtttcagggtgtcgatcccgaggttctcttttgcggagatcgccacgcttccgtaaggaaaaacggatggatccttgatttgctcgctcttgttcatcacgacgagatagggcgcggaaaaattcatttctcccaacgtatccaaagtcgttttcagctgcgtttcgtattcgcccgcggcgtcgcagacaatcagcgccaaatcgcagttaagcgcgctttccaaggtggatttgaatgcctcgataaggttgtgggggagatcctgcaaaaatcccaccgtatcgacgagcagaaattccacgtcgtcgatggaaaaggtgcgggcggtggggtcgagcgtagcgaacagctcgttttttacatagacgttcgcccccgtgagaagattcatcagcgtggattttcccgtattcgtatagccgaccagcgcgatcgttttgaccgaattcttttttcggcgcaccgtttgcagggagcgccgtttttccgtttctttcaaacgggcttcgagatagcttaaccgacctcggatataccgcctgtccgtttccagctgcgtttctccggggccgcgcgttcctacgccgccgccaagacgggaaagcgcctcgccttttcctttgagtcggggatagatatatttgagttgggcaagctccacttgcagcttgccttcgctgctctgcgcatttttagcaaagatatcgagaatgagggtggtgcggtcgatcactttgcggtggtcgagcgcggcggaaatgttgagcgtctgcgacggagaaagctcgccgttgaaaagcaccgtgatctcgtcgagtccgcagagtcgttcccgaagctcttgcagtttgccttctccgataaaagtagcgggattgatttcccgaacgttctgataaatggtgccggcatacgcagctcccgcgctttcgataagcgaaaccgcttcttcctgcaaaatgcggtatttttccgcgttttgttcggtgatgggctgtatgatataaattttttccaattctttttccaggttattttgcatataggaaggattcctttaacgatccgcgtctccgtcttcgtcgggagaggcggggagatcgtccgcttctcggcgaagtttcacgatgcccgctacctttttccgatggtcttcggtgatggcggcgtaatgtttttttgtagtgttgacgtctttatgtcctaaaacgtcggcgactatgtaaatatcgcccgtttcgttatagaggcgggtgccgtaagtgctgcggagtttgtggggggtaatcttttttaggggcgtgacgatactgctgtatttttttacgagaatctccaccgaacgcacgttgatgcgtttatactgcatggataaaaagaaggcgctttcgtattgaggtattttcggatcgttggatttttccgcaatatattcctgtaaggaatacttgacctcttcggaaaaatagaggatcgctttattgccgccttttctcgttacgacaaaggagttattggcaaaatcgaaactgtcgttgtccagtccgaccaattcgctgatacggattcccgttcccaaaaagagggtaaggatagcggtatcgcggattttcgttttatcgtgataccccgaagcgtgacgggaaagaccgtgtcccgattccgcaatgccgatcagacgggaaacctcttccgcttcaaggcggatgatctctttttcgtggagcttgggcgtctgtacctttgcggagttgtctacctcgataagccccttattaaaaaagtacttgaacatcgcccgcacggcggaaagcttgcgcgccttcgctttttcgtcgcaggaaaggctcctgtcgttgaagtggtagtgggaaagataacttaaaaaaagctctatgtcgctgttggtaacgccttccaaatcttccagcgtcaaatcgagcgtatccttttttcgatatttcttcttgcagaggaaatcgaagaaaatacgcagatcgtaggcgtactttaaacgcgtctgacagctcgttcttggctcgataccgagaaagtaatcctgacagaagggtgggaggcagtccagcagctcgtttattttgtcgatatcctgaatattacgtttggtgtagtaattttcttttctcatgattgtattttaccgcgaaataattttgctgtcaatagaaagtatgtgtttttccgaaaagttttatttttcttttagaaaagaggacgttttgaagcgtaaaaaaggaagctgtgaccttcgattttcgcgattgcacaataaccttatgagaaaacgtcgtcatgatcagaaagggacagaaaaaattttatagagtgcggaaaataaacgaacatagcctcagaagtaagcgatggggaagagtattaactattcgtaaaatgcagcttttacgaatagtatctacagttttcgtaaatcttcgggaacgggcggcgatttcttgtaaatcagccacatgcgcaaggctaaatgctttgacttcggacagctaaaaaattcgtattcgtgggtttgtaaatttacgtaagcgcaacgccaacagctttcgcaggtctgcttgataatgaaaatgtcgcaaagttgctttttctccgtcatgcggtaaaacgtgtagttatgattcgcatagttgtatgagcaattataagcgcgcttaaattctgctttgagattccacaagagccaatgcacacggccgcctttcggtgcgccgacttttctttttggataggtcttttcattctccataatcgtccgccatgagctgggcaacgctggcccgtgatatgtatgttacttcctttgtctgaagctgggattgtatttccgtcagatattcgaatacccgttcggggctttccaactcccgaagcacgtctataatgcggttatattcctcgtccgctttcgcgtcgagttcaagcgttatctcgaatttgtatttattgagcagtccatagccttgaataagctttcggcggtacagcgtgtagtacagcggtacaaagtcattgtagccgttgagcggcgttccgtcctccgtttccttgaaaatacctttcgtggcgtatttgaacacttcgtggtacttcccttccgcattgtcgcatatcaccgaatagccctctttcaaatttgagatactgtcgcgggtaacctttatgccgttgaaacgcagataccagattttttggagcaggatttcaaaatcagagaaataccgttcgggcgcgccgtactctctccgcttatgggatttcttgatgtcggggtttgagaagctgaacgaattgacgtgctttcggcgttgatccagacgcaagccttttttgagtatgaacaggcaatggaaatgcgggtggaacgtgccgtcgtacttattctttgtaatctccaaagcccgcaccgcaccgaggaaaccgtagccctcgaagctgatacctctaattttgttgtgtcccgtgaaaagccttatcatataagcgaattgcttatatgcgttatctacggacgggagaaactcatcgggcatggagttcggccaggtaaagacaacgtgatagatgtcatagagccttgcgagcgcgtcgaggaaaggcgcgtatttgttttcgcgttggattgcctgagcgttgccgcagttgtcgcaaaagcggcttctgcaaagattcgtgcgcttgatgtcctttacgccttgaaaacggtaataatccacgtcccacaatttacagcagctctttattctatctgcccagcgcgggagtgtttcgtcctctgtttcgtcatacagctgcatgtaatagtccgcgataacgtcatttttcttgatacgccgggagaccttgccgaatttgtcttttgcattgagttttgacttgatttcggataattccatgataaagggtctcctactttttggcaattcgtgagccgagttatttctataatatcaaggttctcccccttagccgcttgcgcggcttcgggggagaacaccgggagcgctccgcgcccccgcagagcccccgaggggttgggctcttgcgggg

SEQ ID NO: 3994 - DNA, 2337 bp, Unknown
  16S sequences of unknown bacteria
gtcggcagcgtcagatgtgtataagagacagccgctacagtgccagtgctgcgggatgcccctgcaggaagcggaaatgctcagcagcgagccggacggcacgccgaaccgggactactgcaaatggtgctatcacgacgggcggttcgtctacgattccatggacaccctgatcgatttctgcgcccccaggatggcggcggagagcgagggctggagcgaagaggctgtgcgcgccatgatgtgcgaacagctgccccggctcaaacactggcgcaccggggaagatgcagagtaaactctgtccctgcccccgccatggaaactgtacggattttttcctgccgggaaaacacagcgtccctgatccattggcaggagtcaggaaccaaaagaaggggcggcattccacttgcttctgtgggaaattgcggtaaaaaactgccgggaagcataggcttcccggcagtttttttacgttgggatggagaatggctgcagcagccggaagatcccggccctcaagccagccctttctcccgcagggtggactccataaccttcatggcaaattcttcgaacgtccaggtgttgatctcttcggatttgaatccaagcttgtggaaaaagcaacgggggagagagttgcactccaggttcatggcaacacaggatgtacagctcaattcgtgtcctcccgcctgcgtatcgcaggcgtcagcacagcgtctgggattgttttcgcattccggattgtcgcaggtacaaagcttcattacatcgatcatagtaaatctcctctttcctgtgcaggcacacttgggcgcctgcagatatcttggcaccaaagtacaaaacgaaattgttgcgcgctgagtcaaagctatgcttttcacgttccccctttctgtcactgccgccggggcaggacaattgccatgcggaaaacaggccggctgccgggattgcgccgcgcttgccgtgcgcggcggcagtctcagcccagtttttcgaagtcggaaaccccgtgcttgcagatggggcagatgtagtcgggcggaagctcttcgccttcataaacatagccgcagatcttgcagatccagcccttcttgacctcgctcatggcggcgggcaggggcttgggcttgatgtgggcgaaatagtaggcataggtaacggagggctcctgggacaggaccttggcctcggtcacgtcggcaataaacagggtgtgtgtgccgcagtcgatggactggatcactttgccggagagcaccgcattggtgcagccggtgaggtaatacaaaccgtttgcgctgcgctgcagaccctcgcagccgtcgaacttgtcagcgctgcggccgctctggaaaccaaagcgcttaaaggtatccatgcccacgtcctcactgaggacagacacgttgaacacacccgtcttaagaatcatgtcgtgagtatagttggccttgttgactgcaacggtaatgcgcttgggcgtatcggtcagctgagaagcagtgttgatgatgcagccgttgtctttggcgccgtccttggccgtcagcacaaacaggccgtaggagaatttgaacatggcgttgggatcgacagcttccacgccgcccgccgcggccatttccgcagggctggtgcgcaggatggcacgtgcgtcaggcttcttggcctgtgccgcgcagacgccgggcatggtggcggcgatcgcctgaaccatggcgtcgatttcacacatctggcgctctttcagggaggagcggacggtgaccgtctgatcgatgaacttggtgccgggcagttgggcaagcaagtcgtgcatcagcccgccggcagccggcgcccaggatccgttttcgatcagggccacggtgcggttctgcaggttgtggttcacaatgtcgtggagcagattctccatggcaatgtagatgcccgcgttataggtggtggaagcaaagaccaggtggctgtagcggaacgctgcggccagaatttcgtcggcagctgtataagaagcgtcatacacctcggtcttgatccccagctcgcgcagtttggcggcaaggatgtcggcggtgttggcggtgttgccgtatacggaagcgtaggcaatcaccacgccggtctcctccggggtgtaagtggcccactggatatacttctccaggaactggttgaacttcttgcgccagacaaaaccgtgcagggggcaaaccattttgatctcgatgcccgcggccttcttcagcaccgcctgtacctgagggccgtatttacccacgatgttggtgtaataacggcgggcctcatcaatat

SEQ ID NO: 3995 - DNA, 25573 bp, Unknown
  16S sequences of unknown bacteria
cgccttcagcaaagccttactgtccggaaacacattccgtgacctgttaagcctctctatagcgttagtcgcacagatcaccctccgcacaatatccgaaaacttgaacataggactgacagccgcccagttgtccttccagcgatccatagatctcggatacttcttattccggagccccttttttgtaccggcacttgaccgatgcgctttgatataagttccgtctgtatacagattctgcatatccggattctcacggacgttttcaaataactgtctgagcttttcgattttctgccactgagaaaatatttgattaatttcatgcgtttaagtttagaaacacgctctgatttgtcatttcgtgacgttcatattcaccgcgcagaggtggctgtcctcctgcgggtctcccctgacggctccgatataatccttgccgagaaggtcgaagaaatcaccgctgacgttcagctccggcagtctgccgacaagctttccgtcctcgagcagatacgccatctgcaccggcgtcgcgaaatgaccgtccggcgtcatgtctccgcccgacgccagaaccacgaacaccgccttgccgggaacgagctccgcgagcgtcttcgcggtggggtcgagccagaagctgtggaacgcgagcgtcggaacgccgtcataagccgcggtggcggtcccgagttcagacagtccgaactgatccgccgacttctttgtcgtcaggagaccggtcagctttccgttctcgatgagtgttgggcgaagcccctcggcgacctttccctcgtcgtcgaagaagcagactccgttatgtgtctccgggttcatgtcgtcgcggaaggacagcttatccgagaagaccttctcgccgagcttcccgctgaggagcgacgcgccggaaacgtacatctcgccgacaaaatgttgtagaaatgtgccgaacaggtcggatgtacccatgacgaccgggtatttcccgggctcgatttttgcgggtgtgtagtacgcgtcgtactgttcaccgaacttttcaagcaggtagtccgggtcaaatttcacgccggaccatccgagaaacgtgtcgaacaggttgccggacccgcggttctgcacggcgagctcgatcgagagatcgcgccctgaggagacaaggtggcgacccttcgagttcctgtactcggttttcatgtgggtcatgcgtatcttgttcgagaacgcgaacttcgggcagcgctcgccgaggcggtcgaggaaggactgcatggtcgggatgagctccgggacggggattatctcttcgtcgtgaaggtctgtcatctcgagctctctatcgggcttgcaggggtaggggatgccgagccagagcgcttccgtcgctttctttgtgagttcgttttcgtccggggttccgaggcagccggcgatgccgatcttcccgtcctcatatacgcggacagtgccggtcgtctcttccttttcgcggaagctgtcgatctttccgccggtcacgttcatggcgaccgagctgtttgtttttgttatgaattccttttccattgccttcacctcattgtacattcatcgaagaaaccctgacatacggtccgccgaagccgacgggcagacccatctgctccatctttccgcagccgccggtcacgaaggagagcagctcgacgtccttcgtcagcccgtcgatgagccccagcgtctcgaaaaccgagccggtcaggacgcttatctgcaccgggcgtccgagcttgccgtcgacgatctcataggcgagactcggagctatcgtgaaggtgctcatgccgctgccgtggcggatcgtcttgatgaaatagccgtgcttgatcggcgcgatgagctcgtcgaagctcttgtcgccgccctctatgtaggtcgtggtcatgcggacgatcggttcgaaagtgcagtcaatggcgcgcgcgttaccggtcagaccctcgtcgagagcggttgcggtcacggcgttgtgcagacgtccggcgaggacgccattcttaataaggtagttctttctcgctttcgttccttcgtcgtcatacggcacgaagccgcagccgggaaccgagccgcactcggcgatcgagagaatcggggagccgaccgtcttgccgagctgccactcgtcgcgcatcgactcgtcggagagcatgaaatccgactccgacttgtgcccgaaagattcgtgcgcgaagactccggctgcctccggcgagagaacgaccgggtaatttccgggcgtcaccggaacagaattccgcatgaacgacgtctgctcggcgatggcggcgcggattgtcggctcaaggtttttaagctcgtcaaagcgtgttccgcccttctgccagtgaccggagaatttcttgtctccctccgccatgctgcaagagaaggaaacgccgcaggtctggtagtcgtatgtaatgtccgcgccgagactcgacacgaagtggtatacactgttccggtcgagatacagcccctgcggcatcgtgacgcaggagtcttcggttagaagcggcagataggagagcagaagcgcctgcttttcactcgccggtatgtcgcgcaccgagcagtccgtgaagctcatcagggtgtcgcggttgcgctcgaagcggccgactatcgggtcgctcaggatgtccttgtttggcgtcgccgcggcgtacagcccgtcgagcgtcttctgtatgtggtcgaggtcggtcaccgaggcgtagtaccagagcttcccgtcatagacgcggagaaaagcgcgccgctcgacgcgggtcagcatctcctcgagtactcccgttttgtaggatatcaccgtgcggaagcggtcttccgtccggatgtcggcgtaaaagccgtcccgaaactgaatcattttaattgtcctccctttgatttattgctataattatataattatagcatatatatcgttaagaaacaatcgttatatgtaaatattgtgtaaagcttatttgtgttgtcgtttgtagtaattaaaacacgggctgtaaattaacaatctgtgcttaatctttgactgtgatatgatccgcgcgaataatcgaaaaagatcatctgtggtcataatacgttcacctgtagtgctgacatatttcaattgtgcgttcttgaataaaaacgggttttctggtaaaattgagatatgatctattggattatcatccatggaagagtcacctgtccgatgtatattatcttccccggcgtgacatgatgatccgagtccacaggttacaaataaaaagtgaaggagaaaaacaatgaagaaaaggatcttcagcctcgttgtcgcactggcaatgctggcgacatcgttcagcacgacaattcacgcggcggacgatgaaaagaatgttcaggcgctgaacccacagtatacttacgagaacaatggttatacgcttgaaaagatatcccacgcggatgtgaaagccggagaaatcgacggattcgtcgactactaccagtacaccgctccggacggaacgatctgcaccggcgttgtcgagcacatctacaaagacggcaccgacacacccgagcgcgataccgcggcagagctcgctaagctcgaaagcaagttaagagtcaagtatcctaccgcgacggatgaacagataagcagtatgctcgccgagattgaagccagcctgacaggcgacgcgtgccagtcctacgcgttctccgcgctcggctacggcgattgggtttatatcggcacgatgtacggcggaaccggtataaccaagcacaacgctgagacgatgctgaaatctattggtctgctcaaggatgagactaccggaaccgacgaagaaaaggaagcggctaaggaatacaaccagaagatgatcgacagcgtcgtcggtcttctctacggcgataactattacaccgagcatcctgttccgactcagggcatcctgctcaagataaacgtaaagaccggcgagagcgagatcatcatggctggctcggtcaacggctaccaggtcactctccgcaacgcggtcgagtacaacggacgcttctacttcatcggaacgcaggtcggcaccgagaacgtcgctgacgccgctaccggtatcccgtccatcttcgaggtcaatccggagaccgacgagttccgcaccgtctatcaggcagtgacgatggacgagtacagagccatgcagcaggcgcatgtcttcccgatcccgcgcgctatcgcggtatataaaggatcgctgatcgcttccgtcacgcagatggacggcgcgcacatcatcgcgtacactcctgacgctgacgatttcaacgctgacggcagcttcagaggaatcaaggctgaaggcaatgccctgcggaatcccgagttcacagagatagctgagcagagcaaggagcttctcaactatcccgcataccatatgtatgacgcgaactacggcggaaccgtctaccagatgatcgagtacaacggaaatctgtacatggcgatcaacgccggtcagaaggctctccactcgactctgaacccgactgaggacaaatacaccgcggtcgacccggatacgctgaaggaaacagaatgctttgcaggatacgccatccttgagggcactctgagagacggcgcttcgccgagtgaccgtgacgcgtggacatggacgcctatcatcggcaacaccgcggacgaccagtgggataacagcgtgaaccacgccgatgtacatcccgcgaagtacaccttcaacatcgacccgaaccgtttcgcggcggctatctgcacgatggaggtctacaacggttacctctacataggcgactacaacgacgtcacacaggcaacctacccgatgctcgagatgaaattcatccatctcgcgaccgtcctgtcgcagtcgatcaacctctacaggatggacggcgatcacaacatcgagcttgtcgtcggcgacgccacaaagaccttcccgaacggctcgctctccggtcttgagagcggctggtccggcttgaacggtcacggaagccgtatcaaccagtacacctcgatgactcagctctggaagccggacgcgagcgttgatggcgacggcataatgcttgtcggtactcttgacgagggctcgctcctcagaccgctcataaagatcacgaacggcgacgttctcaagatggacaaggaagagtggaccgagaagatcaactacctcaaggtcataatccagcttcttctcaacaccacctcaattaccggaagcaatctgcctgtgtacggaagcgataacacggcggacgacgtcctgccggacgacgttttgccggactatacggctctcacccccgaagagatggtcgaacaggctctgaaggccgcgcaggaatacgacggtctgtatgacacgcagaacgcgtccatgtatgacctcagaaacggcagccgcgaaagctccgtggtgctcacgagagagcagaccctttcccttgtcgaagggataaagagcggtgagataatcccgcacagtatgcccgcacagaccgccatggagactctcggcgtgacctattcgatggatcagctcaccgaccttctcgacgggagcggacttgacaatatcgaggagttcaaggatctctatctggatattctcgattattatctcgaacttctgaagaagctcgacctcccgcttcccgagccgctgaagaagatattcgatcagcttctcagcaagatgagcgctgaacagcttgacgcgctcgcaacctgcctcatttcgatcagcacctctgtcgtcggctgcgacacctacgctttcagcaccgatccggacggcagtaacgtaaaggtagacgtcatcaccctcaacggtcttggcgacgactcgaaccagacgatgcgcaacttcgcgctcactgacgactatgttgtgttcatccccggcaacgctatccgcggcggttctgtttaccgcctgaccgagtggccgggtatgagcgacaatgacaagcctgacccgaatcctaaatcctataccgtcaccatcaaagacgccggagagggcgcgaccggtgaaggcgagtacactcagggctcgacggttgagctttacgccggaacaaaggaaggatttgtcttcaatggctggacctctgacgatgtgaccatcaataactccgacagcgcaaaggcaagcttcgtgatgatcagcggtgctgttaccgtcaccgcaaactggaaggaagactctcagactcccgaccctgatccgaaacccgagtactattatgtcaacatcgaaaacgccggagatggcgcgaccgtttccggtaactatgagaagaacaccaccgtcagcatctacgctggcacaaaggaaggttacaccttcaccggctggacctcttctgacgtcgtgatcaagaacgcggacagcgcacgcgcaagcttcgtgatgcccgagaagaatgtcaccgttaccgcaaactggaataaggacgctgacgacgacggactgttcacactcatttcaatactcaagttcgattcgaacggcggcagtaagatcgacgatgttgtcggttctctcggccttgccgtcgacctgacgctcggcaagtatcagcctgttaaggaaggttacaccttcaccggctggtacgccgacaaggaactgaccgataaggtcacatcggtccgccttggctcgtactcaaccgtttacgctggctgggaagagatcaaggttccggacgaaaagccggacatcaaggacatattcaatgacgttccctcgggcagctactatgaggacgctgtcatctgggcggtcggaaacggcataaccaacggaaccggtgagatgaccttcgatccggacggcatatgcacccgcgctcaggcggtcaccttcctctggagagcggcaggcagcccggcggctgagggcaatgtgatgcctttcgaggatgtcgttccaggcagctactattacgacgctgttctctgggctgtcgaaaagggcatcaccaagggtacgagcgagactacgttcagcccggatatgaattgctcccgcgctcagatcgtcaccttcctgtggcgttcgcagggttccccggcggccgatggaatcatcctcttcgatgatgtcgcttccgacgtttactacaccgaggcggtcctctgggcggtcagcgagagcgtgaccaacggcacttccgcgacgaccttcagcccggacaacaactgcacgagagcgcagattgtgacgttcatctggagaacgctcgccgactgagcggataaataaatgaaaaaggatcaggttcgcaagagcctgaccttttttcgcggaaagtccgatttacaccttgacattccacacggtttgtgatataatatgtgatatgatacacatcactcaatttacaacatatgtcacaaaagaaggagcgaaaaatgaagacagaaaccgaccgtctgattctccgtgagatgacatacgacgattatgacgcgctgtataatgtgctcgaggactctgatataatgtgtcactacccgtacaccttcgacgagaagcgcgtgcgcgggtggatagagaagaatatccgcagatacgcggttttcggcttcggactctgggcggtgtttctcggagagactggggagatgatcggcgactgcgggctcactatgcagagcattgacggcatgattctgcccgagataggctataacatcgcgaaggagcaccggagacagggcttcgcgcgcgagtctgcgtcggctgtgagggattgggtgttcgcgaacacgccgtttcacgaggtcttctcgtacatgagaaaggacaacctgccgtcaagcatgaccgctcgctcgatcgggatgagcaaggtcggggaatataatgacgacgggagactcacggaggtatggtccgtgaaacgcgagaatttataactgacgggctgccgcaaaagacgcggcagcccgtttctcatattctgatcagaccgttatgcccgtaggcgaccactatctttccatctacaatatccgcgaattccggatgaagcccggttcgcaaaagtctctcatgccgcggtttatccggctcggaaatgtcaatcacttcgacatttccgttcacacggttcaggagaacgagcttatcgccgcagacgaatggcagtccctttagtgatgcgccggggcaaattgtcggttccgggagcgacgagagtttttccatggcaccaagccagtagtatttcgcgccggagatgaggatgagtccgcctccgtagccgcaggcgccctcttctatcgggcaggtctctgctccgagactcacaccggtgcgctcaaagccgttttcaccggacattataagagcgggtccgcccgcgagcgagagtgtgacgagatattcaccggcagtcgttctcgcgaggtgcctgtgatagagcagaccgaccgaaagggcgtcaccaaccggaatcagtttttcattgccaaagctcagcgcctgaacatacacgctcccgagctgagccgcgatatatcttccacagtcgacaagctcacggtatggtttcagcggatccgcgggaaggcgtgagagctctgtcagtatcgttccgataacgttgtatactgccgcgcccatgtcgttttccgctgtgatgaaatagcagtctttcatgatgatatcgaggcacgcgccctttgttctgattgacgagacgcgttccatattcttgttcagaatcactataccttcgtcgccggcggcacagaaaatatattctccacgcttcacgaacgagtgaaactgtgcgcgagaactcttttcggaggggaacgcgatgtccgccgacggttttgaaagctccgcgctgattccgcgcattaccgtcacgccggtctcgcccgccgcgcagatgaagccatttacgagcgtcgctccggttacggatttcctgcgcggctgaatcgacggcggtgctggttgctgacgtccgagaaccgggagacggaagtttttcgtgaatcgcggatggtatatgtccgagaggtcgatttcgaatatcccgttcatcgagtctgtgaagtaacagaaaccttccccggtgaagacacgccacgtgtcgtatccgccgaaatgcggaggggattttatagacgagacatactcagggtaataagggtcggtgatatcgaatatctcgacgccgtgcccgcagccgtagccctcggcgagcatttcagtggtcacgaaggaatatttgttgaatttacggcggtttttgagtctcgcggagtggtgtccggtcgcggcgacacagagggttcttccgagagggtattctttgtttttggtctcaatgaccgagacgccgtccgcgaagccgtcgaccgcgaagaaagatatctctgtggcttttcgcgggtcggaaatgtcgaatatcctgacatatcggttcatccagtcgccgatcagcgcgagattcttatgaagccggactgactgcgcctcgccgcagcagaagcttccgagccacccgggcgagtacggttcgcggacgtcccacagctcgcagcccatatgccggttcgtgatggcgagaaccccatccgcggcgcagacgccggtcgcgagctcgagcgtgtcgattcttcccgcgagggcaggtttctccgggtcccgcaggtcacatatgtacaacccgtccgcgcgggcggttacataggcaaaaccttccgagacagagatttgccgtgaatccccgagaccaccgagctcagagacaagaaccgggacgccgttttcaccgagtctgtgtatcatcagatttccgcgcccggcggaaatgaggagcttttcttttccggtgtcgagagtgtccgcgtcgagggcgttttcaagttgtatttctccggttatatcaaacggttcgccaaacggctgaggttcgggaaggagcgtttcatgtgcgtaggttccgttaagtatcgacattctcttgtcctttcagtttctgtgataggaatattatagcataccggcacagatatgtcaagcaattaatttatcctttttcggacgttttatataatctcccacgtgaacgtaacggtgtcggtgacatttatattctcaggcgttatgtcgggaacggtacatttcgccgccatcaggggcattgcctcatccgccatccggaaatttgtcggtgacacgagatcgggacggcggtcgctgtagtctatggatatgagcgttccgatactcgctccggacgccgacgcgagggtctcagctttcgctctcgcattcatcgcggcgtttgtcagagcctcggcgtaagcgctggttgtgtcatttatagtgaacgacacggatatttccggttcagcgccgctcgaggatatcgcggatatagcgcggctcaggtttccgggttccgacgcgaacgagattgtcagcctgtaaacgcagttgtacccggcgaactcctgacggtagtttccgtccttgtcacggatactttcgtagcgtgtgtcgacgccgaagtccgatgttctcagcgcgtcctccgagaatccggctccggtcagggcggctttgagcgctgtcacacgctccgacgcggcgtccgacgccttttcgtagttcttatcggttgacccgacagacaggcgtattattatgagatcaggctttatgtccgctcttccggttccttttatcgttatggttcttggcatcttaagatttcctttcgtctgtttcgctttttgtgcgtttttttatgaggctcttcggcggacagccgtacttcccgctgaacgcgcggctgagggcaaagccggacgagtagccgagcttcagcgcgatctcgccgacgttctttttgccttccgcgagcatagccgccgctgtgccgagtcttcggtcactgtaatactccgagatgttcttgcctgtcgtacgtttgaaaagattggagagatagctgtagttatatccgagagcgtccgccgcctcgctgaggttcacgattgagcctatgtgtgagtctatgtaatccatgacgagcgcgcagatgacctccgcctccgaaacgtccgcgctgccgcccggatgcttgctgaaatcgcgtatcaggtagacgatgatctggtcgaacaacccgctcagcaccatgtcggagagctcagccgggtcggcgaactctggaagcgccatgccgacgagcgtgtttatccggtcatcacggaatacccgacggtcggctccggcataatccatgcgtatgtgttcgagtgcggcggagatcctttcgtctgtgcgccggaacgccatgtagtcatactcgagcttgtcgcgcgtagaggcgtgtatatcgtgaacctcgtacggaaaggagaaatatatgtctccagcggtgactttttccgctgttccgttggttatgacgctcccctcgccggcggttacgatggtcagctcgaaccagtccgcgtgcgggtgagcgccgatgacgcagcccgcctcacaccagcggcgtccgatctgaataagagtcgtatttccgaatatttccggtttgctcggaaacctgtcaaaatggtatcttgttttttcctccggcatatattcacctccactatataaattgtatcacacatacgtcggattgtcaatgcagaatttgtactgaacccaaaatcgggatatgttttatccaaaatgagcctatttacaagccgttccggctgtgatataatagagatacggtatacacctgaaaacaaaaccgtgacataaaaaggagaaaagaacaatgatcacagcagcaatcgtcggttgcggaagaatatgcgagaacgctcaccttccggcactgtcacagcttgacaacgtccgcatcaaatacgcgtgcgatattatcgaggaaaaagcgcagaagatgaaggagcgcttcccgaagatcgagaacgttatcaccgattacaacgtcgcgctgaacgatccggatgtcgacgcggtctgggttcttaccccgaactacgcgcactacaccgtaacgatggacgcgctgagaagcggcaagaacgtcctctgcgagaagccgattacaataaactatccgctctccgtcgagatggctgaagaggcgaagaagcagggcaagatcctgaacataggcgtctgcaacagatataacaggtctgtcgagatgctccgtcagcttgtcgatgaaggtaagttcggaaagatctaccatgtctactgctcgttccgcgagtgcagatcgattccgggactcggcggtcccttcacgacaaagtcgcagtccggcggcggcgctctcatcgactggggcatccatttccttgaccttatcctctacatcctcggcggcgcgaaaatcgagaccgctacggcagacgcgtacagcgagatggcgaaggacatgaagtcctacaagtatcacaatatgtgggctgagaatacctccgacgttgagcacggaaccaatgacgttgatgatttcatcacaggctacgtacgcaccgacaaggcaagcatttcgctcaacggcgcgtgggctcagaaccttgaccagagtgatatgtatattgacttcctcggcgacaaggcgggcgcgagactcgattacggcggaaagttccagttcttcgacggctcgacactcgagaccacgagacccgagtatgatatcccgaatatgtacctctgtgaagacaaggctttcgccgagtcgatcgaaacaggtgtgaagacccgcagctatattgacaatatcctcgagagtatgaagcttcttgacgcgctctacgcttccgccgacgcgaagaaggaggtcgacttcagatgaagaagctcggattcgttgatttctgtatcgacgaatggcacgcggagaattacccagcgttcatagaggcggctaacaagaagttcggcaccgactatgagctcggatacgtgtgggcggaagatgacgcccccgcgggaaagctcacgaccgacgagtggtgcgcgaagcacggcgctgtccactgcgcgagcgtgaaggagctctgtgagaaggcggaccatgtcctgattctctcaccgtcaaatcctgaatgtcatctcggtctggctgagaaggtgttcgagtgcggcgtcagcccgtatatcgacaagactttcgcgcccgaccttgagacggcggagaagatattcgcgctcgctgagaagcacggcgtgaagttcttctcgagctcggcgctcaggtacgcggatgaactgtcggcttataacggcgacgcgagggcggtttctataaccggcggcggctcgaatatcgaggaatacattatccatcagatagagatggcggtgaagtgcctcggaaagggcgcgggctcgctcgtattcgagacgatcggaaacggcgaccatatcacggtttcctacccggacggcaggagcgcggagttcctgttctccccggcgctcggcttcacggcaaaggtcaccggtgcggacgggaagaccgcggcgcacaatatcaactcggagtatttcgtgaaccttctcggggacatctgcaatttcttcgacaccggtaagacgtcgttcgacccgaaggacacgattgaggtcatgcggatacgcgacgcggtgattgagggaaaaggcaggcccggggagaggatctatctcaggtaaatatcagtataacggctgtcacgctccggcgggcagccgcttctttcatgtctgttttcagaaaatgaaattttttatgatttccggaacattgaactaaaaatcgacgtctaaacggtcagaaacaaaaatttccggaatgagagggcagcagcatgaaaaagaactctgttttacgaaggataatcccgtttgtcctgatgatcgcgatgatgttcacgtttgcgtgcgacaaggacagcggcggcacagaaaatgacaccgggaacgtacaggcggcgaaaacgtcgggaacggttcctcgcgcggacgctatgacactaattgacagtataagctctggcgaaaagatgtacaagttttcgtacattgatccggatccgtcatttgatggtttcagaggtgacagagccggactgttcagagagacatatgatcgccgcatgatcattgaatacgaagaagattactattactatgaaccggaaactgaaggatttacccacttttcgtttaacagatatactgatgatcagtatacatatagtgtcggcggcgtgtttctggaaacgccggatggcgggcatctggtgcgcggttggaaattcattaccgatgaattcaacaagcagcttgaaggtgagatcacacatgatgatctgactttagacgaaacagttatggttcatataagcagagacagtgaagttattgcctcgtatccgtgcccggatgaactgccgctcggaatggatttcaggacacagtatctgtctgatgctgacgggtatcaatatatctttgatacagcgggagaagataagatattggtgttctcaccggaagcggagtatcttttcagccttgatgaaccggaagataatcttaacccgctatttttgatgagagacaacgacggaaatgtcggctatgtctatatgctttttgatgattccaagacaagcgacggatttttctgcctgcgaacgatagatattgaaaatcaatgctggagcgatattgaagactgcaaaaagataccggtcctcgcgacgcatattaatggagagggcgtcaagaagctgatgttcggcggcggacttgattactattacgtcgacaagtacggcattataggcagaaacgagggcgacacaacaactgatctgctgttcagttggcttgacgtcggactgagctatgacgagatagcggctatgtccatatattcgccggagcttattttcgttgcactgtacaatccgggcggagaagggtacaagtacggcaagatcgagctcgtgacaactgaatcggtatatggcaagggcggcaagccgacaccgctgaaaatcgctgtcgacaaggcaaataacccctcagcggcagtaatactcgattatgcggcgtccttcatccgtagtgactacggctgtccggtcgaaatagtcgactacaccgacgaaggaacacgaacagcaaatcaggtgcttctccgggacatttcttccggaaatggaccagacatggtggttttcggaggtggtttgagttatgaggtacttaacaagtccggcgcatttgttgacctttataagctcggaggaaaagatacagacgacctgctcccgtgtgtcagaaaaccattcgagaacgacaagggtgagcttaaccgtctgatattctccttcgcaatcgcgaatgtggcaggctcgaaaggaaatgtaaaatctccgatgacggtcgatgacctgataaagctgaattcgagtcttggaaacggacagtatctgacatatgtgaccgatctgacagacgcttcaaaacaggctgatatgctgtttgcgaagcttattccgaatacgctcaatcagtatatcgattacgataacagtacagttgacacaaacggtctcggtgagcttatgaagctctgcaaagacgctaaggtttatggcgtcgagtggatattcgtcgacccgaatttgttccgtgacggaacgatagcgcttgatataagtgaggtttacgacccggcgcagtttcttctcaatagatacctgaacttctcaaaggaagatctcgaatatatcggatatccgggaatcggcacagcgtcagtaagaccgtataatagccttgcgatacttagttcaagcaagaatcaggagatggcatggaagcttctcagtcatatgcttgattgtcaggctgagagatattcgatgtgtgaagaacaagaccttgtaaagggcagcaatgcttttccggcgacatacagtggtataaacgcgctgtttgaccggcttaacagcgttcagtttatttacaatggcggatatcagaaatcgtcgaagggaaaggaatattacagtataagtataaacgcgtatgaattcagtggagagaagccgaaggataccgacagcataatttacggtgacgatgacaaggcagcacttctcgatattctcgagaatgcgaaggtttgttatactaccgacgctgagagtatttcgataattgaggaagaggcaagctattatttttccgggacgaaaaatcttgacgaggtcctgaagctaataaagaaccgtgtcgagacaaggctcgcggaataaacgatattatatttcgacagataaggacgggagagattatgtcaacaaaaagaacgctggcggtactgctcgcggcaatatcactgctttttcatcgtgtgccggagaatctccggacgtgacggcgtatgggagcacatcagacgaaagaatatcggaagaaattaccgcggatgaaatcaccacggatgacagcgaaacaacaaaaaccgaaacaacagaacccgtgccagacacgactgccgccgcgctgaccgaagacgatatacgaagcgccatcgaaaagaacctcgacgtgatagcgccgacggacagtgagctcgtatcggaaaacgacgccatagccgcgcacccggatgagtttgacaaaatagtcgcgctcggctcagacgccctgccgtacctctcggagatcggaaagggctatgaaagcatcggctcggacacgtccggcaacctgcgctgtttcgttgcgaaggcggcggagtacgcgatcgacccggaaaaatacgatatcacggtcgtgtctccgaacggaaaatacgctgttaaggcgacggtgaagtcgtttttcgaacttgccgacccgttttcgggaaaagaatattacctgcgtcttgtcgataatgaaaccggagagactgtcgctgacgcaggggagaatatgggatttaattttgtgttggaagacatatctgaatttacccattggtcggacgactgccggagcgtcgtgatagagcagaggtacaggcactattattcgtcgtgttacctttttactgtcgggaagaccggtgtagtgaagcttccgacaagcagtgcaacggaacagctttcaggggttaaactcgtctggaatgttgacggctctgatctcgacttcacacattttcagtttgatgagtggtccgatgacagcatggtcagggtcagaatctatgtcagcgataacgccggctggtatgaagacgccggctggtacacatatgacattcagaaagagagcataaagaagctgtactgtgaggtgaacggcgtttcggagggcgagacggttttcgtctgcccggatgcggacacaaagatcacggcgctttatccggttatcagcggtgagagtgccgggacgataaacacgcagatacgcgagtatgtccgcgggctttacgcggaacggattgacagcgattccaccgccgcgcaggattcgttgaccgcggaggtcagatatgaaacgacgcggatggatgaggatatcctgagcgtgcgcttcaccggacagaattccggcggagggacggcgctgagcgtgagcgagaccgggctgactttcgacatgaagaccggagaacttcttccgctctcggagctgtacacggcggaggatgtcagcgcgatgatcaatgcgtatttcgacgcgtttgatgagtcagaatatccgacgctgtccggacttcacacaccggatgagctccgcgcggattttcaccggcggttcggaggctttgagcctgagtatcactcgtactatctgagggacggtaaattgtgtctcatcgcgggtcagtacgaggattatatgtccgatacggattcatgggcgcacggacgcagaccgttggtcatggagacagatacaggcaaatcgaaataaaaatgataaagtcaggacatttttttgtgaatgccttgacttttcttttgtagtatgatataatacaattgtagatcagaaaccggaaggagcgatggcattgaagcacagaattatcacggcggcgcttgtcctcatggcgacgctcgcatcgtgcggcaggacaccgaccgaggatgaaattgacctgataaacaggtaccgcgggagcgtgggcgaaaactctgacgatgaatacgacgatatcggcgcgtcatggctctcaccggaagagaagtatgagcgtccggattctgacgattcgaggattgtcaacgttttcggcggttatgtcctgagcggcgaccggatatattatccagcgaagttctactatccggacagcgacgcgtacgagccgggctatgcgtatatcagcgggtcgaccggcgagtgttcggcgttgtgtccggacccgctctgcacgcacctcgacggaagcggatgcgagtatatgaacattgagcagattatcagcgatcccggctcggacagaatactgtacggaataaaaacgatcgccgacggagcatcaatcatgacctcgctctgccgtatcgatgtgaagaacgacgttgtgagagagctactgcgtgacgacgcctcaataatgcggctgagattcatgtcgggggataaaatctattacagcaccgtgaagacagagcgcgtgaagagctcagacgggcagatcatcaagagagtcaccgagagattgtgctactttgacctgaacaccggaaaggcgggcgttctcgacaacgtgtacggagattacagccgcggagaatttgttttcgctgacggcgggagattctggttccttgactccgcgaatggcagactgtttaagactgaccttgattttgaaaacgaaaagacaatgttcgaatacgaaagtgagtatcagatctctgatttcttctatgacacagatgaatccgctgcgtatatactagtccgcgccggatatatgaccggacacgccggggaagaactgattgacggatacatatgccgtatcgatagtgagggaaactgcgaaagacttggtatgccgtccgaccggatactcagcttctatctgaccgggaaatacatatattatacggcttacgacccgaaggagtacggggagtctccgcgcggcgggaaatgcacctcgtatgacaacgcgaaaatatatcggactgaccgggaagaaatgtctgaagaatcactcgttttcgacgggcaagacgagctgtttttcgcggattatcttccggtgggcgataatctgtatctcgattactgccgtttcatggacgaaggcgggaataactggttccgtgtgaccggtgtgacggcgcgcgtgaacataatgaataacacgataaagtggatgaagcttgactgaaaggcggtaaaaacatgacatccggagaatacaggaaactgctgacgccgttcaatatcgctcttctggtcgtacttatgcttctgagctttttcttcgccgtccggaactttcacgccgcggaatctggcggagaaatcggtatcacgacagacgaatatcaccgcgccgtaatgtctctcctgaatgactcggtgaaacggctcgacgatgtctctccggagaacacgtatctgtacagttactatctgaatgtccttgaccattatgaccggctgacagatctcgaactgccggaatcgccggttgtcgggtggaacgagttcttttcgcttgagacgccggttctgttcataacgacggcctcgctcgcgctgttctgccggtgtttcactgttgacacgcgctcgcggatggatatgcttatcggaatatcgaagaacggcgggaggagaactgtcagcgcgaaactccgggtcatagcgtcgctctcggctttaattacggtcgtgttttcgctgtctccgcttgccgccgcgggtttggtcagtggtctctccgacccggcggcacccgttcaggcgctcggcgcgctcacatattgcaggtatcggatgactatatggcagtatctcgtggtgttcattcttctgcggatactcatatttctgtgcctgtcgctgttgattgccgtcgccgggcagtatactggaagcgagctcacctgcgttgttctgactgttctgatctccgtttccggcgtgcttatgagcgggatcaggcagtcgtcggagctgtattttctgaggagattcagcccgaaggagctttccgggataaacgcgctgttcgagaggtatcgcagtctgcggattttcggcttctgcgctgattatacggtcgcggtgattctggcgtttctgctcatgtccgctgcggcggtctgcgccatgtatctatgtccgcggaaagcctcagtcagggagaatacgtcacgcggagtgagggtcagcggagcgcgtcttctgccgctgacggtgtcggaaatctataaacagctgatttcaggtcgtgggatatatgtcctcgccgccgcgctcgcggtcaggtgtgtcgtatcggtcgtgtattacagacagccgtcaggctcgaccgaagaggtctacagggaatacattggaagggtcgccggggcgccgactgaggagaaccttctttacatatctgaagaggagagccgcataaaaagcgtcctgtcagagcactccgccgtgatgaccgcgtaccggaacggcaagctgtccggcgacgaatatgctgaacacatgagccgttactcatacgcggaatattgcgggcgcgcctgcgaaatgcttgtcgagcggagggactatattttgtccattcctgacgagtacagcggcgttgagttcgtatatgacaggggtatacttctgttcatgaagtccccggcggacattccggcgctgatggttgtcgttttcatagcgagccggatattcgcgtccgagcgggattccggtttctcatacatactgcgcgcgtcgaagcgcgggcggcgggagacatccggcgcgaagctcgcagctgtgactgttatgtcatcgatggtgtatcttgtattctgcgcggtcgatctgatattcctgtgtctgaattacggcacatcgggattcggcgcggggataatgagcataccggagatgtcttacacagggctcgatatgagcgttctcggatacgcggtcattgaaaagatcatacagtttgtcggatatctcgagaccgtactgtttgtcaccggaatatcagcgctttgctccgagagcgtcgccgcgcttatcatatcgttcgcggcgcttgccgttcccgcagttgtttcgtattatttacccggtattacgggcgcgctgagcttcgtccgtttttcgtccgtttcggatgtttccggcgcgttcccgtgtgctttggtgtgcacggtttgtatgtttgtcacgctgtcatgcggtctgcggaggtggaacggcgaaaaaattcattttaccccttgacaaacgaaagattatatgctataatataacagcgctatataacagcgttacaaggaggcagcgaatgagcggcgaagataatacaacactcgggagaatactgtccgccgcgaagacggagttccttgaaaaaggcttcaagtcggcgtcactgcggaatatcgtgaaggacgcgggcgtcacgaccggggcgttctacggctacttcgcgtcgaaggaggagctgttcgacgcgctcgtccgcgagaaatacgaggtcttcatggggatgtaccgcgggacgcaggaggcgttcacaaagcttccgccggaggaacagatggcgaatatgggcaagctctccggggagtgccttgagcggatgctcgaatacgcttacgctgacctggatgtgttcagactgcttctgtgctccgcggaggggacccgatatgagaacatggttcacgacatggtcgcggaggaggtcagcgcgacgcactcgttcgcgcgggtgatggaggggctcgggtatgagaagtacgagctcgacccgacgcttgagcatattctcgtgagcgggatgttttccgctttctttgagatgattatacacgacgtgccgtatgagcgggcgtccgaatacctgaagaagctccgcgcgttctacaccgcgggctggaaggaaattatggggttttaggaccctgtaatttttgaacatgagttagctaaagctaaccagaatgacggatatccggagttgaatctccatatcataaatcatcttatttcaggaggggtgtttcctttgaaaaaggagtcaaatcttaaaagactgatgggatacgccgggcggcacaggtatctgacctacgcgtcgtgggtgctgtctgtcatcagcgcgctgacggcgctcgtgccgttcatctgcatatggcgtataatacacgatgttctcgacgtcgcgccggatttcggcagggcgaccgggcttgtgcgttgcggcgtgatggcggtcgtgttcgctgttctttcgtatcttatatatatcggcgcgctcatgtgctcgcatctttcggcgttcagggtcgcgactaatctgcggctcgaggtgacggagcatatagcgaagctcccgctcggctttgtcgacagcttcggaagcggaaaactgcgcaagataataagcgacagcaccggcgcgaccgagacctatctcgcgcaccagcttccggataaggcgggcgctctcgctacgccgatcgggcttctggttctgctgttcgtgttcgactggcggctcgggctgctcagtcttgttccggtttttctcggcttcgcgataatgtccgcgatgaccggcaagcgcatggcggagaagatgcgtcagtacggaaacgcgctcgcggcgatgtcgaacgaggcggtcgagtacgtgcgcggcattccggtcgtcaagaccttcggacagtcggttttctcgttcagaaagttcaagcgggcgattgacgagtatgagaagtgggtcgtctcgtacacaaaacagctccgtgtgccgatgatgctctacacggcggcgataaacggcgttttcgcgtttctgatcgcgggcgcgctgtggttcacgagcggcggggtcacaaatgagttcctgctgaatcttgttttctacattgttataactcctgtcatctcgctcacattgacgaagatcatgtatatgagcgagaacaagatgatagtcgaagacgcgctcggcagaattgattctgtccttaactccgctccgatgagcgtcagtgatagcccggtcagcccggcggattcttccgttgagcttgacgacgttcatttcagctatgacgggaagaacgaggtcataaagggcgtgtcgatgaagattggcgtcggacagaccgtcgccctcgtcggaccttccggaggaggaaaatcgactctcgcgagcctgatcactcgcttcttcgacgtgaacagcggaagtgtgaagataggcggcgcggacgtcaggaatatcgcgaaggacgagcttatgaacacggtgtccttcgtctttcagaacagccgcctgataaaggcgtcgatactcgacaatgtccgaatgggcagaccggacgcgacgaaagaagaggtcatggcggcgctcgaggcggcgcagtgcggggacataatcggaaaattcccggacggcgtcgacacaatgatcggaacgaagggcgtatatctctccggcggagagggacagcgtatcgcgatcgcgcgcgctatcctcaagaattcgccagtgataatcctcgacgaggcgacggcgttcgccgacccggacaacgaggcgaggatacaggcggctttcgcggagctcgcgaagggcagaacggtcatcatgatagcgcaccgcctgtcgacagtcgcggacgccgaccggatattcgtcatcgatgacggaaaggtcgccgagagcggaacccgcacagagctctgcgcggtgggaggactcttcgcgaagatgtggtctgactatcgggagtctgtcgagtggaaagtcgcaaaggagggctgatccatgataaaattcattcagagagcgaccgcttcatcgaaagagggagctgtaggactcaccaagggcgttattgcctgcgcgtttcagaatatcgcgttcatgcttccgacgggacttttatacaagcttgtgtcggatctcatgacgaagggaaccctcgaggggacagcgccgttctatatcatcggctgcgtcatagctttcgcgctgatactcgtcacgacgtggttccagtataacaacacctatttcactacatacgaggagagcggaaaacgccgcctcggcctcgcggagcgtctccgcagacttccgctgtccttcttcggaaagcgcgacctcgcggatctcacgagcacgataatgtccgactgcgaggtgcttgagaagacctgctcgcacttcattccggggcttttcggctcgcttatctcgactgttctgatctcgctcggaatgttcttctttgagccgaggatggcgctggcggcgctctgggtcataccggtgtcgattattattgtgctcctcagctaccgtgtgcaggacagcgttcaggcgaagaacatggcggcgaagatggcgtgtgccgacggcattcaggagtatatcgagacggtccgcgacctcaaggcgaacaacgccgagaacacatatctcgcggggctctcaaagaaaataagaggcgtcgagcgccagtcgatttcggctgagctcacgaccgcgatctttgtcacatcggcgggaatggtgctgaagctcggaatcgcgtcggtcgcgctgacagggtcggtgcttctcgtgaacgggagcattgacgttctgacgctgttcatgttcctgcttgtcgcgtcgagactttatgacccgatgcagggcgcgctccagaatctcgcggcgatcatcgctatgcgtacaaacgtcgagcggatgaacgagattcttgaacatccgattcagcagggcagcgaggagctgacgaacgacggctgtgatatcgttttcgatcacgtcggcttctcgtataacgatggcgagacagtcctgaaggacgtttcattcaccgcaaagcagggcgaggtcacggcgctcgtcggtccgtccggcggcggaaagaccactgtctcgcgtctcgcggcgagattctgggacaaccagaagggaaggatcacggtcggcggaatggacgtcgggaagacggacccggagaagctgatgagcctgtattcgatagttttccaggacgtgacactgttcgacaacacgatcatggaaaatatccgtctcggaaagaagggcgcgaccgacgaggaggttctcgccgcggcgagactcgcgaactgcgaggagttcgccgaaaagctgcccgacaagtggaacacggacatcggtgagaacggctgtg

SEQ ID NO: 3996 - DNA, 1864 bp, Unknown
  16S sequences of unknown bacteria
tgatgtctgggacggctgaaatgttggcactgggagctttgagtaatgtatattgttatgttggcgtgacagaaaaaacattggttatcgcagtgttggaaacttttgatatctcgcatatttacggtaaaatctgcattccgtttgaccagtttgacgaactgaaagtacaaaaaggtttactgccttcccagcggatcatcaaagcgaaaagcgggaaaaccaaaataaaattgtcgctggtcaacaacagcatcaccgccaaaatcaaagatcaaaaacaggggatgcttgcgatttgcgagacgctggagcgtttgaaacactgattttcataaaagcaagagagaaaatgaacaatataaatgagaaccgaacagacaaaagagcgcccggcggcgaaaaaagcaaggcggagttaaaatggtttattttgttccttgccgtcatcttttttctgccgatcaccatcctcgcggtgatggaatggtttacaagcgccgatgcctttgccatcggaatcacggggtttatgcaagccgtcattgtccatggcggtttagggctggtagcggtgatcatcgcccttgtcttattcgtactgctgattcggccggacgcaacgttcctgcaaaaggtcggcagaaccgcaggcattctgctatgcgtcgccgccgctttcttccttgtccggccgctcgttttggacattccctatctcaagcgcccggaagccgcctatttggagcggctggaatttgaatattcgcgagggatcggggactatggttcggacgactattatctgcgcggcgtagatatgaccggcgagcggcattcctttgaaatcagtgaaaagaggtacgaggaagggcgcgcgctgtggggcgggaacgactacaatctgtttgcgaaagtcacctacctgccgcacacctccaccttgatgtcgctcgaatttatgacagaactcgacgcgtcaggggcagaattgtacccaccatcccctgaactcccgaatgattgggaaagtttttcaatccagatcaatgatacggtttatacattaccagttccccttgcggctttccttgacgatgggtgggtgatttccgaggaggatgccgggctttctctggctggcgcggaaggcccgtatgcgtcctatgaatgggaatgggtctcgttgaccaatgaccacgagcaggatatcagcgtctgtgtcttcaacaccaccgaaagcacgatccccgtcgccgagagcacggtgggaggtattcatgtaatatatggcaactacgacttttccggtacagaactacgccttcccggtgggttgatgctgggatggtctaccagagaagatgtcttaaaactgtatggccaaccgaacgatagctttgaggcaacctatggtggatatagcttgaaatacgaaattgatgaccctcttgacccggcctcttggaagcttggttttgatgattcaggcattctagacgatgttatggtacaccaccaggcctatttccgttctgactaacgtcatggaatatgtacatcttaccagtcatcatttaaggcaaagaaaaccgcttgtcctagtgacccttatctcggccatagggacaggcggtttagttttttctgattgcttacacgctgctgatcttgtgtcgtgtttatgcaaaattttagggccgcggtgaaaggcgacggctcagaagctcaaaaaagaaaaatgtataactccagggtaatctccccttgacaaatcggcttccaaaagaaaattctccaaaaggccgccaaggacaagggttacacggacactatctttttcgtggatgacggtatcaccggc

SEQ ID NO: 3997 - DNA, 2182 bp, Unknown
  16S sequences of unknown bacteria
cccggtttttttcgtctgattttgctgtaagaaggaggcagtcttatgcagcgccgattccccgccctgctccgggccaatttccgcaacggtcgaatgtgcctagcccattagaacgtacatgaactgtgcatggacaaattggaatagataaatttagcatattataaaagaaaggttgattttcccatgaaaaagtttcttgcaacgctttgcaccggttttctgctcctcggtctgctggcaggctgcggcagcaagagcgactctgtgaccatcgccgtccccaacgatacgacgaacgaagcccgcgccctgctcctgctgcaggataacggctacatcaccctgaaagacggtgccggcatcaccgccaccgtcaacgacatcgccgagaacccctacgatatctccttcaaggaagtcgaagcggcccagctgcccaacgtcctcaaggatgtcgactacgccatcatcaattccaactacgccatcgacgccgatctcgacccgatgtccgattctcttctgatggaaggctcctcctccgcctacggcaatattctggctgtcaaggaaggcaatgagaattccgacgccatcaaggccctggtcgccgccctggagagccaggaagttgccgacttcatcaacaccgagtacaagggtgccgtcgtcagcaccgtcgacaaccccggcaccggctttgacgacgccgtcgattacgacgccctggctgggacgacgatctccgtcgccgcctcccccgccccccacgcggaaattctggaggttgccaagaaaattcttgccgagaaggatatcgccctggatatcatcgaattcaccgactatgtccagcccaataacgtcgtcgaaagcggcgaggtcgatgccaactacttccagcacaccccgtatctggatgacttcaacgctgagaacggcacccacatcgtcgcggcagcgacgatccatgtcgagccgatgggcctgtacggcggcaagcaggattccctggatgccatcaaaaagtaattcttaaaaatacggaggtaacgccagcacaaacgtcgccggcgttatttccatttggaggaaccacatgatccagatccaacacctgacaaaaaccttccagaccgccgccggaacggtggaggccctgaaggacatcagcctgacgatccccgacggcgagatctacggcatcatcggcatgagcggcgcaggcaagagcaccctggtgcgcagcatcaacatgctggagcgcccgacgggcggcaagattttcatcgacggccgcgacatcggggccctctcccaggccgagctgcgccgggagcgtcggaatatcacgatgatcttccagggcttcaacctcctgatgcagcgcacgtgccagaaaaacgtctgctttcccctggagctggcgggcatgaaaaaagccgacgccatgcgccgcgccagcgaattgctggagctggtaggcctgggggataaatgcaagagctaccccgcccagctctccggcggtcagcagcagcgggtggcgattgcccgcgccctggcgacgcggcccagaatcctcctctgcgacgaggccaccagcgccctagacccgcagacgacccagtccatccttggcctcatccgagatatccacgataagctgggcatcaccgtcatcgtcatcacccaccagatgagcgtcgtcgagcagatctgcacccgcgtcgccattctggacagcggcgccgtcgccgaagagggcgaggtcagcaaggtcttcgccgcgccccagtcggaagcggccaagcgcctggtctaccccgacggctacgagcagagcgccgtggtctttgatccgggcagcatcctgcgggtcgtcttcaatggcgccaacgccgccaagacaccactgatcgcccagatggccatggacgaaaatatcgccgccagcattctctccgcctcgacccgcagcattggcgacgtggcctacggcaatatgctcctgggcatccccggcggcccggcggagcgggagcgcgccgtgcagtacctgaaaagcatcccggatattcttgtagaggaggtctcgaagcatgtctgaatttttcgcatccgacgccttccagactgcgctggacgtcctgaaaaaccaattccccctggccat

SEQ ID NO: 3998 - DNA, 7674 bp, Unknown
  16S sequences of unknown bacteria
actttaaaaagaatcacattttgattctttttaaaatcaggcgacaatcaatggatactgacggtcaaaacaaaggttttgacccataaaatcgagattttaactcgattttttataattgcatttgctaatgcaattattcagtagacattaatttagacattagatgtgcagaccctaggctcccttgtgtaaaggaagctgacagagggattgttagtgactaaagcatatttacaaattttatttttctaataaatttaagcttgtaacaacccctccgtcatagctgcgcatgacacctccccttacacaggggaggctatttttggtgcatgccaccgtctcggctgccgcctcggtcggtgcttctgctttgcagaggtatccgccggacacccgcacccttacaccggggaggcagagggttgttcaaagccttcatccgccctgaacggtgaaatcaaatttaccgtcctgctcggtgcaaagcaccgtgtcgccgtttttaatgcttgaatcgagtatcttctcgctcaaggcgtcttcaattttattctgaatttcacggcggagcgggcgcgcaccgtaaacggggtcaaagcccttttcggcaagcgcgtatttaaccttttcatcaaagttaagggttatattaagcgcttcaaggcgttttttaagtcctgaaagcatcttatccgcaatttcggcaatctgctccttgttaagctttgagaatactataatatcgtcaacacggttcaaaaattcggggcggaaggtattgcgcagctcaccgagcaccgccactttaacgtccttggtgtctgagctgtcatcagcgtcaccgaacccgaacgacacctttttatcggttataagccgtgcgccgacatttgaggtcataatgatgaccgtattcttaaagtcaacgcgccgcccctgcgaatcggtcagtatgccgtcttcaagtatctgcaaaagcatattgaaaacatcggggtgcgccttttcgatttcatcaaaaagaattaccgagtaggggttgcgccttaccttttcggtaagctgaccgccctcctcaaagccgacatatccgggaggcgaacccacaaggcgggaaaccgtatgcttttccatatattcggacatatcgagccttatcatcatattttcgctgccgaacatagcctcagccagcgccttgcaaagctcggttttaccaacgcctgtaggccctaagaagataaacgagcctatgggacgtttcgggtccttaagccctaccctgccgcggcgtattgcctttgcaacggctgttacggcttcttcctgccccacaattctgcggtgcagctcgtcttcaagccgcaaaagccttgcgctttcctcctcggtaagctgcgccacgggaacacccgtccagcttgatactatttcggcgatttcctcttcgcttacctcgccgcccgagtggctgctctctctgcgccagctttcctttgcctgcttgtattcgtccttaagcttattctcgctgtcccttaaagcggcggcacgctcaaattcctgcgaatttacagcctcgtccttttccgcctcggtattggcgattttttcttcaagctctttaagctccgcaggcgcggcacttgcggtaagacgcacgcgggaggccgcctcatctattaaatctattgccttatcgggcaaaaatctgtcgcttatatagcgggctgaaagctttaccgccgcctcgatagccgcgtcggtaatttttactttgtggtgcgcctcgtatttatcctttaagcctttaagaataagcactgcgtcctcttcgctcggttctgccacatttaccggctgaaaacggcgctcaagggctgaatccttttcgatattcttgcggtactcggcaattgtggtagcgcctataagctgaaattcaccgcgcgccaatgcaggcttaagtatattagccgcgtcggtcgagccttcggcagagcccgcgcctataatggtatgaacctcatctataaagagtatgatgttacccgattttgtaacctcatctattaccgatttaattctttcctcaaaatcgccgcggtattttgtgcccgcaaccattcccgtaaggtcaagtgtgaaaacgcgcttgttttcaagaatatcgggcacatcacccgaggctattttctgcgccaagccctcaacaatagcggttttaccgacgcccggctcacctattaaacagggattgtttttggtgcggcggcaaagaatttgaattaccctttctatctccttttctctgcctataaccgggtcaattttgcccttttttgcagcggcggtcaagtctctgccgtacttgacaagcgtgggggctttggagtcggcgtcgtcgcttgcagtacctgcagtatttacgctttgtgtatcctccgggtcaatgccagaggctttaagcgcctcggtggtaagggcagccgcgtccacgcccagctcgttaataaagcgaattgcgtagttatcgccctcgcttaaaatgcctatgagcaggtgctcggttcccacatattttttgcccatattcgcgcagcccgccatggcggtttcaataacccgctttgcgcgcggcgtaaagtaatcgggcgaaagccttgtaacggtgccgcagcctatattcgcgcggatcagctcctcaatattttctgcggttattccgtttttgttaagcacagccgccgcaacgccggtgcctattttcaaaagtcccaaaagcaaatgctcgctgcccacatatgtgtgacccagttgctcggcagagccgatagcctgatttaaagcctcgtttgcctttgtagtgaatccgttaaaattgtatttcataaaatgtagcctcccttatcgggtttttaagattttagttttttattttaatgcgtcgcgaataaaggcggcgcggtatatatcgcgttcctcgggttcaagctgcccgtatttcttcatcagcatattgggttgaccctctataaacagctttattggaagaacgtccgttttgattatgcccatacttatgccgagtttaatccgtgacagtaaatccatcatttccttgcttgataatatgcggctgttttgcagcgtaccgagcgccctgaagcacatatcctcaagctttattttgttgagaccgtttctcgccttgcgttccttatctatcagctgcgcggttattattttaaggttatctatcgcgttcttctcgctgattccgagggttatctggtttgaaacctgatacattgaggcgcttgcctttgagccctcgccgtacattccgcgaacggtaaagcctattttacccaccgtttcggcaatggatgatatttcgccgttcgattcggtcacgggtaggtgaagcatgacagacgctctgagccccgtgcccaaattggtggggcactcggttaaaaagcccaagcttcggtcaaaggcaaagtgcagctcgttataaagcagcgaatcaagctgctctgcggtatcgtaagccttttcaagctgcaagccgcctaaaatcacctgtattcttacatggtcctcctcgcctatcataatacttatgctctcatccgccgaaataattattgcgcggtcggcgttttcttcggcaaattcggggcttattatgtggcgctcgaccattgccgcaatttcggtctgcggaacgtccgccatatcgatatatttaaggcttttcgcaaacggagtgttgctttgaagcacggcgtttttaacctttaaattaagctctctgcgctgctctggggtcattctcgcgggaaaaggcaagcccgataaattgcgcgccagccttattctcgtgcttacggcaatatcgtcctcgggcgcatgagttgtataccagctactcattttccgtctcctccagtttcttaatcttatcccttacgaccgccgcctcttcaaagcgttcctcgcttacaaggcggttaagctccagccttaagctatccgccgtttcctcctgcggtttaacggcgagcggcgcgctgttaggcaccttgccgacatgctttacgctgccgtgcacccttttaaggtaaggcagcagctcactgtaaaaggtcttgtagcactcggcgcagcccgccttgccggtttcggcaatatccgaaaatcttgagccgcaaaccgggcagcgggtctcgtttccaccggcgctaagtcccgaaatatccccgaacatcgaggctaacatatccgcaagcccgccgtgcgggaatttcgagtacccctcctccgcagcacagctgctgcaaagattgcgctctgtcaccacgccgtttattatctgtttaatatgcgttgttgcattgttctttccgcatttatcacatagcataaaaatcgctccttgttatttgatttgtgtgagcagcagctgttttaaaagcgccgctcttaaggtatcgcggtattcgaccggcaccgcctgcaaaacagcagcagataccgccgtggcaataagcttcgccgcctctgccgatattatccccgattctatacagttttcaagaataattctcgtcgtcatcgggtctaccgcgccgcctatggaatttataatgtgcatgagcgcagaggtatggctcataacaacacgccttattcttatatatcccccgccgccgcgtcggctttctatcatatagccgtgctccggcgtaaatcgtgaggaaagaacataatttatctgactcggagcacagccgatgttattggcaaactcgttgcgctgaatctcggcggtgttcgcacccgactcgtttagcatttttattatttcctgtgttattaaatcgctcattctcatagcatacacctcattttgacctttcctgactataattatacaccaaagtcaggaaaagtcaaatacttttttcaatttttttaaaaaattttttatcctcaaaaagcgcaaatcggcgggaagcatttcccgccgatttgcgctgaaaattcactgtgattttaactgcctataatcccgcgtaattttgcgatgttttctttaattgttccgtcctttgaaaatacaccggaggttcccgaaacaaaaatattcgcgcccatttcgttcataagcgccgcgttgtgaaagctcacatttccgtcaacctcaatttcaatattgtcacaccctctttcatcaagatattcacgaagctttttaattttttcaagggcggagggtatgagcttctgtcccgcaaagccggggtcaacggtcataacaagcaccccgtcaatatcgtctgtaatattttcaagcgcgcatatcggcgtgccggggttaagcgccgccaaagcccggcagcccttatttttcaccgccgcaaccgctttatgaatgtgcggagtcgattcgcagtgcaccgctacataatcatccggagataattgaaaccaatcaagcttactttcgggattttcaaccattaggtgaatatcaagcggaatggcagtatttgctttgagtatctttacaaaatccgtgccgagagtataattcggcacaaagctgccgtccataatatcgacatgaagcatatcaattttattttcttcaaactgccttatgcaatttttcaaatcaaaaaaatcggcgcacatgacagacggggaaattttctttttcatgtttaatctgctccctgcatatttaaaattactttattgtaaaattccgttttgttcttcatcatttcgaatgcggtattgcattcagaaagcgggaatttgtgcgtgataagcggcttgacatttagttcgccgtcagccattgccttaatgctttcatgccagtcgttaacgacattattataagatgaattccaggtgccgtttatacacagctccttgcggagaatttgccaatatgtattttgtgacattgtgacttcgcccgccgggtttcccataagcaccattcttccgtgcggctttaccgtctcaaggcatttttgcagagcgtccgaataccccgtcccctcaagcgcgcaatcggtaaccgttccgttttcccactcataaaagccgagtgttttcgcaaattcaagctttcgcttgtcgatatcggtataatatactttttttgcgccgaaaagcacagcccactgccctgctataagacctatagggcccgcgcccgaaataaaaacgctctccccttttgatatgttcagctttccggcggcgtgtctcgcaaccgatacaggctcgcacatcgcaccctcgtcatagcttaaacctgagggcatttttacaaggttacaccgctttacagctatgtattcggtcattccgccgtcccgccgcgagccgtaataatcataattttcacaggtggcgtaattcccctccctgcagcttttgcacttaaagcagggcaaaagcggaaaaacgcatacattttcgtttgtcatcagcccaagcggatcgaataccaccctgcccgaaaactcatgcccgattacagtcggaaaggtgtaggttcccttaacatatactctgccaagatcgctgccgcagattccgcagctcatcaccttcactataacctcatcgccgccgcattcgggaaaaggcgcttcctcataccgcagatcgcctataccgtataattttgcgcatttaactgttttattcatagcattaacctctttacaacagttttcttatgtgctaaaattataatcaaatatgagcgttttaacaatatacggcgctgctattgattaaaaatcaaaaatatcgattataaacaatcatataagaaataaatcgaaagcgggaaattttatgtacggcatagagcgtcaggaaaaaatattgagtctcttatcggaaaatgtaagcataagcgttaataagctttcaaagctgctttatgtaagccagccgactgtcaggcgggatctgagcgagcttgaacggcagaaaaaggtaatccgaacgcacggcggggtagtaataagaaatgcccccgataacgaaataccgcttttgtggcgcgaggagcagaataacgcttcaaaaaagaagatatcggaaaaagccgcggaatatatacataacggcgacattatttttatggacgcttcgtccaccgtttcctatataataccgcatttaaaaagcttcaccgatataatcgttgtgactaacagccccaaaatatcgctgaaattaggcgaggagcgcataaaaaattactgcgcaggagggcttcttctgcagcattcgattgcttacatcggctccgaagccgaagcctttgtttctcatttcaatgccgatatatttttcttttcaagccgcggctatacagagggcgggttcataaccgattcctccgcggaagaggcgtgcgtgaaaaaagcaatgcttaaaaatgccgccaaaagcttttatttatgcgattcaagcaagaaaaataagaaatacatgtataacatctgccgaacggacgaggtctccgtaatcaccgaattgccgtgattttttctgtttatatgtcgtgtatgtgttaaaatgatatgaaccaataagaagagaagtttcaaccaagatatg

SEQ ID NO: 3999 - DNA, 9887 bp, Unknown
  16S sequences of unknown bacteria
gaagaggacgcgcccgcagaagacagcccttattcctgcggcccccctcctcctcccggcccgccgtctttcggaggagcagacattggtttcctacgccgcattctgggcaaactcggcatggcggacgttgacaccggcgacctgctgcttctgctgatcctgtttctcctgttcaccgaaggcgggagtaaggatgaagagttgatgatcgctttagggctgctcttgatcctatagtacaaaaaacaactggggctgtgaacaatcgttcacagccccagcttcttcttttgctgcagcctgatgacacagaataccgcagaccggcggcagagctgctccccctgtaatttgtagggggccaaaaggacccccattggctcacgtccctgtttgcagggcgcagtgttataacatgacggctcccctcttaaagtgcctgaccgctcaatttttgattttgggatgtttgttatcgcagttgaaatgggcggggaaaatccatttcaaagctttcccgccttggttgttgtttcgtaaaggctgggaaagctgtcaccgacggcacatttcatgcgccgtttcttttgagcttagttgtcccggctgactttgccctgtgctgcactcatagataaatacgtcgcacttagcattaatttccaactaattccctattttctcacatcctaaaattgctcatagattcggctcaacaaaatgaatagctgaatgatcccaatagtttctatagacccggctttcattgccgtcaaggttaagttggtaagtccgaaaggtcaccaaaatgtttttcggctgccattgttcctcgtaagaatattggtatttcatacccacatttcgcatgacgccgccgcttctgggattgttcctgtcatgggtggccgtaatatagggcaggccgtccttttttacctgctcgataaccgctttgcccgcttccgtcacgattactttatgccaaaattctttacgaagtccatagccaaaatcgtggtgttcttccatatccactttgatgtagccgatgggataattgtcctctttcagacagatcgcataggcataggcttgcggctgagtgtattttgcagcataccgctcctcataaaaccgctccgtttcttccaggttttttacaggataccagggcaaaaactgattgacttcttcgtcctgaagaataaagaacagcgcttccatatcctgttctgtaaattttcttaaaatcaaacgctctgtttctaaagtgggcgtattcatctggttttctctgttatctaaattctccataggcttttgtgtacggctcatgtataaaagcggataagggtttccctgctcgtcatagtctgttcttttataaacctgaaagcccatgtgctcataaaaaccttttgcccgcgggttctgctcgttgaccgccaatcgttccacagcatatttttcaattccatattcgattaggcgttttcccagccctttccctcgttcttccggtgcaatgaacagcatttccagcgatccatcctcaacgcccataaaggctacggcgcggcctgcttcgtcttccgcaaccaccaaatgagcaaccccattcaacgcctgcgggacatactctttaatgctttgaatttcaccatccgacagaaacaggtgggtcgctcttacagaactttcccatactgacagcaaccgatttgttaaatctggtgtcctattctttacttcaataattttcatttttctttcctcgttgtaatatgtgtaattttataaaatccgattttgaacctatctgtatcaaccactgtttttcttttgtcagcctatagggaaaccggttttgcttgcaatcaatcaacagccattgttccagacggcagcccttaaaattcgccgcctcgtccaactcttagtcagttcagcggcaacgaaattcttcggagcgccctccgtccggctgtgggtttcctgtatatcctccataataccgcctctgtcgtcatgtacccggcggctgaatacatgccctcctgcacacggactgcattcagcagagaagcggttccatcatgctctcccggccgacaattctccatgattttacgctcgctgtatcaatccacgcgttcagatttcggattcgcccggtggcaataccgttcacatagatttcaagatccgcctgcagtttgacaaaatccctgtgtgcggcaaatctatagagcaaggccgcgtcaaccttctcgttttcaacaggtcaatgaatttatcactcaaatgcaggtctgcaagatcggcaaccatcccagcaaatagtcggcggtcatgccgcctcttcttttttaatctccttggctcttaccacgattttctaatttctctcagcaaagcaaccgtaatgtcctttgcaatagctgaggcttcagcgcagttttcgtcaaaattgccaatcccgctgtgttctgcagtatcggtcacacatcgaattgcgataaatggtatgccattcacatagcacacatgagcaatacctgcagtttccatatccaccgtcaatggcgcaaatttattacaaattttttgccgcccatcatcggttataaatggttcccccgataccatccggccccaaaccacctgttcagagggcataagcttatcaacagcagcctttgacagatttatcagccttgggtctgccgtaaaaaatacggatttcatccacggatgaaattccgtcaaaatgtccggtgcaacatcatggtaacaaacttctgtggagatgactgtatcaaatatttcaaggtctggctctataccgcccgccgtccctgaattaataatgatatccacacaaaatacgtctatcaaaagttgtgccgctatggcagcgtttactttacacacgccagaaaacaaggcaacaacttctgcgccctcgatctgtccagcataaaatttcagcatagccttttctgttatcttacaattattaatcaaaggtaaaaatggggcaagttcttcatcgcccgcacatataattccgattctcatggatgatatcctcttacggcttgaaagccgatttttatgtttattttaccacaattcccagcgcctggaaacagagagttttccggacggattccctgctttttgaatatagggcgcgagcgatcaaaaagtcctgcacttagagcagttcatcagtgaacggcatcttgaaaaccaagcgaccatccgaaaggaatagccccgcctgggaagcaacgccaagaacctgatccaaggtgtcttagggggaacgtaccaacgtcggaacacgccgcaggaacgaagcaggaaacgctttcggagagaacggcagcaaaaaaatgaatggaggaacgaaaggcattctcagctcaatggaatcaaagcgctttccttaaatcaatcagatttgcataaacaaagccacacaagagtttgtagctcttgtgtggctttgttccgtatcggtaatgtccctgggttcagttcgtttccctatggacggagcgcttaggcacgcatcgggtttcgtttcaatttctctgaaaaaggatcagcgcttttccagcgggacatacgtgcgctcatcctcgattacgctttcataggccgggcggatgattttatccatattcaccagttcttccagccgatgggcgctccaacccacagaccgggccacagcgaaaatcggcgtataaagctccacagggatatccagcatactatagacaaagccgctgtaaaagtccacattgacgcagacgcctttgtaaatttttcggcgctcattgatcagttccggcgccatgcgctcaatgttggaataaagtgcaaagtcttccatgcggcccttttcttccgccaatttctgtacatatcccctgaaaacctctgcccgtggatccgataccgcataaatggcatgtcccaacccataaatcaggcctttatgatcaaatgcctttccgtccaaaagtttcgcaagataatcacgaacctgtgtttcgttggtcgtatcctttacagactctttgaggtctttcatcatttccatgacttttatattggctccaccatgcttgggtcctttcagagaagtcaaggccgcagccataacggaataagtatccgatccagcagaggtaaccacccgcgtcgtaaacgtagaattgtttccgccgccatgctccatgtgcagaattaaagccgcatccaaaacatgggcttctgtctctgtataactgcaatccggacggagcagacgcagcatattttccgccgtggagagctggggatcgggccggtggatataaagcgagtcatcacataggtaatgattgtaagcctgatagccataaatggccagcagggggaacacactgatcagctgcaggcactggcgcagcacattgggcacggaaatatccatggcgctggggtcataggacgccaggctcagcacgctttttgccatggagttcatgagatcgctggtagcgcctttcataatgacatcacgggtgaaatcctcaggcagccgacggcaatcgcataaaatactgcggaattcttccagctgccatttgtccggcaattccccaaacagcagaagatacgccacctcttcaaatccaaacccgccgctgctgatacagttacgcaccaaatcaattacattgtatccacgatacagcagtcgtccgtcacaggcaacttcttttccatcgacaacttttcgtccatcaacgcgggatatatttgtaatacctgtaacaacgccgtgcccctgtttgtcgcgcagaccgcgaaacacgtgacaccggttaaacagcgcatcgtcaatcgtatcatgcttatagcacagggcgctgctgtgccgcgcataattggaaatggtctctctggtttgctttgcgcgtgtcaacgcatccttaaaacgctccatggaaaagcctcctgtctttggatattaatattattttagcgtactaaattgataaagtcaatctattttcataactttgtgaaatttccgacgaacttgggcagcgccccacctgctatacgggattactttcgccgcctaatcctcaggcccgcatcagcttcgtccggggcgtgcaaaagcttcctgctgcgcaggcaaaagacggtgaaggtgacgataccggcagtaaaatcggcaatcggttcggccaaaaacaatccccacacgcccagtccgaacaaatgcggcaggatgagtgccagcggccagatcagaaacaacttccgcaggcaggccaaaaacatggaaatcttcgcctgtcccagcgccaggaaggtgttttggcaggcgctctgcgctcccatggccgccatgcccagaatatacacccgcagcggaagaacgcccatgttcagcaaagatgcatcgttggagaaaatacgcagcactgcgccaggaaaagccacaataatcgccactgcactgatggaaaacaaaaggtcggtcaggaacagaagccggaatgtttcacgggagcggtccaactgcccggcaccgtagttgtagctgatgataggggaagcgccctgggcaaagccgttcagcggcatccagacaaattggatcagcgaaaaaaggatgctctgcagggaaacataaagatatccatagtgcgccatgctgatattgtaagtcagctgcaccacacactctgtaatccccatggtaaagggcgaactacccaacgccagaatcgatatcaccagatcttttttcagccggaaccattttctacggatatgtataaagccctttttgctcatcaggaaacccagcaccatcaacgccgaaacggcttgagaaatcaccgtagccaccgccgcgccgacgacacccatatcaaaaccgtaaatcaagatgggatccaagatcagattcagcagtgcacccacacaagtagtggccatactggtttttgcgtacccctgattggtgataaaggcattcaggcccagcgcaatcataacaaaaaacgtaccaatcagatagatgcgcaggtatgctgaggcataaggcagcgtctgtgcattggcaccgaaaagggtcaggatcggatcacaaaacacctgaaacacaataaaaagcgccacagaaacacctgcaagcatacaagtacactggccgagaatctgttcggctttctcatagtgcccctcccccatggcaatagcggcacggggcgcgccgcctgcaccaatcagctgtgcaaacgccgtgacaatcatggtaatcggcagcacaatacccaatcctgccaaagccaaagatcctgtgcctgcaatatgccccacaaaagcgcgatccaccatattgtagagaagattgaccacctgagccaggactgacggcagtgccatacggaacaaaaggcctggaatcggttctgttcccagcttgttgttttttgttgcagtaatactcatcgaataatacacttctttgcttttcaaaatttctaaaacctgctggagaatcgagatagtagttaagaaagcggcggccaaagccgccgcacactttacaaaacctcgtcgcaacaaaatgcccccggtaaaaaacagttcctcgttttttccgggaacaaaacggcccgctcatgtcaaagccgtcccgtccggcagcgtaaacagcgccgcatccggcacgctcacggagacttccagcccttccatgcgatagacctcatttccattctgcaggcgctgcgcagccaccaaaagccccgtatccaccgatacccaataacactcggcatagccgtcgtcatcctctttcgtttgggcgtaaatacaatccaactgttgataggcttcatagccggcatcggtaatttcggagggcttcaatgcaacaagatcctcataagtcggaatccactgttcttcatcttgagaaaatgctccagtacgcaccgtagaatacgtgcgctcattgttgtaccacatatatgtactctcgtctgtgcgcagcatatgacgcacctgaccaccgggcagcgtgagatccgtgcgcaccagttcaccgctgacggcactttctactgtaatcgtaccgctgccgccgctccagaacgtagtcagcgtcatggtgcgggaataggattccggccgcgtcagtgtatccaccacacggccgaccgtctccgccgtcacttccacgcgctgcactgcgtttccgcctcctgccccttcgccgggatccgatatgtcagaggcagaattttcccctggaaggacaatttcctcccggtccagattaagcagcggataacccagaaacaggaataccgccaacaggatcatcacggtgatgccgatggtcacacggttcatctttcccttgtccaacggtgctccctcctccgcgtaccgccgctttatcggctctgataatcctccggacgttgtgcgcgccggttgaaacgccacaggatcgcttcagcgatccggcggcaggcctgcccatctccatatggattcaccgcgtgagccatagactcataagcgttgttcgactcgatcagttctgaggccatggacacaataacatccctctccacaccggcgatcttcaccgtaccggcagtgaccgcctcgggccgttccgtttcccggcgcagcaccaaaacaggtttccccagtgcgggagcttcttcctgcaaaccacccgaatccgtcaggaccatataacaccggcccattaaattatgcatttcatccgccggcagcggatcaatcaaatgcactcggggcgccccagccagatattcctgcactgcctcccgcaccacaggactcaaatgaacgggatacaccagctcaacatcctcatgggtctccgcaatctgacgcagcgccagcatgatatttttcatcggctctccgtaattttcccggcgatggcaggtaaccaggatcacttttttgcttttataaggcagcgtgttgagtacttcggtcgcaaagtgataatcttcacgcacagtggttttcagcgcatcaatcactgtgttgcccgtaacaaacacaccctcggtaatgttttcccgggccaaattttttcggttattttccgtagggcagaaatgcagttcggcaatcgctcccaccatcttgcggttcatttcctcggggaacggagaatagcggtcatacgtccgcagcccagcttccacatggcctaccgggatttgatgataaaacgcagacagcgctccggcaaaagtagtcgaagtatcaccgtgcaccagaatcagatccggctttttttcctcgatcacatcatccatgccggttaagcatttgcaggtgatggaagaaagcgtctgccggggcgccatgatattcaggtcgcagtctgcctgcagcccgaatacctccataaccgaatcaagcatctgccggtgctgcgctgtgacgcagcaaatgggttcgatctcttcgtactttttcagctccagcaccagcggggccattttgatagcctcaggccgggtaccaaatacgctcatcacacgcagtttttccacgttgtgctcctcctttttctgccgccggtcttccggtggctgccttcgatgggtactatgctctgccgctggtctcactgccgtccgtgtccgacccttcaccagcaagtgtttcctcgtcttccgccggctgcgcgccggaagacggctctcttctggaagccgcatcttcgcgcacttcctcttcgatctctgtaagctcctggcgcaggctgtgctctttgaaatgtttcttctcctcatcgctcatatgcggcagaaagataacccgcacagcaatcaggcacacaataatcagcgccatcaggcacaaaatggccttgatctctccgctggtcgccaacaccacagcgctcaagcccagaatcgcagaaataacatacaaaaccgcgactgcctgcttttggttcaatcccatatcgatcagccgatgatgcacatggctgcgatccggcgccatagggttctgcccatgagaaatgcggcggataatggcaaacattgtgtcaaaaatcggcaggcccaaaatcaggaacggcaccacaaaagaaatcaccgcataaaatttgaacaatccctgaatggtaatacaagccaaaatataccccaggaacgtggagccggtatcgcccatgaaaatcttggccggattcatgttatagggcataaacccgatgcacgcacccaccagtgccgccatgatcaccgccacctgcggctcggccaccaaaatggcaatagccagcatggtcagcgcactgatggaactgacgccgatagccagtccatccagcccgtcaatcagatttacggcgttcgtaagccccacaatccaaatcacagtaatgggaatagacagccacccaaaattccaatagggattgtcactgaacagatttggattgctgatgcaggtgatctgcacaccgtaataaacggggatcagcgccgccaaaatctgtattacaaacttgagactggcccgcaggggcgtgatatcgtcgataatccccataaccactataatcacgctgccgagcagaatacccttcatttggtcatcgacctctacaaacagcagcacactaatgataaagcccaggaaaatagccaagccacccatacggggaatgggcaccttgtgcatacgccgctcgtccttgggcacatcgatcgcgcccagtttataggcaaaggacttaacaataggcgtggacaggaaactgatcaccagcgccacta

SEQ ID NO: 4000 - DNA, 6881 bp, Unknown
  16S sequences of unknown bacteria
tacgcggagggcgcacaaggagactcagacgccgtctccttgtgaatctacgctcgcggtggagttcagttgatatgataaactacagtctccgcccgaattaacagctcagtcgcgcggtttagcataagccttagtagtggcattagaatgttcgcgcggtggagttggacgcgggaaatatggcttaaatcggtattttttcatcgcgcatggttaagaatacctaatcataactggattggattaggctaaccgcggattgtcgttaatctttgcgctgacgtggtgcgaacttgtgatttcttgcagcttattccgcgatttttacttcatctacagccataaaatcccgcgaaaaacggacgaactacgtacaaaccgtagacggcgagcagggtcttggcggcacctgcgagctcactccactacttctgatgtcgaggagaactccaccccgcgcgttgagccaccactttctgcgaaagtaagcacccttgaagctgactcccacccatagattcactatataaatcctaagtcagttgaaagttctttgctcagctttctttcaagaaagcgcgttcccccgtcccccctaccaaaatgaaaggattataaacgtatggatatcgcaaaacatgttgatgagctgcggaagaagattcgcagagcgtctgaactttattatgataaggattcgccggagatttcggattatgagtacgatatgatgttcgaggagctgaagaagcttgagagagagcaccccgagcttgattcggcggactcccctacacatcgcgtcggcggcactgcctcggaaaagttcgagaaggtcacacaccccgtcaaaatgggcagcctctccgacgtattttctgaagatgagctgcgcgacttcctcacaaaaactaacgccgctctcgcagaatacgatatttctcccgatgaagtcctctactcggtcgagccgaaaatcgacgggctttctgtctccgtcacctatgcggacggcaaactctccctcggcgctactcgcggggacggtacggtcggcgaaaatattaccgaaaatatcctcactatcgcgggcgttccgcatgatacccatacccacctcaactttaccgtcagaggcgaggtctatatgccgcacgccgcattcgaggagctgaaccgaataaaagccgaaaacggtgaaaaactgctcgctaatccccgtaacgccgccgccggatctctcagacgactcgacgtacgcgaaactgccgccgctcacctcgatatcttcgtcttcaattatcaagccggcgctatcttcgaggacggtcacgaacctttcacccacgaggaaaccatctcccgtatcgcacagctcggcttccataccgtaaaaatcatgaaagtcaccgcaaaccatgacgaggtcgtcgaaaccgtccgcaaaatcggtcagctgcgcgattctctcccctacgatatcgacggcgcggtcgtcaagataaattccctcagccagagaaagctcctcggcgagactacctcaactccgaaatgggcggcggcgttcaaatatccacccgaacagaaggaaactacacttgtctccattgaaacaaacgtcggcagaacaggcgtactcacaccactcgctatcctcgaacccgtccgcctcgcaggtacaaccgtctcccgcgcaacgctgcataacctcgacatcatccgcgagcgtgatatccgtgtcggcgatagagttatcgtccaaaaagcaggcgatatcatccccgaaatcgtcgcttccgtcaaggaaaaacgcacaggcagcgagaaaattttctcattccccgaaagatgcccatcctgcggcgagattgtgttctcggataccggcgacgacggcacatcttcggtctatcgttgcgaaaatcccgcctgtcccgctcagctcgagagaggtcttgtgcattttgcccatgccatgtcaatcgacggtctaggtccggctctcgttcgccttttaatcgagcaaaatctcgttcatgacgcgggggatatctattctctcaccaaagaagacatcgccgcgcttcctcgtatgggtgcaaaatcagccgaaaacctgctttcttccatcgaaaattctaagaaaaacggcgcatccgctgttataaacgcgctcggcattcgtcatacaggtgaggcgggagcggagtctctcatgcgtcattttgcgtctgtcgagcagctcatggacgcatccgttgacgaaattttggcagtcgaggacgtgggagaggtcacggcacgaactctcgtcgagtactttgcgcttcccgagacaaaaaatctcattgaaaagctcaaaattttcggcgtagtgcttgagtctgccaaaaattccgccgatactgaggaaaaaccgcagatttttgccggaaaaacgtttgtactcacaggcactctgccgacgatgacccgtaccgaagcgtcagatttaatcaaatcctacggcggaaaaacctcgggaagcgtgtcgaaaaagaccgactttgttcttgcgggagaggacgcaggctccaagctgacgaaggcaaacgaacttggaattcgagtaatcagcgaggaagagcttttgcttatggtaaaagaaggtaattaaaatggtcctgattggtattttagttggtttattcttcctttttgcgcttgtcggcggcgtgtatatgtacttctacgctgtcgtgcgggatcacagcggaaaacgtcaagaaaacctctgggaaaaggaaattgccccccatcccggctacagcgaggagaaccgaaagaagattattgagggcgcggaatacatcaaaagccacatcacagaggttgtgcggattaaatcccatgacggacctactcttgtcggacacgttgtcgagccggaaaatactgctccgcgcggagttttcatcatggttcacggctatcgttcacacgctgttcatgatttctcgtgcgcagtcaaggcagtgaacgacctcggatatgcgtgccttcttattgatcagcgtgctcatgggttcagcgagggtgagaaaatcgggttcggcgcgctcgaaaagtacgatatttcgcgttgggcggcgtttgcggatgagcatttcggacttcctatcgttcttgacggagtttcaatgggttcatctacggtcatgatgggcgcggaggtcggttatcctttgtctgttcgcgcgattatagcggactgcggttactcgaatgccggcgagatttgtagaaaaactatgaaacaatggttcaaactgccgccgtttcctgtatattatgccgctaagctcatgacaaaaatctttgcaaagtacgatctcgacaaaaccgacgcgactgccggactgaatgagataaagaagcgtaaaatttcgatactcttcgcacacggagacgcggacgattttgtgccgtatgcaatgagccgacaaaactatgcaaatttcgacggcgctaaaactgaaaacggcggggatttagcagaattattcacggcttcgggtgcaaaacacggtatctcctttctaaaggattacgacggatatatgaaggcaatctacagacttctcgacaaggcaggactggattacgtccgttaagttgatatttcgtacagaattatgcctgattgtgtgttttttgcaccgctaaagtcgttttatatttgacttatgacaaatgttttgaacaggctgtggaaaaccgtgttgataagtacgttatcgcggagttatacctgtggaaaactcaataaaaataaaccggatttgactgaaaaatcatctccggttttcttttgttattctgtttgagtttgtcgaaaggatttacttttccacgtgctttacgtaggactttacgtataattcctcgagctgtcgtgtcatcgcggacgccgtgaactttttttcatacatttcgtaagctccttttgacagctgtgcgtaaagtgacggattttctatgatttcgcagattctttcagccatcgcagcgggatctctttcgggaacgaggaaaccgttcactccgtcggtaatcatgtaagggttgccgccgtaggtcgttgcgatcgcgggaatcgacaaactcatgccctcagacagtgcaagcgacgacgtttccgtgcctattgagcagtttaaattgaggttcatgatgttgtagtaaggcgcaacgtcgtttacaaatcccgtgaatatcactttggtactaattcccagatgaattgccaaattacggagatttctttcttcgctaccgccgccgattatgagaaaatacgtgttcggatgcttctccgtgacgattttcgcgctctcgagcaggtagcggtgtcctttgtattcttcaagccgagccgaaattccgcagacgaacgcatcctgtggaatttcgagcgattttttaagttctgactgttcttccggcgtggttttgcgcattttttcgacgccgtttatgatgacggtgacttttttcggcgaaattcccgtctcgagaaggttgtcctctgcggcttttgctacggctacgatatcggtcgcgagcgtgttgttcaccagtccgttcagctgctttccggggaaagtcgtgagctttttcggctgtggaaacgcgcagtgtcgggtgtaaaatctgcaaggcacgtgggtcagatacgccgcaagcttgccggaaaaggacgagtgcgtgtggacgatatccggtttccattttatgatgagcttctcaatttcacccacagcttccatgtcaaagctcttgtccgcaccgtgttctatttccatgacttgccatctttcagcttcgacgaacggtttgagttgggaattctttggaagcactacgcagacgtcgaattttgttctgtcgaagttgtgcaaataattaacaagaagtcttcccgcgccgccgatgtttgtgtcggtcaggatgttcattaccttaatcattccgcgcgctctcctctcttgaattttgattttacaaagtctatgagcatggtcatttcactgctttttgtagctgccgcaaggattgcataagctatcacgccgacgagggtaggaagcaaaagtgcgctgattctgctgttcagcggtacaaaatgagcgaaaaccacaataaccgctcccataaccatagcgcagactactgattttattatatccaaaatatcgttttttctcgtggagacaagacctgtttttatcgcgaacgcaagattcagtaccatatttaccgccgctacagccgatgtcacaagcgcaactccacccgttgtaagtctgtctccgaacaccgcaaccaacaaaatattaacaaccatagcgatagccgcggaatacattggctttttgttgtcctcggctgcgaagaacgctttggtaagaatttccgtcactgcggagaatatcattcctacggcgtagcacctcagcgcttcggcggtcagtagcgtatcggagtgcgtgaagctacctttttcgtaaatcaggctgatgaacggctcggcaagggtggtgactccgacagaaatcggcgcgattatgaatacgagagtttttatcgaggtgcgcgtcagtctgtcagattcgtcgcggtttccctctgccgcagatttagaaaaatacggaaacagaagattggtcgcgacgaatgaaaacagcccgacaataatgatgtagagcttgtttgcgtagccgagtgccgttattgcgcgaccgttttcgatgccggatgcgatgcgtgtatttatcaaactgcacaaaggggttgtccaagttgctaaaaggatgggtatagtattcttggcagctctggtaatttcaggtgtatttatcctcgatttcggcgagtatttcagtccttttttgacagccgtcgggagctgcacaaaagcctgcatcatccatccgacaagcatagccaccgcaagaccagtcacgccgaatttatcggacaatgttaacaaataagtacacattatgacgtttgacacaagagatatgacggcagggaggttatattcgccctcggattgtagaaaacccacaaaagaaaacgcaagtccaacgaagatgaccatcgggaacatgattctcgtgaggctgacggacagacttgcagttgcttccgacagttcgggcgcgatgaattttaagaagagaggcgcgaaaatttcaccgaaagcggttattgccagcgtgatgaggaggatgaggttgatatacgaagataagaaagaaacggcctgttttttgccatttttcacagaaattgagttataaatcgggataaaagccgacgtaaccacaccgccgaggacgaaatcgaaaatagtaagcggcagttttgatgcggtttcgtaggctatcgcgtagtcagtcgtgccaaaagctctcgctgtgaggacgtcgcgcgccagacccatgagttttgacgcgaggattatgacgcccatgaggaaagccgtttttgcgaacgatcgctgcttcattgaacatctccggaaaagtaatataatgtactataccactccgcgggcgcaaaatcaagcgggaaatcgttaaaagatgcggaaatacgaatgtatttctaccttagacgacgtgcgccttctaagaaactttcccttgatgaagtttcacttaagatttaagtgagaagaaagaagaaaagactggcgtcttttcgatttcattattccacttcgcgtggggagctctttgcagaggtgaacgctaacgagcaagctcgttctagaggttcagacgcctgccccttgcacttactatgtaagtgcggagttccggctt

SEQ ID NO: 4001 - DNA, 32759 bp, Unknown
  16S sequences of unknown bacteria
cgcgagctgggttcagaacgtcgtgagacagttcggtccctatccgctgtgggcgagggatatttgagtggagctgcccttagtacgagaggaccggggtggacataccgctggtgcaccggttgcagtgccaactgcatagccgggtagctaagtatggaagggataagcgctgaaagcatctaagtgcgaagccccccacaagacaagatatcctgaccgaaaggtgagagatctctggaagacgaacagttagataggtcggaggtggaagtgcagtaatgtatggagctgaccgatactaatcgatcgaaaacttaaccaagagaaggagataatcggagagaagtgggagaggaaagatttttcattgtttgagttgagaggaaagagagaatgaaatccggtgataatggcgaagaggatccacctgtacccatcccgaacacagaagttaagctcttcagcgccgaagatacttggcgggagactgcctgggaaaataggtcattgccggttttgagagaaaagcagttcacgaaagtggactgcttttttcgtgagcgggaagtgcgagcgtccaaaacgggacagcgaagggagcttcgcgtcagctgtctgtatgtgaaatgattggagcgatcggaaaaaagaaaaagagcgaagtgaccgaaggagcgcactgcaggcaggaaagtttgccaaggaggagagtgcgcgttgccggtttgaaaaaaatggaatcgcgttagggcagcactcataagacagtattagaaatgttttcgggaaacggcgtagcttgcgggctatgccgtttctccgttttgcaggtcattcagtaaagacgcaggaagtattcccacaaggtcataggaaatatcaatctgctgttccctatatccctttgacttgtccggcgcgtgaacatacactgcctttaccatgtcatttaagacagcgggcgtcagctcgtccaagtcaagatatttccgtactttgctgataaacctgtcaatgttttccgtttgttcttcctgttgggatatttcttcattcaatcgcaacagcttttcccgcagttcttcctgctcctgttcgtaatcgtcagagagcatttgaaatctgctgtcagatagttttccattggcgttatcctcgtaaatacgcttgaataatcggtcaagttcctctatccggcgttctgcctgcgtcagttgccgccgcttcgccgcaaactcctttttcgcttcggctttctgttttgcgcccatagccttgcgaaattgttcttcgtggttagcgacacaggcaatcgtcaatctcatgtgagcaagcacgccctgttccaagacaacggcgcggataaaatgagtagggcaaacctctttccctttgagccttgaagtagaacagacgaaatggtcttgccgcgcttcaaagtccttgcttgtgcagtaatacagcttttccccacagtcggcacagcgcacaatgccggagaacatatttgtttttcctgtcctcgtcgggcggcgtttgtttttccgtaattcctgcacccgcgcccatgtgtcagtgtcaatgattgcttcatgggtattctcaaacacaagccatttttcccttggattgtaacaggtctttttgctcttataagactgtttataggtcttgaaatttaccgtatgtccctgatactccggtcgctccaaaattccagccaccgttttattatcccaatcatagaaattatccggcggcgtgtttctcgttgctctgcctgtctgctgaaaatggatagtcggcgtaatcacgctgtcctctttcagaatacgggcgatttgcgacggtccgtaaccgtccagacacagggcaaatatccgcttgactatctcggcggcttcttcgtccacaacccaccgctttttgttgtcggggtctttcatatagccataaggcgggttgatacaaaggtgttcgcccgcttctccctttgacttcatcacagcgcggattttcttgcttgtgtcctttgcataccactcattgatgatgttcaaaaatggggtaaagtcgctgtcctgctgatttgcgctgtctataccgttgttgatagcgataaaccgcacgcctttttccacaaacaggacttccgtataaaatcccactttcagataatcgcgcccaagccgcgacatatccttgactatcagcgtcgctacttctccattctcaatccgttctaaaagttcgccccaactcggacggttgaagtttgtaccggaataaccgtcgtccacgaaaaatgctgtatttgagaaatgattttcctttgcatatttacttaaaatcaccttttgatttacaatgctgttgctgtcaccctgtaattcgtcatcgcgtgacagacggcaatagagggcggtaattttgttgtcagactgccttaacatagtttctgctcctttcatcggcgggcagtctgccaatacaggattgcttatactcattttaacgctccttatctttttcatcaataggcgattgctccataagccgtaaaactttatggggcaggctcctttccccatcatagctgcctgtaaagcggtagagcgttctgccggattttatcgttacttcatgctttggcaattcttgaaacagcggatttcccaccacgatatgcccgtccttgataattcgtttcctttccattcctttgccgtcctttctttggtttgtaatgtgataagtttcgtagcaagcataggaaaagagtacccttttccgtattttcgccctctcgccctgcggcgtatcggttgaaaattgcttgttgggaagtttcccaaaccctctgaaaatcctctcactacctacaacaccgaacaaggcgattttgccgaagttttgagagagattttcctaaaaacttttcttacttcctactacggggaaaatctgaaaatgccaaacgaaaaatgtattggagaatagaaaaatggacaaggctcaaaagctttgcccgaagcaatttcgtaacaatttgattctgttcttgaaatccatgcttttttttgctattatatttatgcccacctactctattgcagaaaggagctgtcaataccatgagtgaagaattaatccaaagagatttagtggcggcacctgaccacatgggtacatgggattattataatataggtgcgacaacattaaaagcactaaaggcagcgaagattatccctaagaaagattatgctgattacgaaacaaaaaagcctgacgcgctcattgtaaaaaagccgctgataattgctgctattgaatacaaacaacccagtcagctaaaaacgaaaaagcaaatcaacgaagctatacagcaggaattaggaacggcgcaggctcttggcgcaaaagtctatatagttacagacgggaaaaagaccttttggattaacccgcttacaggcaacctaattttatccgataacggagcgcctattgcaactaactttaatcagcattccgatgaatgcataaaattgataacaaaaatgctatcgtcactcagtaaggataatgatactttacttgcgtcatcagtagttgacccattgcctttagcgcaacaagtatggcaagatttgtgggcagtttcgggagcaacccctgaaaattgtctttatacttttgtggaagtttttatcttcaagtacctaagcgatttgggtgtattgcaaggcttcttttcctttaatgatttgctttcgcgttacagcagtaataccgaaaatgctgtccttgaatactatgcgaatactgttcgtccagaaataaaaagattattccctcgtaatgctaaggataacacaacaattatcaacgggacaatctttgtttctaaagatgataaggccgttgatggatatgccgtagttttcaaaaaaatattagaacgctttgagaagtttggaacacttgaaaatatcgactatgacttcaaaagcaagctgtttgaaacatttttaaaggagtccataagcaaaaagaattgggggcagttttttacccccttaaaagttgtgcgttcaatcgtgagtatggcggatattcgcccaggcatgagtatatgtgaccctgcttgcggcgttggcaagtttctattggagccgatactccatgacattaaccgttactacaaaattgaggacggtaaactaaaaccacagattacactttcgggcttcgataaaggctttgacaaggacgagcagaaaacaattatccttgccaaggctaatatgcttatttatctgtctgcgcttatccgggacaatccgggtagtactgttgattttgcgaatctgtttaacgaaacatttttgttacagactaactctattttgggtacgcttgcccacccgaccgaaaatgcatacgaccttattttgactaacccgccgtatgttatgagcggcagtagcaacctaaaagatgaaatcgcaaagcaggacgaattgaagcgttatttctccataagtgcaatgggtattgaaggcttgtttatggagtggattgttcgtgccctaaagcccggcggcaaggcatttgttgtcgttcctgacggcataatgaaccgtagcaatgataaacgtttgcgtgacttcattcttgaagaatgtgacatagatgcggttatttcattacccataaacacgttctttaccacgaataaaaagacctatattcttgccatgacaaagaaagttcctgtaatgcgcgatggtatagaggtaaaagaacgtcaaacaagccgcgtatttacttacctgtgttctgaaataggtgaaacgcgtgatgtgtatcgtttcgatttggaacaaaatgaccttgcggaagctgcaaagcaatttaatatgttcaaaggtaacagagaatatttccctgttactgataagcgctgtaaggttgtggatattgacgctttttatatgggagcgcattggtctgttgagcgttggtggacaagagaagagcgtattgaattaggtattgaggacgaagtcgaaagcgtgtctattgatggctttatttctcttatcgaagatacagcagcaacactaaccgactttcaagaaccattacgcgagatagctaaaaaaaaaattctaacccagcatagtatagaagtttccttgtcagacaatacactttttgagttatccataggtaagcgagtattgcgaaaggactttcaaacgccacgtggggaaatcccagtttatagtgcaaatgtctttaccccatttgtgtattcagatacaagtaatattgctgactataatgccccgtatgtaatttggggtatagatggcatttttgagtttaatgttgttggcatgggaaaaccctttgcaacaacagatcattgtggcacaattaaaatactcaatcctgatattgacccgttttatcttgcctatatgctaagagaaacaagccatgtttacggttttgaccgaggattacgcgcgtcactaacgaatatgaaaaacgttaaaataactataccaataacagccgatggcgtttttgatattgagtatcaacgttttattgcaaggcagcttgaggcagttgagcaagtaaaaagcgagattgcacaaaaaggtaagcatatagcagacgtagccgttaatattgatacaagcgattactcaatgatgtataagccaataaccgagttgtttgccgtcgagcgcgggagcggtaagtatactaagacttatacaaaagcacattcaggagagtatcccttgtattcaggcaacacattcggtgaatttgcattcattgatagttatgactatgatatgccttgtttgacatgggcaatagatggattagctggatatatgatggttcataaatcccctttctctgcgacaaatcacagaggaatactgatacctcagacaactgatattgatcttgattacattaagtttgctcttgaaccgctattacggcaggcgaaaaagggacgtataggtgataacggcgaaaatgaatatacctcattgccgccctttatgctcaaagatattgaagttggaatcccggttgatgaaaccggaaaaatcaatattaatatgcaacgtgaaatcgctacaaagtatcttgcaattgagcaataccgccgcgatatcttggcaaatcttgacacgctacttaatcagcgcattgactattagaaacctattatcgacaagagggcgaaagcagcaagtgctttcgcccttaaaacatcatgggtcgatgttacgcaatagaagtcaaaaaagcctttatttatgcggctttgcagacgcaggaataaggcgggtaagggtttttatatgcataccccttaaaatcgcgttctactgtataacaaaacgggcatatcgccgttatgacgatacgcccgttttgccttgcaccctgtatggcagctaccctatttcagtttgttggttgatactgttttatgagtagctaccttttgcggttccattttttattgtgtcggagatttccgaatgggagggggagtctcctgtcaagcggggagactgcgcattttacgcggctttcggttcaaacaatttacgcggcttcagccgcaggggaaaatgcgatagcgaagggagattctcaacctgctgcactgccgcaagaacatcaagaaaaagaagaaagagaatcgaccggaggaagaaaggaaaagcagcagctggaagcagatagaaattgaaggatgctttttcctttctgttgcctggagaaataggacattgccggttttgagagaaaagcagttcacgaaagtagactgctttttttgtgagcgggaagcgcgggtgtccaaaacgggacagcacagcgaggggaacgtcacttctatatttaaaaagagagaccattttatccgatttgtttggagtgtttagcgatcggcgggcagaaggtagcagacagtgtttgccgcttatggtataatgaatattcaaaggcttcaaaagggtataataattgagaatggagtgatgctttatgagttttatcgatgatccccggaaaagcagaaaactttcacgctggctgattcgaattgtggctatctgtcttgtcatttatctggcattgagatatattgatgtgataggtgacgcggcgttgtctgtagcggatttgttttctcctctgattctgggtgtgattctcgctatgattttaaatgtggcgttgcgtccgattgagcggattctgtttgccagaacaaataatccgcggctgaagaaaatgagacggccgttggcggtagtgatatcggttcttctcgtagcagggatttttgtttttatcgtatgtttgattgttcccgaactgataaacgccctctatgttatcgctgagggactggtaagcctgggaaaaagcctgagtgaatggagcagcagtatcgctctgtcggatacggcggtaggacgtctggctgagagtttcaattttgatttcggttcattgcagcaaaaggtcatggactggatcacgactgctggcccgaaaatagcggcgcaggcggcggacgcttttggaggaatcggttccggtatttttaattttgtagtaggtttagtattttctatctacattttgctcgataaagaaaatttgaaaaagcaggctcagcgtctgattcaggtttggcttccgaaaaaaagttcggatgtgatcatccacgtggcgagtgtatcgaatgtcacttttcggtcttttgttatggggcagacgacagaagctgttattttgggaacactgtgcgccatcggcatgttgattctgcagattccatatgcggcgatgatcggagctctgatcggggttacagcattaattcctatctttggagctctgatcggaacagtaatcggagctgttatgattttatccgaagagccgtttaaggcggttgtttttgtcattttcctgctgattcttcagcagatcgaaggcaatgtaatttatccgaaagtcgtaggggctaagatcgggctgccgggtatgtgggtattggcggctgtgaccgtcggaggcagtcttgcaggggtgctggggatgttattaggagttcctgccttttctgtaatttataccctgcttaatgaagctactgatctgaaggaaaagcagcttaaagaagaggaatcggatactgtctccgtttcgaaagacaatatgtggatcagaacggatactgcaatgcgtccgggggctatctcctccggcagtaccgggccggaagagcatgacaaagaataattggaatgagaagaatgatggtcaggttgagattttttatggacttcggtagatccgaagtctttttttgtgttcatctatgctgaataaaggggagaatttcttatctcattttaatgatatttatttttgcgaaattttcgaaatactctttggaaaaaagaaaatcgagttatctttagtctgaaatttttttgtatatctgataaaaccgtaataggagataaatcgtgtcagctaaatattgtaaaattacttcaaaaatagagtattgacttatatggtgaatttctatttgaatgaatagagctcgttgttacagcagatgaactgcaatggatagattttaattttatgagtataaatacattaattggaaaagcaagagaaaaatatagtggaagccgtgatgatacgacggatgattcttggaagcgtgccttttttgaagaaaaaatccttcctcattataaaggtttgtattactattctcttaaggtattgaaaaacaagactgcagcggaagatgtagtccagactacgcttgaacgggcatggaaaaatctggatcagttgaaatatcccgagcgcgtgaaatcatggctgttcacaattgcgagaaatgaaatgcgtacagcgctgagccggaggtatacgcggattgaacttgagttttctgatgaattgatatcgaagattgaaattcagacagttcagcaggatattctcgaagttcttgtcaaagaagaggaacgtaaaaatatctgtgaagcggtcagccgtctgcctgaaaaatatcgtattttgattgagttgagatattattggagtttcagtgaaaaggagattgctgagatcacgggattgaaatatagtacggcaagagtttatgttcacagggcgctgaaaatgcttttagacatttacaatgaaatcgatcgggagggggtgtgagttcatagatgagaaatgatttcacgaaacgcgaatgccggattcaggaacagatggcggaggtttttcagcggatgggggaggattctaccatagaatttccaaaaccggatctctcgtttatggaagaaggtacagttccgggagcagcagaagctgccggcggggaaaatgaagtttatccaaagcggcgttttggctttttacggagaacgggcgcggtattatgtattctctgtgcggtatttgttgcgtcaagcggtttggcggtactgatcagcgatcaggaggcgtatgcagggaatccggtaatgactttgtttagcagatttataaattccattaaatctgaacagggtaaatctaattattatgtcgaggaaggtgtggaaaatatattgataacagacgaggagcaggtaattttagcaaaacagagcttgtctgaattagcgattttagaaaatatgtctgatcaatataaattccaatctttggatttaaatttgtatgagaatggtatgtatacatatacctatatatataacgatcaattgaaccctgatcatcctttacatatcgatgcggcaaaacgtgagaaaaatgcacaaattactatttttggacaaagtgagcatatggtgttgccatcattagaagcggatttttattatcagtatgattatactactggaggacaaactgggatatgtattgtagatgagcagataattactatatcaggagcgttatcacaagaacaattgattcatgtggcaaagtcattgaaatattgattttacagttgataggattttatttatttgtatcccaggtatcaaattaaaagtgatgatacctgggagaacaaattcaatttagtctatcgttttgtgttatgaaagagactgatataatgtttccgtctgagttactccgtcgccacttgaagtaacatctacctttatccgatatgttttgaacgctgaaagatcgaatgtatgagtgtaataaagtgacgacttattaggagcgtaggaagaataagacggtcccggtgagtttacgtatttgccgctggaggagtcgtattcctgaagtgtgattttaattttgatatactctacatttcccgatgctgaagcgtagaccgtcgcgactccttttgtaaggcctgatggcttaaatgttatggtgactgtgttaagtttacgtccttctgcgtcctgcgctgctgcggcgctttctgaggatgcggcaaatgccgggatcgtattgaggatgagggcaaagagcagcaacggaaccagaataaatttagattttttcattttcatattttttgtacctcctgaaattaaaataatgtgttgaagatcggttttctatgatctcgcaaatgcagctgtaagacctgtggagacaccggattgttgcactgatatggaaaggactcgtcccatttagaaaaaattataacttttaagaaattaacatgtcattttttgtagaaatgtgtaacatttttccgccttctgcgtctaatgaaagacaatgcttaaaggaaggaggcggactattttgagaaaactgtttatttgtctgaaatcgctgattgcggcgcctgttatgctggtgatcgcttatctgctttctcttccattttattattttgcgttgacgtggcagggcggcagccgcgtttcgctgctggagaacttctttgtattggcatgggctgtagttggatttgttgcctttcgctggttggatcgtatttttcgagacgatggatcgggggatctctatctgtggtcttctattcttgtggtgatggctatagtattattttttcgaggaaacggctcctatgctgtcaatctggggagaaaattatatccggaaggaataagatataagagtatgctttcatttgaagagggcgtcggctgggaggaatttgcggatctgatgaaattctcatctgtctacattactatttatgaagcggcgttctgttttcttctggcgatgttcattcgctctgtatggaatcagaggatgccgccgtatattacaaagatgaagctgaattactatgagtggattgaccgggtgaaagaagaggaaccgaaggaaaaaaggaaggggaatcgaagaaagacggggagatcggaaaaattttcttttgtccaagagagaaacggaagggaaaataagcttttcggcaaagaacggcgaatatatattattaaaaaagattggagtaaggaccgaagagtataaatttcggatcttagagcagaagagaggagcgcgattacagataaatctcgttcctctctcttttaatgttttttagcgggtaacattcaggactttatacccttcttcttctactgccctgatgagcttttcatcgggtacgtctgcggaaagggtaaggctggctgtatttttttcgtggtctacatctgcctgcactccttcaatcgcatcgagggcctggcgtacatgcctctcacagttatggcacatcataccttcgatttccattactgcatcatattttttttcttctgacattttgtcctccttttgtttttccggagcagaccggcgagaaatatggctggtctgcggattttcaaatactgtttccgacgatcccgccaaaggggcggaagttttttcctcatccttatcagtataatccgggtcggagccggaagaaagtattttattcggtttgaagaatttcaatctcaaggcattcgtcacgacgcatacgctgctcaggctcatggctgctgcgccaaacatcggattgagtttgaggccgaaggctgggtagagcagtccggcagccagcgggataccgatgctgttataaaagaacgcccagaacaggttttgacggatatttcggataacggctttgctcagctgcacagcggtcaccgcatccaaaagatcgcttttcatcagtacgatatccgcgctctcgatggcgacgtcggtacccgcactgatcgcgatgcctacgtcggcgcgggcaagagcgggagcatcattgatgccgtcgccgatcatggctactttatggccggcggcctgaatttccgcaattttctgttctttttcctccggaaggacctgagagataacctgccggattcccatgcgtttctgtatggcttttgcggtgcgttcattatctccggtaagcatgatgacgtcgatgtccatctggtggaatcgttggatagcctggcggctgctctccttttccacatcagctacggcgatcatgccgataatctcatcatttgccgcaaatagaagcggagtttttccctgatctgccagttctccgagacgctgctgaacggcggaggccgagatgccgcattcttccataaatgcggtatttccggccaggtactctgtctgatcgatttgcgtgcggattcccctgccgctgaccgcttcaaattttgtgagcgggcgcggaacgatatttttatcatttccataattcacgacagcctcagccagcggatgttcgctcggagtctcgatacttactgcgatacgtatcagctcttcttcagacaggccggccatagggatcacatctgtgacggccggccggccctctgtgatcgtacctgttttatccaagactacggtatcgatgctgtgggcgatttccagcgcttcgccggattttataaggattccgttttctgcgcctttaccggttcctaccatgatcgccaccggggtagccaatcccagagcgcatggacacgagatgacgaggatcgcgatgccgatagacagagcgaattcaaaagtcgcgcccgagataatccagatgaggaatgcagcggcggcgatccccatgacaacagggacgaaaacaccggcgattttgtcggccatttttgcgataggcgcttttgatgaggaagcttcctctaccagactgataatctggctcagggtagtgttttctccgacccggacagctcttcctttgagatagcccgttttgttgatcgtagcggcgatcagacggtctccttcgcttttttccacagggatgctttctcctgtgatggcggattcgtctacaccggaagctccctctgtgacgacgccgtcggcggggatcgaagcgccgggttttacgatgaagatgtcgccttcctcgatttgtgcgatgggaatttcggtttcctgtccgtttcgttccacgattgctgttttcggggcgagatccatgagtttttcgatcgcttcgctggtctttccttttgatttcgcttccagaaattttcctaaggtaatcagtgtgagaatggtacctgctgactcaaaatagatatccatgctgtagcggctgaccagttccgcatcgccgtgtcccaggccgtagctgaggcggaagataacgaaaatgccgtaaatgatagctgcggaagctcctaccgcgatgagactgtccatattggggcttctgtgaattaaagtgcggaatcccacctcaaaatacgcccggttcagccatacgataggaagcaggagaagaaactgggagaaagcaaaggtgacagcattggcatctccgtgaaaatagctgagcataaatcccggaggatctataccaagcgcggaataaatcatgtgattcatcgaaatgtacatcagaggaatcaacagacagagtgaaacgataaatcggaatttcaggttacgaatctgctgttcctgaggcgtgctgccctgctgtgtctgcgccgtgggcgcggcagcgcccgcattttttacagcagcgccatatccggcacgtatgacagtctgtatgatctcgtcctctccggtgatattttcgtcataggaaaggcgcatgctgttggtgagtagattaacgctgacatcggatgtaccgtctaatgccgatacacatttttcgactcgtgaagagcaggcagagcaagtcattcctgtaatcacgaaattttgttttttcataaatctctccttccttccgcaaaaggcggcaatgactgtatcacggtgcagacaaacgcagatacagatgctgtgctgtatctttctgcccggtatagccggatataaagattattatttcagaagtttttccagaacatgcgtcagttcatcgattctttcggttctgttggattcgtcggtctcattcatgatgcaactgttcatatgagcgatcagtatctctctgttcactttggtgagaatggcctgtgtcgccatgatctgatttgaaacatcgatacagtaacgatcctgatccagcattctcaggataccgtccagctgcccccgggcagtcttcagcagtttttctattttggctttatcagctttcatgatacacctccttagactacacccctgaggggtgtttgcgctatatttaagatagatctttttggctcagaagtcaagcgggacaatcgaatgttaaagaaaaaattaataaatattccgcaagtttctatataaaataataatataacgtgctattatgattacggttaaaatttcaatcgtgaagacatactctatttttagattgtcacggatgcctttagtaaataaaggcattttttagaagggattaacgggagattaacacttgcggggtggtatgagaaaatgaaggttaaagtgagaaaaaagagccggatcgcagttgcggtattgatttattttgttatcgcgatttttattttgattctgataaagtttccgggggcggaaaggatcgataataactggaagaatgtagagtctgtcgatgcggggacgcagattctgagcaaatatgattcgcaggatacttctgctgttgcaaaggaagttcgttcgattcgtgccgcggtcgctcagcgtctggcgatgggggccagcgcgggcgcgaatgcgggacaggccgatcttgctgagatcttttctgacgcggtggtgatgggggattcacaggccgaagctttcgaggcttacggtattctgccggttaggagtgtggcggcgaccatcggacgcagtatcattaccgcagaagaagattatgagaaaacggtatcgcgaaatccacggcaggtctttattacatatggaatgaacgattgcctgatttacggcggaaatacggagaaatttatttccgtctacagcgatctcatcgccagacttcaggaggatattcctgacgttcagatttacgtctgctcgatcatcctgccgagtgatgaagcgatcagcaagaaaccggatctggcagcggtgacgaattataatgcggcgcttcagcagctgtgcgctcagcacagtttggtgtatatcgacgccggtgcattgatacggcctgatatgtatgcgccggacggcctgcatatgcagaagagcttttaccagtcctgggcttattatatggcttcctgcgctggtctccagtgagaagtacagggaggaattttatcgggaaggttgagaacgttatgaagtctgagggaaaaatcgggaattttatacatgagttgagagagaattctcttctacgttataatatcgtaaagggaattctgctgattcttctggtgatctttatcgccggtcttctgtcggcgaatgcgggaagcgacaagagtgtcgaggagatcgcgcgaatggtagtgccggatctgacgcaggaacagcaggagggcaatctttcttctgatacggagacgagtccgcagcagagcggggagcaggagaacacgagcgatgaagatgccggcgattctcaggaggaaggagtctttgacggaatgggacaggctacagtcctggattttaaacggatcttcggcctgaatgcagaggactatgagggaatcgcttactttaaaccggtttctcagatggatgtggaggagcttctgatcgttaaggtaaaatcggaggagcagatggagtctctggaagaggctgcagacgagcgcatcgagaatcagaagaagagtttcgatggatatggggcggcgcagtgtgctcttttggaaaaagcgattgtcaagaaaaaaggaaatttcctgttttactgcacgtcgccggatgcggaagaatactgtaacaggtttgtagacgcgatgtaaaaagaccggatcagacggggtcattatcagagaatacagcaataatttaagtttttatgatttaagagaggcacaggggatggttttcagcagtattattttcatattcgcgtttctgcctgtaacgctgctgctttattacgcggcgccggaagttttgaagaatccggtgctgcttttattcagccttattttctacgcatggggagagcctgtttatgtggtactgatgatattcagtattatttttaattatttgatgggactcgatatcgaagaacggcggaagatcggcaaacagtccgcgaagaggagtctgatttttacgattgcggtagatatcggtctgctgggattttttaaatattatggattctttacggaaaacctgaatcagattctccctttcgatctgccgtctgtagatgtgacgcttccggtggggatttctttctatactttccagacgctttcttatgtcatcgatgtctaccggggagagacgaaagtacagcggaatctgatttctttcggctgttatgtcacgatgtttccgcagctgatcgcgggtcctatcgttcagtataaagatatcgacgatcagctgaaaaatcgccgcttatctgtgagtcagacgggtgagggagcggttcagtttatccggggactgaccaagaaggtcatttttgcaaataatatcggcgcggtatttaccgcgattacggcgcaggatatcgcggatatgtccgtgctttctgcatggatggcctgtattgcatataccttccagatttatttcgatttcggaggatacagcgatatggccatcggcctcgggaagatgctgggcttccaatttaaaccgaacttcgatcatccttatatctctacgagtattaccgagttctggagaaggtggcatatttctctggggacctggttccgggattatatctacataccgctgggcggaagttacgtaacgccggcaaaacatatccgcaatatgtttgtggtatggctctttaccggtctgtggcacggagccgcgtggaacttcgctttttggggactgtactacggagtgcttctcacgctggagaaatatttcctgctgaaatatctggaaaaatcaccgaagtttctgcagcatctctatacgatgggaatcgtcatgatcggctgggtgtttttctccagcccttctctgggcaatgcggcgtcgctgctcggcgtcatgttcggattcggcgctcatccgctggcagatgatgtgggtctgtattatctgacctccaatctgcttctgatcggtatcatgatcctgacctgcgggccggcgcttcacaatcttctcgatcggctgatttcaatgtcgaaatcaccgaaagccacggcgttcgtctgctatacgctgatgtttgtgctgtgtatcgctttcctcgtaaatgagacatataatccgttcctgtatttcaggttctgatctgccggaaaggaaggagacagatgttacataaatggatgaaaatgtatcgcagaacggagcgaaatgtatcggaaccggattctggaaaaaatcgttttgcagatcggatgaaagcaaagtttccttttcgcaggaacagcttttcggatgcaccgcaaaataaagaggaaaaagaacagggaacggttttgaacgctctgcaaaagggagagatttttgccggacttgcggcagtcgttctgatatttgctatcactgcggccaatattcttctgccggacaaagaattttccgaaaaggagaaccgcatgctggcggaaaagccggagatatcggtttccagtctgctggacgggcgctttatgaagcacagcgaatcttatatggcggatcagtttatgttgcgcgatttctggatttccctgcgctcgcggtttcagctgctgatggggagcagtgattccaacggcgtctatcggggggaacggggatacctctttcaggccgcttccgaaccggatgaagaacacctgaaagccaatgtggcggcgatcaaccagctggcggagaataccgacctgcgtatttttatgatggtggtaccgacagcggccaatgtactggaagactacatgccgaaatttgcgcctgcgtcggatcagaatcagaatcttaaagaactgaaagagtcgatttctccgaatatcaatttcatcgagtcgtatgacacgctgaaagaacatgaaagtgaatatatttactattatacggatcatcactggacgacaaagggcgcgtactatgcttttttgaacgcggcaccggctctggggataccgaatccggaggaagtggaatatacgcgttatgcggttaccgattcttttgcgggtacgctggcgtctaaaagcggatttcctctgaaaaagaaagatacgatcgagatctgggtgccgaagcaggatgcggataagatggaagcggaaatcgaagcttcagaagggacggaaaaagacgggcagagcgggtataagccttcggttcaatatatcgtggactatgtgcaggaggacagaaagagtgcgaatttgtatgacagtgaaaagctggaaagtacagataaatacgccgtcttctttggcggaaattaccctctgatccgaatcaccacggcaaatgacaccggcaaggaagggcctctgctgatccttaaggattcatatgccaactgtttcgtgccattccttctgccttactatgacgaaattatcatggtggacccgcgttattattatgatgatctgaccgagctgatcaagacggaaaagatctctcagattctcttcctttacaatgcggatacgttctttgaagatacttctctggccgatgtactgaagggtgatgaatcgggaaacgaataaggattgcatttgaggatatgtattcgtttcccgccgaagaatgaggaaaaataatgaaattttgcggagaatgcgggatgggacttatagaaaagtttctggagagtgaaggaagaatggtccctttttgtcccaactgtaatgcttttcggtttcctttgtataatgtgtgctgcagtatgattgtaatgaaccgggcaaaagatcatatcgtgctgataaagcaatatgggggcgaagaatatctattggtcgcaggttatgttaatcagggcgagagtgcggaagaaaccgtagtaagggaaataaaggaagagctgggtctgagtgtaaaaaaattaaaatataataaaagtgagtatttccccagaacgaatacactgatgcttaatttcggcgttattgtcgaagagacttctttagacggcattgcgcaggatgagctggatttcgctcaatggtttacctttgaggaggcgaaagaacatcttttaaagggctgtcaggaagggggctggcaggagagtttttcttgtatcatttagacaatctgtctaaaaactggggatgatatccgatatgcggatgggaaaaactttctgtctgcagaggagggaaacgatgaatgaagaacggacgtgtcttacttgcagcaggttttcagaaaacggattctgcagactgctcaccgctcttgaggtggaggagtgcctgagaaaaggacggctggcgcgctggtccagcaagtacaatgaacagtacgagatggatctggaggaactggatccggagtgatgatccgggtctcagacgcggcagagaaattttcaaaagtccgccggggtgatttttttaatgtcatccggcgtttgaaaatcggaaaattaaagagagcggcattccctttcccctgcattttacaggttccgggaagcgccgctctttcttttttgcggaagctgccgtgaccgaatcatcggcggatcagctaaatgtctggtacgcctttacagatggtccgagtcatcgggtttcttgacttcagcgttccagcggaatcgtaaccgggccgtcgttgagaaggctgactttcatgtctgcgccgaactcaccggattccacgtggatatccagttcggtgagtttttttataaaatattcgtaaagcgcgctggcggcctttggggcggccgctgctgtaaaactcggccggtttccttttctgcagtcggcatatagggtgaattgagagacgacgagtatttcacctccgatatctctgaccgagagattcattttttggtttttatcttcaaagattctcatatttactatttttcctgcgatgtaatccgcggtgtcttctgtgtcttcgggtccgacgcccagcaggacgaggagaccccggccgattttaccggagacctgtccgtcgatagttacgtctgcgtgggaaactctctgaatgattgttttcatatccggttctcctgttatctttattattccgacgcccagccggcggcgcagccgaccgctttgtgccactgtgcgagacggtttctgcggatttcttcggtacagtccgggacgaagattttttccgtacggcggagtgacgcgagttcctctgtatttttccatatacctgcagccaggccggcgagatatgcggcgcccagggcggatgtttcgacgcaggccggtctgtttaccgggatattcagcatatccgcctgaaactgcagcatcagatcgctgacgctggcgccgccgtcgacgttgagtccggtcagagaatattcggaatcctccgacatggcgcgaatcagatcagacacctgaaaggcgatggcttcaagcaccgcccgcgcgatatgacacttattgcttccgcgggtcaggccgatgatcgttcctctggcatacatatcccagtaaggagcgcctaatcccgtgaatgccggtacgatgacgacgccgccgctgtcgggcacttctgcggccagggtatcgcattccggtgagctggagatgatccccaattcatctctgatccattggatggtggagccgccgttgaatacgcttccttccaaggcgtagaccggtgtttcattttcgcccaacacccaggcgaccgatgtaacgagactatttttggaacggatgcgggaggatcctgtgttcatcaatgtgaaacatcccgtaccatacgtgtttttgatatctccggggtgaaagcaggtttgaccgaacagagccgcctgctggtcgccggcggagccgcagatcggaacgtcctttaattctttcagggatccgggcaggctgtgggtgagtacgccgtatcgctgtgagttgggaaccggctgcggaagcatgattcggggcactctcgtgatttcgcagagccggtcgtcccatgtcagtttttcgatgtcgaagagcatcgtgcgcgcggcattagaataatccgtcacatgggccctgcctccggtcaagttccagatgagccaggtgtcgatcgttccgaagagcagatcaccctgctgcgcctggcggcgtgcgccgggcacatgatcgagaatccagctgatttttgtagcggagaagtaggcgtcgatgagaagtcctgtcttttcttttatatattcgtcgaaaccttctgaaatcagccggtcgcattcggcggctgtacgccggcactgccagacgatagcgttgtatacgggttttcccgtatgcctgtcccagacgacggtggtttctctctggttcgtaatgccgataccggcgatatcggcaggcgaaaggccgctctggtcaaaagcgctttgcagagcctgcagctgagtgttcagaatttcttccggatcgtgctccacccagccgggctgtggataaatctgctggaaggacagctgcgctctcgatacgatctctgcgtttttattaaaaatgatagctctcgaactggtggttccctgatcgagagcgattatatattctcccatgatactttcctttctgtcgtggtcgtgtctattatacacgaaatcctgcgctgatgcaggagaatatggcgggaaaaagtgcgaaaacaagcgaaaaagcgggtcacatcaagggctgaatttgttgacaagccacgcaatgcataataaaataacatttgtatcgtcatacagttaaagagaaacagtcaaatgatcgagataaaagatctggcaaagatttacaatacagaacatggagaatttaaggcgattgaaaatatttatctgacgatagaagatggtgatattttcgggatcatagggatgagcggcgcaggaaagagcacgctgctgcggtgcatcaatctgctggagcgtcctactttgggacagattctcatcgacggtcaggatgttacgagccttgacggcaaggcgcttctgcaattgcgcagaaagatcggaatgatttttcagagatttaatctgctgatgcagcgcaccgtcgaagaaaatgtatcttatccgctggaagtgtgcggttatccgaaagaaaagagagcggagagagtcgcggaactcctggaactggtagatctctcttcaaaggcaaagagttatccggtacaattgtccggcggacagcagcagagagtatcgatagcgagggcgctggccaacaaccctccgattctgctgtgcgatgagcctacctcggctctggatacgctgacgacgaattcactgcttgagctcttgaaagatatcaatcagaagctgggcgtaacggttatcatcatcacccatgagatgagcgtcgttcagaaaatctgcaataaggttgctgttatcaacgatgcgcatatcatcgagcagggactgacaaaagatgttctgtcagatccgaaggaagagatgacgcagcttcttctgaaggaaatatctgcgggaggtgaagtcgatggctgatttcttttctgaatacggtttgatgcttctgaccgaaacaggagcgacgctggcgatggcgctgatttccacgctaattgcatatatcgtaggaatccctctcggcgtattggtgacgattaccagcgatcattcgattcttccctgccgtccggtaaatatgattttgggttggattgtcaacatgggacgttcgataccttttatcattcttttagtggctctgatgccgtttacccgtatgatcgtaggatctgcggtgggaatacgcggagttatcgtgccgctgagcatcgcggcgattcctttcgtcgcgcggatgatagagacggcgctggcggaaatcgacggaggactcatcgaggtggcgcacgctaccggatctaccgtatggcagatcatctggaaggttcttctgccggagagtatcccgtctattctgatgggcgttccgatcactctgatcacgctggtgggatattccgctatggcaggcgttgtaggcggcggcggcctgggggatgtagcactgcgtttcggttactatcgttatgaaacgccggtgatgatcgcgacgattatcgtgctgatcatactggtacagatcatgcagtctttaggatcttttatcgcccgcaagagcgataagagaatcagaaaatagagtttattttgtaaaaaggagagaaggaaatgaaaaagttattagcagtattaatggtttccatcctcgtatttgccgcaacggcatgcggagatcagaaagctcctgcgtcttctgacggcggaagcgcgcaaaacggtgatgccactacgattactgtagctgcatctcctacgccgcatgcagaaatcttagaggctttgaaagataagctggcagacgaggggattgaactcaaagtcaaggtatataatgactatgtcgttccgaatactgtggtagaagacggggaagtagatgcaaattacttccagcatttagattaccttgaagattttaatgagaaaaacggtacgcatctggtatccgcagcgggtatccactatgagccgatgggaattttcccgggtaaggataagagcgctaccttggataagattgccgatggagcgaagattgcgattccaaatgatacgacaaatgaagcccgcgcgctgcagcttctggtagcggaaggactgatcgagctcgatccggaggcggggctggaagcgacgccgaaggatgtcacgaaaaatgaacataagatcgaatttgtcgaaatggaagcggcggctcttccgaccgtgctggccgatgtggattttgcggtaatcaatggcaattacgcattgggcgcaggtctgaccgaggcggatggtctggcgtttgaagcggcggattccgaagctgcaaagacatacacgaatgctcttgtagtaaaagagggcaacgaagataatccagctataaagaagctggtggaagctctgacttctgatgagtgcagagcgttcctggaagagaaatacaagggaatggtgattcctgtattttagcggttcatgagcttcaccgcttctgtgagaggtgaaacttgatgacggcttacaaactggatagaaacaaaactaccgcccggcgcgcagtgcgccgggcggtagttttgtttctggttaaaaaaagcttttcatcagaatttcgacgataattaattcggctgcaatcagtccgacgatgacgccgacggcgatgagagctttttttctgctgtttccttcgttgttgctcatttaagcgttgttctccttttcgggtctgacccaccagtcgagatccgtatatttcgcctgaagttctttgatctcttttctcgtgtcgaggaagagctgttttttttctgcgagatagtccgcgtggatgtccagactcctgtgcgtcaggtgatggttgaaagaaggatcgtaatccattttgaggccgttttctccaaggacaagttttccttcgccggcgcagacacagcaccgtatcttaccgtcaggatgaatatgaagggctgtactggagcagaacggacattccagcgcttcggaagtcggtgcgggcagacccttactgccgttttccagcagggatgccaggcggcggagtttctgcagattttcgcctttgacgctgtctcccggcagcgtagcgagcatcagttccgtaccgatgacattgcagtgaaattttctggcgaagagcacgaggtcttcttttgacataccctcccatccgtcaaatccgtaggagacggcgatgacgcagtctgcgggaccgaagttccggtactcgctgacgagactgatcaggcggtctaaaacgcgtttgatcgtagtgtggcctcccagcatataagcgggtgcggcgactacaactttatccgcctgacggacctgttcgacgagaaagcccaaatcgtctttgagtttgcacagagagccctgcgggacacaggcataacaggcggtacatgttttgatgttgagatcgttgatgttgatcatcgctttttcccaggaatccgggagtgtattcagaatttctttggctgctaattcggaatttccgcctctgcggggagatgatatgattcctaaaacacgcatggtaatcctcctttttaatatgattatttgaattgtctacagtatagcataaacgccggagaaaatcttgtaatatatgcatgaaaatattatgcagtgcaaattatatgaaatgactgggaggaaaaagatttctcccggggaatatccggcagaaccggggcataaaaataaaagataggcgaatgtgggatgagctgtgatttccaggggaatcaaaggaaaaatcaattgctttattgataaaaaatatcaattatgataaactgtttccgcataatagcctgaactaactttaattccggaaaaagttgatgagataagaagatttgatgaggtgattttgtgactctggacatacttcccatcggggaatcagcgatgatcactgctgtcggcggtcagggcggtctgcggaggaggctgctggatatggggctgacgccttataccaaagtgacggtgcgcaaggcggctcctatgggtgatccgattgagattacgctgaggggatatgaattgacactgagggtagaagacgcccgaaaaattgaaatagaagagatcagagatatatgaaatttgcattgattggaaacccgaactgcgggaagacgacgctgtttaaccagctcacagggagcaaacagcatgtgggaaatttcccgggagttacggtggataaaaaagaaggcagaatccgcaaacatgaggaagctgcggttgtggatctgccggggatttattccctgtctccgtatacggcggaggaaatcgtcaccagagatttcctgattaaagaaagacctgatggaattataaatatcgtcgatgccaccaatatagaacgcaacctctatttgacgctgcagcttctggatctgaatattccgatgattctcgcgctcaatatgatggacgtagtgacgtctaacggcgggaagatcgatgtagagggcattggaaatcgtctggggattccgattattcctatttccgcttcccggaatcagggcgtggatgacctgatcagccgcgcggtaaagatggtacataacagaacaaaaccggagcggagggacttttgcaccggagatgtgcaccgggcgattcattccattgcgcatcttatcgaggatgaggcgagggccggcggagtttcgctgcgattcgctgcgattaagctggtcgaaggcgatgaggtgataatgagagagctgcggattcaggagccggagcaggatatcatccggcatatcgtcgatgatatggagtttcactgcggtatggatcgggaggcggcgctggccgatgcgcggtacaaatacatcgagcagctgtgccgggatatggtggtcaagcctcatgagacaagaggacaaaagcggtctgttcgcatcgaccgggtgctgactcacaggatctttgcgattcccatttttctggggatcatgatgtttattttctggattactttcggtgcggtaggcgcgactctgagcgactggttttccatggggatcgatttttttatcgggcaggcggatcgtggtctgaccgcgcttcatatcaatgaaacgctccggtctctgatcatcgatggcgtatgctcgggagtgggcagtgtcctgtcgtttcttcctacgatcgttctgttgtttttcatgctttcgattttggaagacagcggttatatggccagggtggcttttgtcatggataatctgcttcggaagatcggattgtcgggcaggtcttttgtacctatgcttatcggattcggctgttccgttccggcgattatggcgacgagaaccctgtcaagcgaacgggaccgtaggctgacgatcatgctgattccgtttatgtcctgcagtgcgaagctgccgatttacgcgatgttcaccgcggcgtttttcacggaataccgggcgctggtgatgatcagtctctatctgtttggaattttcatcggaattttgtgcggttttgtcatgaaaagatggatgtttgacggagagccaattccgttcgtcatggaacttccggagtatcggatgcctgcggcgcgcagtgtgattctgcatatgtgggaaaaggcgaaggattttgtacgaaaggcttttaccgtgatctttctggcgacgatcgtcatctggtttctgcagaccttcgatgtccgctttaatctcgtggcggacagcagcgacagtatgctggccggtctggggcatcttttcgcaccggttctggcgcctctgggtttcggcgactggcgttcagcgacagcgctgcttaccggtttttccgcaaaggaagcggtagtcagcacgttaaccgtgctgaccggagcgggcgattcttcgcagcttgccgttttgctgggtgatatttttacgccgctcacagcgtattgttttttggtgttctgtctgctgtacacgccttgtgtggcggcggtggcggcagtcaggcgcgaactgggcggaatgcgccgtgcctgcggagtcgtcgcatttcagctgattgcggcttgggcggttacttttatcgtataccgcgtggggttgctgttcttctgatcgtgtgagaaaagcatgagtttttgtatacgaaaagtatagaatcatgtttcgcttatgcgtatttgcgcggctttcgccgcattgtaaaatacgacagcggagctcacgaagcgagcgaaggaagacggtttctgctgtctgttgcgcgcggtagaaatgtgcattttacattgcgactgaagtgcggatgaaaaacctccgaatatttcaggtttcttttgttcctgagatatccggaggttttaatttttgattttctgggtgtaaaggtcccgggtcgggtgatgaaatgtttttcttcgggggggatatcccgctttttctgtttatacggtcatggatgcagatgcgttcctgcgctgtactgcgcatattggaggtcggcgtgtcatattgtttacaggaggttagtttattgtggagagaaagcgaaattatacacagatcggatctgcagggatccggagaataaaaatcattttcttcgcggtctgtttcgcggcgggaggatgtctgctgatgcagcagatattttccgtcgaacctctgacggtattcggtatcgaagagaaaccgctgatactcatcgatcccggtcacggagggatcgacggaggcgcggaaaatgcctcgggaacctgtgaaaaggatattaatctggcgatcagttttctgctgaaggaaaagttggagccctatggtgtggatataaaaatgacgagggaaaaggacgagggtctttataccggcgttaaaaacgatgggaccgacgatatggaaatcgaagggcaccgcagtatccgaagtctgaaaacagaagatctgaacgcgcgcagagatatggcgcaggatctggagccggaggtatttatcagcattcatctcaacagttttaagcaggaccggtctgtctgcggggctcaggtttttttcagtcccgggagtactcaggagatcggggaacgcagccgtcagctggcggaattaattcaaaaagcgttccgggaacagagcgggggcgtcaatgaccggacggcgatgagaaaaaacgatgttctgattatgaaaaatgccagcgttcctacggttatcgctgagtgcggtttcctttccaatcagaatgaggcagctctgctggtaaaagcggagtatcaggaacaactggcggaagcgatgaaacagggaattctcgcatatctgggaatcgatgaaaacgaggcggaaaaatccggggattctgagacgaacggtgaagcatccgaaaaaaggaaagacaaaaaaattgtgatcagcggctgatcagtcgaaaatttccgaaataatttcagaagaacctcgcttgtggatagttactataaaatgtggataacttttatggaaaaatttgtatttatgattaaaaagctataaattataatggttatagttgtttttgttttgcacacagagctgtggaaaactgtgtggaaattgtgcaaaacccgtggataacctgtgtaaaagcggaaaaaagtttggaatttgagcataggagaatattcttcagttatcaacaaaatgatgaaaaaggtttactataatcagtcgaaaaaagttatgaaaggaagggcgccggcgaaaattttcgaaggactgcgaaaatcagaatttaatgttccgaagagatgcaggtatgatatactgataagcaatgagtgcgaacatttgcgatgaaaaagtgggaggtttttcgtatgaaacacgtattgtatgctttgatggagaataagccaggcgtactcagacgcatttcgggacttttcggcagaagaggctataatatagattccatcgtggccagtgcgacagaagatgagaatgtcaccagtatgacgatcgtcgtggacggtgatgagtatatactggatcaggtgatcaaacagctgacgaaacttcaggagattatcgatgtcgtcaacgtttccgatctggcggcggtgagaagacagctgctgctgatgaaggtttcggcagctcacgatacgcggctggatatcatacagctggcagatgccttcggagcgagaatcgtagatatcaaatcggattatatcatcatagaagctactgcggaggatgaagtcacttcttcgattgtagagacgttcgaaccttacggcatcatttctctgatcaagacgggaaccgtagctctgaaaaaatagcagagcgcgccgcggcaaaaaacacgcggccggcgggagagcgaggaatccgtgagatgaaggaaagacgcggaggatatagttttagaagaaaagccggagatcaattctccggctttttgcataccagactgagaaattcatcgaaatcttcaaagtcacttttgatgaattcataaactacaggttctttgaattcgaatttttttatgacctgcatgtaattcggcatcatagcgaaagtgatgtggagctccgcttcaaagacagcttcgaaggtataagcgataaccagcagctgattgctgtccgtcagataatacatggcgcggatgtcgtcattcatcttgtagacctggcgtcctacatgatcgtttgtgtcataaaaatcgatatacagacggccgttgtcataggcggtttcggtaaatgcctctacataggcgctgaaagaatcctggaacatcgtgctgtcgctgtcgacctcatagacggtgatgaattcggaacaattcataatcatggcggcttccgcgctggtgatcgtaaaggcggagcacctgcgggcggagacgacgcggcacggtttcatctgcagcttgatttctgacgtgatgatatgatatcgatttccgtattccactaccgattcgcacatgtaagtccggtcggacagattgccgaaagattctatcgtattgcggcagagagcagccggctgtttcagcggataaatgccgaaatccgggatgtccggaagatagtcgggcgttaccgtgaccggtgaagccggagcagggggattttcactgttttgccgtttttcaaaacggacggtatctccgggtggtgtattctgtgaatcatccgtctctttcgcctgcagagccgaaggcgctatgagaaaagcggcgccccgtatatctttcgcaaacgttctcatcagaaaataattgaggatatagttcggcaggttgatatgaccgcagatacggctggcgagagactcgtagttctccagggacagcgtctgctccggcaaaaggagaaatttataattttcatagccttcggccagttcctgcttaaattttttgtttatttttacataggactgtatgagaaaacgcgcttcctcttctgtgacggggacgacgctgcctcccagggcgccgatcagccgccttctctctgccgcaatgaggtgcgggttgtcgccatatgcttccgtataggattccaggccgaattcttcggcgtcgagataaaatatctgattcaatgttttcacctgggaatcttcgacgacgtcccatttcagttccagaccgatgactcccatgaggcgggtatttgtagcgtatccggaaacgaacttccggccgcggcattcgggggagagattttttccgcctctgattacggtaaaattcggtttcatagaaatctccttttcaattatctgaattatagcgtatttgactgccgatgtggataccttatgagaaatcgggcttaaaattatttttttccgcagcgtgcgcagggccggctctcctctcttccgctgtgttgaaaaggcgcgtttgcgcgatatcttcagactgcggagtagacgcggtaaaaagcggcggtacagggaacagcgccgcggccgccgcggtttgtcttggaggactttgtgaaaacggcgggaaaaatttggaatccgctggaatgtgtgtgaaggttgtgtgttttttttaagcttaagttgaccgaagagagcagatattataaaatttttagttagatatgacctgaaaatataaaacggcatacttttgatataaatggagaaatgagcgcactatctgaaagacagtatatgaaaggaaaataaaaatgggtacgaaagtagtaaaattcggcggttcctctgtggccgacgcc

SEQ ID NO: 4002 - DNA, 7416 bp, Unknown
  16S sequences of unknown bacteria
atactgaagggagtgggcgggctgtatacggtccgccccgatctcgtcggggaggatgtcccgccgagaataaactgcagtgcgaggggaaagctccgctcgggagaggaaacgccgtatccgggggatcgcgtcgagcttgaatgctccggcggagcatgggcgatcgcgcggatactcgaaaggaaaaacgcactccgccgcccgaccgtggcaaacgtgactcaccttgcggcggtcattcccgccgcacgcccgaagcccgatctcatgaccgccgacaagctgatcctttacgcagagagcgcgggaatcgagccgatcgtcgtggtgaacaaatcggacctcgcacccgattacgcgcgccatatcgcgcaggtgtacgaaaatgcggggtaccgctcgtttttgatatcggcgctcggcggagagggcacggacgagctgagggattacgttctttcggcatcatcgccgtcgtctccgtccacggttacgttttcgggtgcgtccggagtcggaaagtcaacgcttatgacgaagctttttccggagctttcgctcgccacgggcgcggtgagcaggaaaagcgagcgcggtcggcatacgactcgcacggcggagcttttcgaggtcgcgaacgggctgtttctcgcggatacgccggggttcacgatgctcgatttcgcccggtataacttcttcccgtcgggtgatcttgcgtatctttaccgcgaattcgagccgtatatcggcaagtgtaaatatacgaaatgcacgcaccttcgtgaggagggctgcgcggtgattgcggcggagaaggaggggaaaatatcccccgaacgcagggaaagctacataaaaatatacgaggaaatgaaaaaaacgcccgattgggcgagaaagaatcagctccgctgactgcggggctgcggcggcacggaccgcggaggtaaaatgtcaaggataattctcggagtggatttcggcgacgcgcgcacgggacttgccgtggcgggcaggagcggaagcatcgcggtcggcgcggggcttatacgcgcggacggcttcaaaaaggcgcttgccgccgtcagcgaggcggcgaagcgcgaaaaagcggagctgatcgtcgtggggaatccgctcaacatgaacggctcggcgggtccgagatcggagaagtgccgcgactttgcggcagctctcgaggaggagaccgggatcgaaacggtgctttacgacgagaggctgacgacggtcagcgcgcatcggtatctttcggataccggagtgagcgggaagaagcgcaaggaaagcgtggacgagctgtcggcgacgctgatccttcaggattatatagatcggtatccggaaaagctcggctgatcgggaatgccgagatgtgctttgcggcgggcgctcgatcggaaaaacggagctgccgcatacgctgctctgcacgggcagaacgccaaaccgaacgcgaaagcatgccgctgcggaaaatttggtcggcgagggctgcggagaatcgaccgtgaccgatcacgcgcccgtatcgtacgggtgtacgaaaatgcggcgaacccgtaccgtccgcgcacgggttcggcgcgcgtccgcacaccgctccgtcaggcataaggcagagcagaacgccgcatttcaaaggaggtctttatgcacgcaataatagtactcggcggagagcgcataacgtctctttgcgcgccgcttcccgagaaggctttggtgattgccgccgaccgcggatgggataacgcactcgcgctcgggcttatgcccgacgtgctcgtcggcgatatggattcgatatccgccgttcccgacggcgtggagctgcaccgttcccctgcggtgaaggatgagacggacgcgcagcttgcgatccgctgtgccgtatcgcgcggcgcggattcgctgactcttgtcggacgaatcgcgggacgcgccgaccatacgctgtcgctcatatttctgctcgaatcgctgaaaaagcacggaatcgcggcggagatcgtcgacgatataaacaggatacgtctgctctcgaacgaagcgtttgcgcttcggcgtgcgggattcaaatatttcggactgctttcgctcggcaggagcacggtgagcgcttcctcgtgcaagtatccgcttgagcgctccgagctcgtccgcgacaatccgtacgcgacgagcaacgagatcacgggagacgcagcgtatatcgaggtctccggggacggcgtgctcctcatagagtcggacaggctcgcatgaaaaagcgggcggatttttcgcacccgcacaccccgaaatcccgagttttgtgcgcggatcgcaccatgtcggaaaaaatgcaaaaaacattcgtttttttgaaaaaaggggttgatttttgaatcggcttatgatataatacaaaagctgattaacggcccgttggtcaagcggctaagacatcgccctctcacggcgaaaacgggagttcgattctcccacgggtcaccagcccggaagccgggcagccgagaatcatggaggcaggcttaagtttgtttccttatcgcccgatgggtgattggttttgactgttttgctttcactaaggtctcccgcacaaaagtgcgggggattttttgtgttattttgcaggcgtgccgcgcacgtcccgtacttcactttatgtgtgtctctccgtccggcagctcgtccgccgccgcgcatgagcgggatttctccgccggtcttgacaagggaaagaatatctgatacagtataaatgaaaaggtgttctccataatgggcgtgtggcttttgcctatccccacggaggacacctgttctctttccggcacccgaacatgacggaatttctttcttgccttatcctgcaccgcgaaacaacctttatccgcttccgtttcggtatgtgaatctttccggatgccgcagcccggttcctgccgacagccgtccggcttttttcgctccgtgcttccgaggcattttcgccgccgcatatccgccggacggcggattgcgtttcactcgcacggctgcgttttcagtcgaatatggttttccacgcgctgtcgcggtacgcgcgaaagcacatgcggatctgttcttcgctgcatttttcttcggcgagcggcggcagattgtcctcgtcaaagcagccgatcccgaccgtctccgagttttcggcaaattttccgccgagctcgtcgcagaggtagaatatcttgaccacgccgtatgcgtaaggcggaagattgtgaaaatcgcggttctgcacggcgatgaccgacttcaccgcgacgtcgagccccgcttcctccttagtttccttgacggcgttttccgccggagacatcgtgacctcgcaccatccgccggggagcgaccatgtgccgttcgcctcgtgtacaagcagaattttcccgtctctgaatatcgcggagcgggtatcgaccttcggcgtctgatatccgctgtcggagcagaacatccccgttaccgtgtcgagcggaagctcggtcttcatcgagatgatctccgccgcgatctcgcggatgcgttcgtaccgctcacggtcgtaaatgtcctttccgtagtgaagccccgcctgagcgaggctctgaagctcgatcgcgtattccgtcagtctgtctcttttcataaatcctccttatttacggcgagaaacgccgccgtccgccgcacggcttttgccgatgcggacttttatttttaatattatctttttatgatgccgcgatgcggaaatatccgcgctgccgcgcgtggttcacccggaacgcataccgccgcgcggcttatattccgacgaatccgccgggcgcatccgaggccggacgtgtcctgcggaatatagctctcagagcagcgcgcgcagccgttcggcggcttcggcggtatcgctccgttttccgaatgaggtgattcggaaatacccgcgccccgcgctgccgaaaccctcgccgggcgttccgactatctgcgctttttcgagaagcaggtcgaaaaaatcccacgatctcatgccgccggggcacctcatccagatgtacggcgacgatctgccgcccgtgtagaagattcccttttcgtcaagcggcgcggacagaatgtgcgcgttttccttgtaaattcgtatcgcctccgcgcactgcgcgcgtccctcgtcggaaagcgcggcttcggcggcacgctgaataatatatgcgacgccgttgaatttcgtcgcctgccgccttgcccaaagcgcgttcagcgatacatctcccgctgaaagtccggacggcacgaccgtccatgcgcaccgcattccggtgaagcccgccgattttgacagactgcatatttcgaccgcgcattgttttgctccgtcgatctcgtatatcgaatgaggaaagtccccgtcgatgaacgattcgtatgcggaatcgtatatgatgagcgatcccgtatcgcgggcgaaatccacccacttttcaagctgcttgcgcgagtagaccgcgcccgtcggattgttcggcgaacagatgaagaacaccgcgctgctttccgcgatcccgtccggcatcggaagaaataagttttcccgcgttccttcgatcatgcggacacgccgccccgcgagtatgcttgaatccgcgtagacggggtagacgggatcgggaatgtatacggggctgtcaccgaggatgtcggcgatgttgcccgcgtcggatttcgcaccgtccgagatgaagatttcatcctcgccgagcgatacgccgagcgaggcatatcgccgcgcgactgcctcaaggagaaaagcgtatccgcgctcgggcgcgtatccgcgaaaggtttcgctttcacccatctccgcggcggcgcgccgcgccgcttcgacgacgcacggcgcaagcggaagcgtgacatcgccgatcccgaggcgaatgagacgcttcgcctctttgggatgtgcgctgccgtaatcccgtacccgccgcgcgacctcggaaaacagataattatccttcagtccgagaaagccttcgttgatctttattttcatgtccgctccttctccgacggcgttaaccgcgaaaatcatagattccgtcgtatacccgcaccgcgtctccctccatcgtgatccggcggtctgcgccgacgcggaccgtcagttcgccgccgcgaaggcggacgcgcacatcggtttcggcgtcgcagaaggagttttcgaccgcggcgcataccgcggcgcacgctcccgtgccgcacgcccacgtctcgccggagccgcgctcccagacgcgcatttcgatctcggtacggctgattatgcgcacaaattccgtgttcacgcgctcgggaaagagcgggtgatgctcaaaggcggaaccgattttttcaagatcgagcgaggcaatatcgccgcagaacacgaccgcgtgcggattccccacggaaagcgccgtcacgcgagcgcgcattccgcccgccgtgatctcgctgccgatcatcttgccgcctgaaagaacgggaattttctccggggcgaattcggcataacccatatcgacggagacggacgaaacggcagcgccgtttgtgcggagcgtcagtgtctttaccccggagagcgtctcgaccgtgagtgttgtttccctcacggctcggctgtcccacaggtatttcccgacgcagcgtatcgcgttcccgcacatttttccctcgctgccgtcggcattgaatatccgcatcgcggcgtcggctttttgcgacgggcatatcagaacgataccgtcggcaccgaccgacaggcggcgcgggcacatcacggatgcaagggcggcggggtcgaacggaattttgtccgcgcaacttatatatatgtagtcgtttccggtgccctgcatcttcgtgaagtgaattttcattattatacgctttcctctttcgtgatcgacgatatctcatcctccgtgaggtaccgccattcgccgcgcccgagcgccgggtcgagtttcagcggtccgaaggatattctctcgagcgataccaccttgcatccgacggcggcgaacattctctttatctgatggaattttccctcggagatcgtgatctctcccgaaagagcgccgtccggcgcgatctgcgccggagacgtcacatatccgccgatgtccgcgccgagctcgagtgcacgctttccttcggcgtccaaaggaagatcgagaccgtaacggtatgttttcatgacgtgctttttcggcgagagaagctcatgcgccgtctgaccgtcgtttgtgatcagaagaagtccgagcgtgtcgcggtcgagcctcccgcacggaaagaatccgcgcttggaataggacggaggcagaagcgtcattaccgtcgcgccgccctcctccgtggatgagatcagcccggcgggcttgttaagcataatgtattcgaatctgctccattttatgacctgacccgagaggcatacggtgtcggcattctcgtcgatgtggatcgcggcggaacgcaccgcggttccgtttaccgtgataccgcctttttttgcgagttttgcggcttcgcttctggtgcaggcgccgctttcactaagatatttatcgagtctcattgaatttccgcctttttgaaatcgtatatataatatataatatattgtagcataattgcgaaaagaagtaaatccgaaaaaagataaaaaagattgaaaaaaggtgttgacaagggagagaggatgtgatataataacaaagctgcccgcgagaggcggcaagctccttgaaaattgaacaacaacaagcacaagagcgaacctgaagaggtaagctcgaggctctgaagaattctaaagaatttcaaaagatgctcttaaaacaatagagcggaatcaactctgatgtatagcctctgcggaggatatatatacaaacattagagagtttgatcctggctcaggatgaacgctggcggcgtgcataacacattcaagtcgaacggacgacccggagcttgctccgggaagttagtggcggacgggtgagtaacgcgtgagcaacctgcctgtgtgagcggaataacgtccggaaacagacgctaataccgcatgactcacggacttcgcatggagaccgtggcaaagatttatcgcacacagatgggctcgcgtccgattaggcagttggtgaggtaacggctcaccaaaccgacgatcggtagccggactgagaggttgaacggccacattggaactgagaaacggtccagactcctacgggaggcagcagtggggaatattgggcaatgggggaaaccctgacccagcaacgccgcgtgaaggaagaaggc

SEQ ID NO: 4003 - DNA, 32759 bp, Unknown
  16S sequences of unknown bacteria
ggatgatccccctgcaccccacactttgtcagcagcctacggcgcccggcatcaccgggcgccgctttgatttcctccaagctcagtaattgtattcgattacctgctgataggcgcggtagttactggtgtgcagcaattcgcgtctggtttcctggccgtccttgtaccacagcttctcggtttccaccacatagccggtgcgggccttgacggtggtcttttccgtgccgtagggcagatcggtattgagctcgtacttcacttcgctaggcggatcaatggttttgattatggtggactgaaggtcgatcgtcacaccctcgcccaatgacatgccccagatctccgcgctcatgcggcggttcttgtagtatgtaatgataaaaatgggacttttggtattgtttttgaactggaaatccaggttgggccagttgacggtcgcgtcctcaccgatattgacgtaggtgctgggccaggcgtgcgggctgcgggagacgatttccaggttggcgcgcgccacggcgttgaacagcgtggacgacacctgacagatgccgccgcccacctcctcgatgctctgccctgcggcgatggctccggcggatttgtaccccttttcggtggtacgctggccggtggcctggttgaagctgaaggtttctccgggcatgagggccgtgccgttgatggcctggcaggccaggtcaatattggtattgcggttggagtcgttggtggtttccgtggtgtaggccgccaccaggccgaagctggccaccagctcatccttggtgacggcgggttcggtcacgatggggtccaccgtcaccgtcacgccgctttcccagcggtccagcgcggcggtcacccgctcatagagcaggtcctggtccagcgtgacgccgggctgagattcggtaaagctgaacgtgcgcgtggcatagtcgaaggactgaatctgcgcatccaccggatcgcgcgtcacataggccgcgatatccgccaccagcgcacgcacggcctcatggtcgtagctggcggtggtcgtcaggttaattccgctttcccgcagggctacggcgcggttggtgcgctcgcggaagggcgtctgcagcgtgctctgaatggccgtggtgttggtgcggccgatagcgtaggcgcgctccaggacgtttcccaggtcccgctgggccggcacgttgctggaatccaccgtccaagtcttgttgccaatggccaccgttacggaaaaggcgttcggcacatccgatccgttggccgtgagcagctggcgcgcctcctccacggtcaggtcccctacatggacgccgtcgacaaaaatgccgggataaatcacatcgcggtccatgtagtcacggtactgcttgtaggcagccaccacctcggggtcgtagcgcagaagctcgccgttgataaaggcgtaatttccgaaatcccgccaaaagtagcctgccatctgcggcatcatgacgacagccagcaccagtatgcccagcacgctcaaagccgtcacggctacgcacatataggcgcgccagccgggatggtccggctttttgcgcccgccctgacgtccgccgccgggctttctggggggctgtcctccgcctgcctcactgcgctcccgtttcggcccctgggatggggccggcgcagcgtggaccggccttggctccggcttttttacggccgccgtttccagcggctgctcccaggagaggtcgtcgtcatagacaaaggcgtctcgcgcggatgaaacgacaggcccggtctcaggcgcggcatccagcatgctgtgatactgcgcggcgcccagccgcgcgggggcggcaaattctccccgcccgtccacaaccagccttcgcgctcgcttcacgctcggccccgaccgggccagccccgggcctcccgcatcatagcgccctgacgccatccgataacctccccgccgccgcggctcaggccagttccctgagcatgcggaaactcaatatctccaggccttcgtccagatgcacattcaccacggacgttccctccggcaccttcaaatccagcggggcaaagttccagaagcccttgaccccgcgctcgcaaagcacctccaccattcgctgcgcatgcgaaaacggcaccgcgatcacggcgatatccaccgtgttctcatccagataacgtttcagatcctccacatcctgcaccacgaggctgccaacggtcatgccgattttggtcgcgtcgttgtcgaagatggccacggtttcaaagccgttggcggggaaggaatccgaaagcgccactgcacggcctatgttgcccgcgcccacgatgatcatgcggtgggtgcggtccactcccagaatatggccgatatgctcgcgcaggccgctgacggaatagccatatccctggcggccaaatccgccgaaacagttgatgtcctgtcggatttgagaggctgtcaggtgcatgcgattgcccagcccctgagaggaaatctggtgaattccctctttttccagctccttaagatgtcggtaataggcgggcaaccgcttgatgaccgcctcggatacatagcctgccatagcgaacgttcctccattccgggttgtcaaagcagcggcctccccctgccggccgctccggcgacatttgtctgaaagctcattttgtattatagcacaacgtttgtttcctcacaaggcatgcaaggacgaaagcgcccgagaaaagcagccgtggatcggcctccacggctgctttgcgggccctctggggggcgtcagttctgctgcttgagggtgatgaccacgtgacggttgggctcttccccctcgctgtgcgtggtcacggcgtcgttttgctgcaaggcgctatgcagaatgcggcgctcatagggattcatgggctccataaccaccttgcggcccgtcttgatggcgcggttggccatgcggttggcgaggcggcgcagcgcttcctcccgcttggcgcggtagttttcggtgtccagcgtgacgcggatatagtcctctccgcccttgttgacatacaggctggtcaaatactgcagcgcatccagcgtttcgccacggcggccgatcaaaatgcccaacgtgtcgccgaacatgtccacgcgcacattgccctcctcgtcgcggcgggcattgatggtgacctccacgcccatcaggcgggtcacgtccgtcaggaaggtgaaggcgcggccctccggtgcttccttatcggcgggaggctgcgctgcctccgccgcgggagcggccggcttttccgccttgaccggcttcaccgccctgggcggcttctcgtccttcgcgggctttgccggtttctcggccttgggggaattcgcctcctgcgcagcggctttttcgggttttgcttccttcgcaggcttctcagccttggacctggaagcgcgcttgcgggcgggcttctgctccggctccttgacggcatcctccagagcgacggacgacagcaaatcctcgccctcttcgacatcctcgcgcacggtcaggcgcactaccacgggcttgccgcccagaattcccaagaatcccttgctgccttcatccagaatgtcgatcttgacatccgcaaaggagacgcccagcttttcaaggccctgggtaacggcctcttccatggttttggcgctggattccacagacctcatttcaacgttccctcccctgcggtctcaacctggttttcgtccatcttctcaaacatcttgttcatcaccaggccctgcacccacgcaaacacgttgccgaccacccagtagagggcgaagatcgcgttgtagctggagcagacccacagcgaaaagagcgggaagaaatacttcatgaacttgttggtgctggccgcgggattattgggatcggcggcgggctgcggctgggagagcgtcatcaggtactgggtgacggcagccagaatgggcaggatgaaccagccgttgttgtgcgcatagatgctgaggttgacgatcagcaggttcagctgcggcatggtcgcccacagctgggtctcctgagcatagaccggcagcgtctgcagcgcggcaaagacggtttcgccgctgatggttgcggcgtcgatgccgtactgcgccagcgcggttacggatgcgggatcaagcgaagcaaaaaccttcgcccagatgtcggccgggatgatgcgcaggttggcgctgtcggcgatgacgggattgaagggactgtccggcatccagatgtttttgatccacagccagctttcgttggtctgcgtgccggtggtgagcaggcccagggcctggctggccatctcggtattggcgacggtgcgcatggcggcgaacatgatgaacagaatcaccatcgataccagcatcggcaagcagccgctcatggggttgatgccctcacggcggtagagctcggcggtcttctgattaagcttttccttatcgtttgcgtacttcttttgcagcttggccacctgcggctgcagccgggtcatgcggcgcatgctcttgcggctcttgtagtccagcggcagcagaatcagcttgatcaaaagcgtaaagacgaccatgctccagccgtagttgtgaatgacggagttgatgccattgaggattgcgaccagaaagtcgttcatcgggggtcattccctccttaatgtggtatccgggatgtcggggacggggtcgtagccgcccctgcaaaacgggttgcaccgcagcaggcgcttgagcgccagccagcttccgcgcaaagcgccaaagcgctcgatggccgtgtaggcgtactgcgagcatgtgggctgaaagcggcaagcgggcggcgtatgggggctgatatgcgtgcggtagaaacggatgagggccagaaggacgtttttcatggcgcgttgcgcgcgggtgcagcaatcgtgccggcacgggcgagcagctgacttacctgccggctgagctgctgaaaggactgctccgccgcggaaggccgggctacaaacacatacagcccgccgtccatgcattccaggagcgggcgcacgcattcgcgcaggcggcgtttggtgcggttgcgcaccacggccacgcccacctttttgctcactgaaaagcccacgcgcttttgcctgtttttcacatacagcagcgtcagatccctggtggatacccgcttgccccggcggtagacatagctgaactgccggttggggcccaaacggttctgcctttgcacgaccttgccatcgtcctttccgggttgcgcgcttttggttggtatcggaaaagcccgtacccacttcacccgatatcagaaatggggcgggcttttccgaaccatgcttatgatgccgtcaggcacgatcaggcgctgagcaccttgcggccgcggcggcggcgggcggccagcacgcggcggccgttcttggtggacatacgggcacggaagccgtgcaccttgctgcgctggcgctttttgggctgataggtacggaacatcagtaaacactccttacagaaatcaatgtatggcgtcgcgcgcagcgttggcagcacgcaggataccacaaaacaactattctagtatagccaacgcgccgccctctgtcaagacggattgcaggttttccgccgaaaaaaagcggtatgcatgcttttgaatccaatgcggcatactgcatatgaaaatgaaccagtggagggatctcaatgagcgtcaagcgcgtcacctttgccccgtccgcgctggtccacggaccgcgccctgccgagcgggagatctatcgtcgcgatccccccgccgtgggacaaggccggccatccacctttccacagggaggcgcacagcatggataagcagcgcgtccataccaacccccagcactattcctggctcaccgagcagctttctcccccgtcgcccctgggcgcgggactcggccgcgccttctgggtcggagggctgatctgcgtgctgggacaggccattgcggatgcaggcatctattggctggacatgaacgcacgcaccgcctccagcctgaccagcatcacgctggtgttcctcaccgcgctgctcacaggggtgggggtgttcgacaagctgggcaaatacgcaggcgcggggtccttcgtgcccatcaccggctttgccaacgccatggtgtcgcccgcgctggaattccgccgcgaggggctggtgctgggactgggcgccaagctgttttccatcgccggtccggtactggtatacggcatcggcgcatccgtgctggtgggcgtggtctacgccctgtttttccgatagtcagattgttgggaggaaacgccatgccgctcaagcgcaccggcctgcaaaccattgatctcccgctccggcctgccgtatgcgcgtcggcggcctttgtgggcaaaaaggagggcgaagggccgctgggaaatctgttcgaccatgtggctcaggacgagctctatggccaggacaccttcgaactggcggaaaaacgcctctacctggacgccatccgcaaagccatccagaagggagggctgaagcccgaaaacgtgcagtttctcctcggcggcgacctgctcaatcagatcatcaccgcttccttttcggcgcgagagctgggcattcccttcatcggactgtacggggcctgttccaccatggccgaaagcctgtgcttgggcagcatgctcctggatggcgagcacgcctccactgtggtctgcgcggccagcagccatttctgcaccgcggaacggcagtaccgctatcctctggagttcggctcccaacgtcctccgacggcacagtggaccgtgaccggcgcaggcgcagtactgctgaccctccagccgcccgtcccgccgcaggcacgtgtcacgcgcgtatgcatggggcgcgtggtcgaccttggggtaaacgatgccaataacatgggcgcggccatggctccagcggcagccgacactttgctggccctgctggcggatacccatactcagcccgcggactacgacctcatcgtcaccggcgatctgggtcaggtggggcgtgatttgctgttgcagctcatgcgcgagcagcgcatgccgctggacgagcgcatccatcgcgattgcggcctgatgatttacgaccgcgagcggcaggatgcgcatgccggaggcagcggctgcggatgcagtgcctcggtgctgtgcgccagccttctgcccgccctccagcagggcgatctcaagcgcatcatctttatggccacgggcgcgctgatgagcgtgaccagcagccagcagggcgaaaccatccccggcatcgcccacgctgtcgtgctggagtcccccaagctataaaaaaaccgggaggcaaatccatgtcggtgctttggatgtatctgaaagtctttctggtgggcggcgcgctgtgcgccgtgggcgagcttctggtgctgcgcacacggctcacgcccgcccgcattttggtgtgctatatcatcgtcggggtgctgctcagcgccatcggggtgtacggcccgctggcggattttgccggtgcgggcgcgaccgtaccccttacgggctttggacatgccctgtgtcagggcgtgatgggcgccgtggatgaaatcgggcttatcggcgcgttcacgggcggcctgtccgccacggcgggcggcatcgcggcggcggtattcttcggaacgctgatcgcgctggccttcaaacctcgcgccaaatagccgttttttctgaaggcccgggctttgggggacggttgacaggacgccccctcctttgaggccaacacgtgcaggatgggtttgcaggccttgccgggctggataccggctgccggcaaggcagcatcgtccctccccgctcgtccccctcattcgtgccccggccgggatttcggtctgcggccccaggcgatattcagatccggcgatagacttttggcttcggtcctccaaacctcctgaaacaggttttctgacacgctgcggcggtcccgtttctccggggccgccctttttttcctgactttgcaaactttccgtccggccgcgcgtctatcaggtgaaggccttcaaatgaatcaaccggcaaggaggacagcctcatggacaagatcggcttcgaggcgagggtgcgggcgctgtggccgggcatggtgcgcctggcacgttgcgttacgcacagccatgccgacgccgaggacgccgccgcgcaggcggtgctcaactgctaccgccgcctcgcctcgctccggcgggaggacgcgttcgacgcgtggctgatgcgtgcctgcctcaacgaagcgcgcagcattctgcgccgccggggccgcgtggagctgcgcggcgactggcccgatacgcctgccggcacggacggcggcccggagctcacgccgcttctgatgcgtcttgacgaaaaggagcgcgtgccgctggaactgatgtattttgaaaactatccgctggaggagatcgccgcggtgctgggcgtgccacgcggcaccgccgcctcgcgcctgagccgtgggcggcgtcgcttgaaagagatccttgagaaagagggactttgacgatggatgacagagcatttgaccgcgccatgcgcatgctggccgcacgggaacgtccgcccgaagctggtacccggcttgcgcaagtgctttcctcgctgccggacgcgccggcaccccgtcgccgcatggggcggcggcttgtccccgcgctggccgcggcgctgctgatctgcgccacggcgatagcggcgcagctggggcttttgtccttttgggaaacaaacccgtaccggctgtttcacaaccgcgagcgcgtccggccggcgctcagcgtgcggtctcttgacgtaacggacgcttcgggcctgcggctcacggaggtctccgcgctggacgcggcgtggatcgaaggacggctcacgctggccctccgcgtggcggcgagagacggacagccgctgaccgtcgggctgacggaggaggacggcatcctcctcccggacgggcaggatgcatccggcccggtgcttttggaggacggcttcgcctgctatacccgttccggcggcgtggacggctggccggataccggcctgtccgttgcctgtcagccggatggggatggcgtgctgctggccctgcagctgcccgcggacttcatcaccgcttccgacctgcccgtcctcacggatggagacgcgatttccctgcgtctggaatggaccgtctacgatcccactcaggcccgtgtggctatcgaaagcgcgctgctcaccgcaccggcccccaccgaagctgaaaaggaggagatggacccatgaagcgcgcctggacttatctgctggtgttatgtctgctgctgccctgcgcagcggatgccgcaaaggcgcgcgatgcgtcgggcgtaaccgtgagcggcggtaggctttggggcgacattgtgggcgtgagcggggaaagcggcgaaacagcgctggccctgcgcgtggactgccccgtacccccggagtttacgcctgagcagctggccgttctgaccaccgaatggatcgtgccggacgaaaccgccgtgggcgaagccatgcgtgcgaccggcgcggactggagcgacggagcgctgaaacgctttggccccgcctttgcggccggaagcgccgctcccctctcccccgccgcaagcggcacggacgcagacggcgcgcgtgagcgggctcgcgccacggcgctgagcttccttttggactgtggcctgagcgaggggcacgtgatccatcttctccgcccggaggacgaggcgcggctctacgctctgaacgaggcccccgaagcgcgggaggccttcgtgcggcgcagtctggccgaatggtttaccccccgggtggattacacctgggtacagcttgccttctccttgcgcggcctgcccgtatccccctgcacctggacgggggcggacggggttggccacagctgcgtggccaacctctatgtgggcgatagcggcgagatgcgtgatttcaccttgtcctatgccccgcgcgaggtgagtgccgcgccttatgccggcgcggtaaaaacgccgctggaggcgcttgaggacctggcacggcagtttgactgcatccagcccgttccccgcgaggatgagcgtgggcgcgccctgcccgcccactggcccgtggtgctggacatccgccccgcctatcacaccgctgacggcgtgacctttttccccgcctggctggtcgccaccgcctggcaggattcgcacggccagaccggcatgccctggcttgtcgccatcgacgcacgcaggccctgacatgtgcaaagcggcgcgcacccttccccggccccgttggaccgcccggaagggcgcgcgccgctggttggcaacgccatgggggatttgccggtcatttcacagggcgcacccacgcttccggggtgtcgcccgctgcgccggttaggcgcgcctgcgcagaaacagccgaaagaatccgcttaagaaccttggcgcacgcacgcagatcatcctgactgacaagtttctcacctccaagccttgctaagccgcaaaagcagcgctcccgcaacgatcagccccagccccagcagcgccagccacgcccagcagggaatgcataaaaacagcaacagaacgcccagcgccagcagcgcgtaaccggcgatcatcaacggcgtgtttttcccggagggatagcatttttctacaggcatgcggcgtcacctcgctcatttccactatatgcaccctgcgccgaaagatgcggggacttttttcatgaataatcggaaaaaagcggtgccctgctccgtctatgatattgaaaggtggtgcgcatcatggagggagacgggcgcgagcggcgtctggaagagtcaaaagcccttttgagaggtacagccaagcgcattcagaaccccgatgccttctctctgtgggcagcctgtttcgctgacatgtgcggtaaatttggaagtcctgcgcagcaaggttcgccgtttccctcccatgagccctgaagggaacaaagggaagcgccgtcctgtggactgacgcttcccttcggcgcctgcggcgcggcaggggaaacgtgcgtcgctggattcggaatacagctcggagggctgcggccctccgaacctctcaaaagagtttttgacagtctgaatcgggcccgccgctcgataggcggcgggcccgattgtgaaaaacggctgcctgcttccaggcgtccgttaccttctgcccagtctggcagcggtctgcatgggcatgtcgatacgaacctcagccacccgctgccccacgttcacctgcatgcgggcatccagccccgcatcgcgcatctgctccaccacaccgcgaatcgcgttgacgtacaggcgataatcgcggatcaggggcttcatatgccgtccgcccgccagaggaacgggcatgcgcgccagcacgtcgctgaccagccgttccgtatccggcacgctcagcttttcctcgatcacatgcctgagcacgcgcaggcgcccctggatgcccggcacgcgcaagagcgcctgggcatagccttcgcacaggccatgctcgcgcagcagccccatcgcctcgtcgcccaggttcaaaaggcgcagctttttgcggatggtggcgggcgtgcgcccgatgcgcgcggccaactccttggggtccatccccgcggccagaagcgcccggtattcctccgcctcgtccagataatgcagacggccgcgcatcagctggtccaaaagccgcgccacacgcctttccatacattccgcggggcaggtaaccgcatccacacagacctgacccgcatcccgcatgcgccgcagggtgttgagtccgctcaccagcgtatagcgcccatccgggcgctgggacaataccaccgcgccgtcgggctcgccttccgcgctttcttcccagggttccacgatctcaccgatgggtacccatcgtacctgattggccgccgcttgcatgtaacggcctcctttgctcaacggatcggacgcgcccagaggccgcacatgccctcccccttgacatgcggggcctcacgggcgcgcccatgtctatgtcattcctccccagcccgccgctttcctgccggagcagcaggggaaccgttcgacagcaaaagcgcggcgcgcccgaaaaagagcgcgccgcatgtcggtttttgacgaattctatttttttgtattccccattcccagcggagcacggccgggtgtgccggcttttcggggatattgtcgaacggttttttccttcttgcggcaggcgacgatgatgtgccgccagtccggctgccccggaacgtctgccggcagcacctccagcgcgccgcctcccagcatccgggcggcccggcctcccgcctccagctcgtcctgcgcggcgggacccttgtagcagagcatgcgcccgtccaccgccacaaagggcagcatcagctcgcacagcaccggcagcggagccaccgcccgcgccacggccaagtcgtagcgctcgcggtgttccggattgcgcgcgccgtcctcggcccgtgcatgcaccaggcgtacatgggtcagtcccagttcctccaccacggccgcgaggaaggaaatccgcttctgaagcgcatccagcagcgtcacctgcaggtccggccgggcgatggccagcggcaagccgggaaagcccgcgccgctccctacgtcaatcacacgcgcgccatgcgcaaacagcccctccagccgcaggggtgccagcgaatccagataatgccggtagagcgccaccgcaaagtccgtatcgccggtcaggttcatgcgagcgttccactcacacagcagccggtgatagcgggcaaggcgcgccggtgcggcggcgtctgcgcccagaccatccaggtgccgcgccagttccgcctcccacgcatccaggtttacagcttcagccccaggtatttcacgccccagtatttcacccatgccaacgcctcgcgcatatgatttttgagccagtagttccattccggacggcacgggctgcccgcgccctgcgcctcaagccccgcgtcacgcgcgatggccagcgcgcgaggcagatgatagtcgctggtgacgatcagcggtttctggcatcccttttcctgcaggatggcccatgcgtttcggatgttttccttcgtgtccgcgctgtgcgggtcgctgatgacatgctcctcgctcaggccctccgcgatgagcacagcccgcatcacatccccctccggggcgggttcctgtccgccctgcccgccggtgacgaccatgtagcagggatgcttttcatagtattccttggccttatccagccgccagcgcagctgcacggacggttcgcccgatggcagcacctgcgcgcccagcacgatgatgctgtcgtaatccgtaggctcaggcacgttgacctcccaataatacaccagaccgatcagcgcggcatagcacaccacgccggccacaaccagccacacaagcgccagcagcgccttgaccgcccagcggcattttttccctgtgttctccatgcgttatgtttgcttttcctttcgttttttcatcagttcggcccggataagcgtttcgccgtccgaattggccacgcgggtgagcagcctgtcctcgcgcctctcgcgcgtaatcagcccgcagccggccatgctcagcgcctccctgccggatacgatgatgtggtccgccatcgccacgcccagtgagctcagcagcgccgccagctggcgggtgacctccacatcctggtgcgacggcacgggcgatcctcccggatgattgtggcacaggaccacggagtgcgcattgtgcctaagcaccgcctccgccaccacgcgcggatacgcctgcacctcgtcgatggacccgcgcgcgatgagctcatccgcgatcagctgcatcctgccatcgaggcaaacggcgtaaaagtgttccgtccgcaggccctgcaaaagccgcacggcgtgcttttccgccattccgcggttgcagatcagcttgccggtattctcccggctcatctccagccgccgggcggcatggctgaaaaggctgagcagcagcgccgcgtactggcccacgccttcgaccttcatcagctcttccacgggcgcttccagcacggcatgcagggttccgaaccggtccagcagacgatgcgccaggggatttacgttgcgctggggaatggcgtaaaacagcatcagctccagcacctcgtggtctgcgaagccctccagccctccggtgaggaaccgctccctcatccgctgcctgtgcccggcatgctctccagccatacagccccctcctccgcccgcttatggcatagtatagcataaaaccgctcctttgtacaaacgctccggcagcgttttgtaacaactgccccgcgaaccgtaaccggggcaaaaaaacggctgaagggggtttaatccgcttgaagcatgttgtataataggtagtagtatacgcattcatcgcggcagggaggggaatcgatggagaccttgtgggcacaaatccagaccgtgctttggaacgtgttcaaccgccccaccatcgccgacgtgctggatatcctcatcgtggcctttttgctctatgagctgctcatgctcaccaaggaaacgcgcgccagcgccgttctcaagggcctggtcacactggtggtggccagctgggtaagcgatcttctgggcctgacggcgctcaactgggtgctgctcaacgtggtcaataacggcgctgtggtgctggtgattctgtttcagccggagctgcgcaaggcgctggagcagctcggacgcggggccattcacaaaacctccgtatccgccgatctggaggaaagcagccacatcgtcaacgagatcaccagctgcctgctcaccctcagccgccgccgcgtgggcgcgctgatcgtcatcgaacagcgcatcggcctcaaggacatcattgagaccggtacctcgctcaactcgcagatctccgccgcgcttctggaaaacatcttcgagcccaatacccccctgcacgacggcgcggtggtcatccgcgggccgcgcatcatggcggctgcctgcatcctgagcctcagcgacggcaagggcatcagccgtgaactgggcacccggcaccgtgcggccctgggcgtgaccgaaacgacggacgcgatttccctcattgtcagcgaggaaaccggcaccatctccgtggcgcgcaacgggcggctgacccgccatctggaccgcgcggcgctggagaatctgcttttgtccatctatcatcagaaagaaacggggctatggtccaccttaatggaaaaaaccaagcgccggaaaggaggcgccgaatgaacgccgagcccaaaaaggctgccgagcagccgcgtcccagcctgcgcaaggcgctcaagggcgctccgcagcgcctttggcgcctgatttatcacaactggccctggaagctgctggcgctgtttctggcgctgtgcctgtgggcagggctgattacccaggaccccaccctcacgcgcgagcgcgtattcaccgatgtgacggtcagcgtggtgggggccgacacgctccgccgcaacagcgggctgatcgtcctctccggtctggaggatgaaaacctgaccgcgcgcctgcgcgtggacgtgccccagcgcgaatacaacaccgtgaccgcctccaactacaacccccgcgtggatcttacgcgcatcaccgaggccggcgagcagaccctgcgcatcaataccacctccacctccacctatggcaccgtgcggggtatatcgccggaaagcatcaccgtggtggtggatcagtttgtgaccaactatcgcgtccccgtatccgtcaacatcatcggcgagtatccggaagggttctacggcactccgatttcgctggacccctccgccgtcaccctcagcggtcccaaaagcctggtggaccagatctcgcgtgtttatgtggacttcgatgtttcccgcctggccgcgaaggccggcacggtgcgcacggcgcttcccatgcggtttgtcaatgctgacggcgatcccgtggaaagcgatctgctggaagtcaccagcgcggatgtggtgctgcgcaccatcaccgtggaacaggacctctaccccacccgcacggtgagtctgtccagcgagggactcacggaagggaagcccgctgatggctaccgtgtggcgggcgtcaccgtcaccccttccaccgtggtcgtcgcgggaccgcagtccacgctggacctgctggaggatctctccatctccgacccggtggacatcaccggccgtaccgaaaccttctccgtagaggtcgagccgcaatggcccgccgattcggtctacctcagcgccgataccgtgaccctgactgtggaaatcgaaccggtgatggtatcgcgcacctttgaaagtgtcaagctgttttcacgcggcgcgaccggcgatgtttcggtcagcctcagcctcaagacgctcggcatcgtgctcagggggccgcagctcatcatggacggcctgcgcgctgccagcgtggtggcctatgtggacgtatcgggcctggagccaggctcctatgaactgcccgtggagctgcatgtggaggataccgacatgaccggcatgaccttcaccgccacgccctccaccgttttggtgacggtgaaatagcccatggaaaggagccggtgaatgaacggctttgccaatgcgattctgaccttgctgctcagctggatgcgcgtgcttgtcaacgacctgtggcgccttttgtccagcgaggatgcaggtctgttctaccgttttctcgcggccaactggaaagtgatcgtgctgattctctgcgcaggcggctttgtgatcgaccgtatcatctatctgatccgctggcgcccgtattacgtgtggtcttccaggctgggccgcctcaagcgtgcgcgtgccgcccggcacggggatgtatacccggaggaggacgccatccccccggaggaggagccttcctcttcgcccgacgggcaggaggttccctttccggatgattctgcgtcctatgcacccgacgccttcgatcaggcgtatccccaggacttcggcgccacgcgggcctatgctccagcgcaggattttgcgcccagctcgcaggcccccgcgatgaatcaggccaccgtgcagtacgcgccgctggagcaggggccgctgtatgcgccctattcccagccctatcagcccccgcaggatctggaccccgtctttgatgaaacggaggaacgctgggaggagggagacgcgctggtccgccctctgtgggacaaccccgccgagggaatggattcgtcctttggcgcgccccggcctgaacccattcagtccatccgcgacatgcaggcgggttttgctccgcccaggcccccggaagagctgtacgcgccgccacctgccccacccgccccgccgcccgctgcggaagcgcggccggtacatcccggcctggatgcggcggagttccgcgaacgtctgggcctgacgcagccgacgtccctttccgcggaggaggaaaatgcggatacgccggaggcgcagcccgccatgaagccgccggtattccatccctttaccatgcgcgcaggcgcccaggcccccacctctggcgggagcgccctcaggcggctggccaaaaaggcgcgcgatctggtcggtgtggacgacgaggatcaccgtcccaccattcatgacctgcaatccaccgtggatgtgacgcaggcgtttcatgagcccgtctatccccgtcccagagatcagcaaggcggtgagaaataatgctgcccattgacaaacgctacaccgtgctggtgggcaattacggcagcggcaaaaccgagctggccgtcgccatcgcgcgcacacagcgtgcgcgtgagccggaaggccgcatcgcgctggtggacctggatatcgtcaacccctattttcgcagcgctgagcaacacgcgctgctggaggcggagggcatcgaggtattcatgccctcctttgccatgtccaccgtagatattccggccctgcccgctcaaatccaggcggtgtttgagcagccctacgcgcatgtggtgatcgacgtgggcggcgacgataccggagccaccgccctgggccgctatgcgccctacacgcgtgccctgcgggatgagatgaacgtgctctacgtggtcaacccctgccgtcctttcagctcgtcggtggaggatatcaccgggctgtaccgcctgatcgagcggcaggcccgcctgacgcccgaccacctggtcaacaatgccaatttgcaggaacacaccaccccggaggtgctgctggccggtcaggagctgcttcagcaggccgccgcgcagctggaccgccccgtgagcatgatcgccgggcgcgcgcatttgaaggaagctttgccggatgcgctcaagcctctgttctttgcctttgaacccatcatgaagccggattggctggtggacagcgaatgagccctgcgctgccgcccgcctttgtgtcccgcatgcgcgcgcagctgggagaagaggcggacgcctacttcgccgcaatggagatgccctgtctgcgcggcctgcgcctgaacccgcaaaagcccgtctccggcgcggcgctggaagccgtgggcggcgtggaggaaccggtgccgtggtaccctgcgctggggcgctatctgcgcaacgacagccccgccggaaccgatccgctgcatgaagcgggcgcatattatctgcaggaacccagcgccatggctccggtgagcgtgctttcgccccggcccggcgaatgcgttttggacctgtgcgccgcgcccggcggcaagagcacgcagattgccgcggcgctggcgggcgaagggctgctggtatccaacgaaccggtgccttcccgtgcaaaaatcctgagccgcaacatcgagcggatgggcgtacccaacgcgcttgttgtgagcgcccagccggaggcgctggccgcgcgctggggcgtcctgtttgatgccgtgctggtagacgccccctgcagcggcgaaggcatgttccgccgccaccccgaaacccgcgccgaatggaaccccgcctctcccgcgggctgtgccgagcggcagcggcgtatcctgggctgtgcggccgcaatgctgcgtcccggcggacggctggtgtacagcacctgcaccctctcccccgaggaaaacgaagaaaccgtgcgctggtttcttcaggagcatcccgacttttcggcgcagcccttttccctgccgggcgatcatggtccaatggacgcgccggagggcatgctgcgcctctatccccaccgcgtgcgcggcgaagggcacttcatggcctgcctgcgccgcgccggagacgcgcccgcggcggacctgatgaggcctgcggcggagcggctctcgccgcccgcgcccgccgtgcgcgccgcttattcggcctttgctgcgcctcttcgcggcctgccggctgccaatgcgcagctgggcgacgcgctgctctccgcgcccgatctgccgccgctggacggggttcgtgtgctgcgcgcgggggtgcagctgggcacgctgaaaggcaaggtctttgcgccggaccacgcgctggccatgtgcctttcccccgcctgcggcctgccggtgcttgcgctggaccgcgccggggcgctgcgctatcagagcggggaggcccttcccgcgccggaggacatgagcggctgggcactggccgtatacgagggtctcgtgctgggctttggcaaggccagcggcgggcagttcaagaatcactatccaaagggcctgcgcaggccgtgaaccaaaggagcaccacatggaaaccattcgcttgaaaggcattgacgtgcctgtatcccgcctgtgcgcaggaggctgccccgccggggaatacggctgggggcaggtggatcacgatcagatcgagggggcgcttcgccgcgcctttgaatgcggcgtcaacttctttgacaccgccgatacctacggtctgggccggtcggagagcaacatcggccaggcattgcgcgacgtgcgcgatcgtgtggtcatcgccagcaagtttggggtgcgcgtggaaaacggccgcaccttttatgacaacagccccgcctatatcgaacgggcgctggccgcgagcctgaaacgcctgaatacggactatatcgatctttatcaggtgcattatctggacggtgtgacccccgtcgatgaaatgatggaggcgctgctcaggcacaagcgtgccggacgcatccgcgcggtcgggctgagcaacgtgacccccgctcaggccgccgccttcattccctaccgggaccatgtggcctcatttcagaatcactacagcctggctcaccgcgacgacgaggccgccatgctcgaaactgcgcgcctgctggatgccgcgccgctcacctggggcagtctggggcagggcatcctgaccggcaaatacggggcagacgtgcattttgaaaaggatgaccgccgcagccgcgccgtttatgacaacttctacggtgacaagctacttcgcaacctgcgcatcgtggacgtcatgcgccccatcgcgcaggcgcacagcgtctccgtggcagcggtggcggtacgctggattctggaccatctgccccggagcgtggtcattgcgggcatgaaaagccccgctcaggccgaggccaacgccgtggcgctcaccttccgcctcacgcaggacgaggtggccgcgctggaggcggcgagccgggaatcataagtccgaaacgaaaaaaagaaagaggacgcgcccttttctgcggtgcgtcctctttgtgtctggcctgttccattacagatacaggttcatcagatccgcgtcataatcccgcccgttgatgcggaagaacttcggatacacgccgatgcgctcaaagcccatcttctggcacagcgagatggcgctcacgttatccgaacgcacctccagctcgatgaccgatatgccgccctgcctggcgtgctcgatcaggtggttcaccatctgcgtgccgatgccgcggtgccagtatttcttgcgtaccgtaaccgacagggacgcgcggtgctgcgcgcgctcgcggcgcatgcacttgagagcgcccatggcggccagctcatcgccaatgaaacccagcaatagcaggctgcgcccggtgatgccctcgatgtagccgcgctcctgctccacgttcatgtccagcccctcggcgccgaaggacaggttgtccgattcgcccgcgatctgcgcaagataggccagcgtcatttccgcgtcgtcgggggtggcggggcgcacgatcacgcggtctgcgccggtatcggcgtccgtgcggcggatgagttttcgctggatcttgccgctgacggtcttgggcagctcatccacaaactccacgatgcgggggtatttgtagggggccgtgacctgcttgacgtgattttgcagctccttcttgagcgcgtcggtgggctcgtagccacggtttttcaccagcaccaccgtggccttgaccacctgtccgcggtccgggtgcggcacggccgtcacggcgcattccagcaccgccgggtgggtgagcagcgcgctctccacctcgaagggcccgatgcggtagccgctggacttaatcacgtcgtcgctgcggccgatgaagttatagtagccgtccacatcacgccaggccatgtcgccggtgtggtacatgccgttatagaataccgcgtcggtctgctcctgattgcggtagtagcccagaaacaggcccgccgggtggcccttgtccagccggatgacgatttcgccctccacgccgtcatccacgtcctggccgttttcgtccaccagcgcgatgtcgtaggcgggcgagggacggccggtgctgccggtcttgggctccatccacttgctggtcatcagcagcggcgtggtctcgctctggccgaagccctcgtgaatcttcacgcccgtgagccggaggaactggtcatacacttcggggttgaggggttcgcccgcgcagttggcccatttcagggcactcaggtcgtagctggcgagatcctccttgatgaggaagcggtacaccgtgggcggcgcgcaaaagctggtcacgcggtgcttttcgagcattttgagcaggtcggcggcgatgaagcggtcaaagtcgtacacaaacagcgtggcgccgcagatccactggccgtagagcttaccccagcccgccttggcccagccggtgtcggccacggccatgtggatggagtcgtctcccacgttgtgccagtaataggccgtcaccgtctgcgcgatgggataggtccagctgtgcgcggccatcttgggcatgccggtggtgccgcttgtgaagtagataagcatgatgtcgtcgttcttcggcagctcggcgggcttgtcccactgctcggaggcggcggccatctccgcgtcaaaatccaaaaagcccggttcgtcgcccagcgtgaacagcgccgtgagcgtatcgcactccggcgcggaggccagcacgtgttcgcgcacctccggctcctccacgcacagaatggcgcgggcgctggaagcctgaacgcggtagacaatgtccttcttttgcagctgcgccgtggcgggaatcagcacgcagcccagcttgagcaggcccaccgccgctacccagaactgccagcggcgcttgagcatcagaatcacggggtcgccctttttgaggccgtgcgccttgaacacattggccgcctggttgctcatgcggctgatttcgccaaaggtgaaggtgcgctcatgccccttgaggtcgcaccagatcagcgcccgcttatcgggcgagatgcgcgcgtattcgtccaccacatcgtaggcgaaatggaaatgttcgggcaccttgagggtaaagtttttttcaaaatcctcctgagacgtcaggtcggtacgaatatatcggtcagccagcatacggtttcaaactccttcggaacggggggatgcgatcgcccggacgcttacgggatcacgatggccagaaaatgcaccgcctcgccgccgacggcctccatggcatgcggcgtgcgcgaatcatagtacacgctgtcgccgggatgcaggaccacgtcgtttttgccgatcacgatgtgcatggtgccggagaggatgtagtcaaactcctgtccgtcgtggctgttgggggtcaatgtcttgttgtcctccgggtccacgaccacatacatcggctcgatcttgcggccaacgaaattataggccaggttgcggtagacatactgatcatgacagctggtttcctcctgtcccctgcccgcgcgcgtgacgctgagcacgttgaggcgcggcgcctcaccggtcaggagctctgtcatatccacatgaaatacctcgccgatcttaaccagaaagctgatgggcatatcgacctcgccgctttcatatttgcggtattcttcgacaggcacattgagcacttcggccatcttgtcaacggtgtagtccgaaatctctcgcaggtccagaattctcatggccacttgctttacgggatcggacataacgggtgcgcctcctttttgccccatctgggcactttcgcgtattatagcacgcaagcatgcaaagatgcaaggcgcgggccctgcattcaggcgtgccaaaaaagctcgtctccggcggtcccttccgccagtgcacgtttcccctgctcctgttgtgcggccgggaaaacgttcgctggcttcggatttcacttggagagccggggccctccggccctcccggaccaggttttttgtcagtctgagatgccgggtgcgcaccttgcatcctgtatttttgcgatttttttattcctcccgctgtcccgcggccgccatcacgctgcgcaggcccgccacgctttccaccggcagggaaaacatcaccgtgtgcgcgggactctgcaccccggcgtgatccatcacagcccgcatgatgcggctgcggtcgcctgccgcggtcaaaatcagcagcatctccttttcctcagcgatggacaggccgaaaaactgactgctttcgcccggctgcgtgcccttggcgtgcagcaccgtgccccctgcggcacctgccgcgcgcgccgcgtccatcacggtatccgcatggccacggttgacaatggcgatgatcagttcatacagaaacgcagcaggcatatccgtcacctctcccatgatgatgtcctgtccctccgtgaggctgcgcaggctggttgcgcccgccacgctgcccaccggggttgtgaaggcaatgcccgcgccgggcatatccagccccatctcgcgcaccaggcgggccagcagccgcccggccctcgcgcgcgaggtcatggcccacagcagcgtcttttcgctctcttccaggcccaaaagatccagcagctttttgcctgccgttccccggcaaggcaggctgtgggccgtttttattccctgatccccgagaaagtccagaaacgcctctccgtccccgcgcccgacgatcagatttatcagacataggtcatgcatgatgcatcctcccccatgcggcaatggaacgcgccgctcattcgatgatctcctccgcctccgcctgcggcgcggtcgccttcagcgcgcgctgtctgcgcttgaacaccagccccagcacctgaatcgtaatcaggggcgtcatggccaccatggccaccacgccaaaggcgtccgtggccatatccccgcccacggcggcgcacgcgcccatggccatgggcaagaggaaggtggccgtcatcgggccggaggccacgccgccggagtcaaaggcgatggaggtaaaaatcggcggcacgaagggcatcagcacaagcgccacggcatagcccggcgccagcagccacagaatgggcacgccggtcaggatgcgcagcatcgccagccccaccgacaccgatacgcccaccgacaggctcaatcccagcgcgcgcggaggaatggcgcccgcggtcagctcgtacacctgccggctcagcacatgcaccgcgggctcggccgataccacgaagtatcccatcagcatccccagcggcaccagcagccagcgccgctccatgcccgcgagggcctgtcccaggtagttgcccatgggcatgaaccccacgttcacccctgtcaaaaacagcgccaggcccacatatgtgtacaaaagtcccgccgcgatgcgcagcacctcgcgcctgggcaggtgcagaatcatcagctggctcccggcaaagaacgccgcgatgggcgcaagggcgatggccacctcacccagatattcaggcagggcatgggcgaactggcgggacagctccagcgtgtccgccgcgtcgagcagggcggcgtccggcccgtaggccgcgccgtccggccggtaaatcaggcccagcagcatcaccgccagaatgggaccgacggagctgagcgccaccaggccgaagctgtcgttttccgcattggggtcgctgcggatggcgctcacgcccacgcccagcgacaggatgaaaggcaccgtcatggggcccgtggtcacgccgccggcgtcaaaggccacggccagaaacgcccccggcacaaactgcgccagcacaaacaccagcgcatagcaccccagcagcagccacgccatgcggatgcgcagcaaaatgcgcagaagcgccagcaccagaaacacgcccacgcccagcgctaccgatacaatcagcgtcaggtccggcacgccgggcacctgatgggccagcacctgcaaatccggctccgatatggtcacgatcacgccgaccagaaaggagcacaaaagcaccacccacagctttttgctgcgggtcatggctgcgcccacgtgctcgccgatggggatcatggccaggtccgtgcccagcgtgaacaatcccatgcccaccaccagcagcaccgcgcccgccaaaaacgccagcatcgcgcccgagggcgcaggcaccgccagcaggcccagcgcaatcacgatagccgtgatcggcaggaccgaacgcagtgactccttccatttttcaatcagcgcgccgcgatggcgcgcatggcgcatccgatccagccttcctttcagtcgtcgttgatttccagcacgcattgcttcacccctttgacgttgtcgctacgggttcgcccaggccgcccatccaccgcgccaccagcaggccggccagcagcgcggcaagctgcgcccagagcgtccacccgcttccaaagccgggaaacaccagcgctaccgacaccagcaaaaagcccagcaccgcgtagcaggtatatccccgcgcatggtcaaacagccattgaaccgctttcatcgaaaccagcgccgatgccgcaaatcccagtgcgaccagcgccagcaggcctgcctgcggatgtgccagcgcgtcgagataggcctgataccaccccagattgatgaggataaacgacgtggacagccccggcaccaccgtgcccacgccctccaccagccccaccgccagcgctcgcagaggcgtgagcgacagcgcccgctccatgccctgcgccctcaaaagcaccatgggcagcgcgagcagcacgccgcccgccagcgcccccagccaccgcctgcgaaagcgcccgtcctcctcagcctcggccagcaggtcgggcacgccgcccagaataaagcccgtgaacaagcacagcatgggcttttcatacagccgcatggccgcgcccaggcccctggcacccagcagcagccccgccgcgccgcccactgccagcggcgccagaaacacgagcttcctgcgcgtatcgtggaaaatgcccagcaccgcatccagcatgggccggtagagcccaaagctgaccgccatcaccccgccgctcacgcccggaagcacgcagccgattcccatcagcagccccgccagcacatttttccaaaagccaccctgccgccgcattgcgcaccgccgcctttcccctttctgttcagacgagcctatgcgcgtctcaaacggcctataccgagtatagcatgccccagtgaaggatgcaaccggcaaagaaaatagggggaccgatgggcacccagtccggaaggacgatgttcccggtatcgcttttcgattcgccacctcatacactttacccgacttcctcgacacctgggcgtcctgccgtcattccatccgccgggtcaccggcacccacacctcatagcgcgtatgaaccgggtccggttccagatatacctcgatgtccggtccgtcggcatactcatagccggagccgggcagccattcggtcacgatgcgtttctccagcgcctgaatagagcggcccgtgccctcgccggaaaatacggcccaggtggcggcgggcacggtatacgtctcaaacgggccgggatcggcctgcgaggccacggcgatgaggtatcgccatgcttctcctccggtgcacgcgctgatgcccagcagccctttgggttccccgtccatccgcgcggccagagcggccacggtgccgtcgcgcgcggcggcgtcccacatcaggggaacttcccgaaagttgttttcgatctcgcggtccagcggtcgggagatgcccaccacgcggaaagcgtctctggtttcgatgcggtactgcatttcttcccctccctgtacgctcaggctaaaaaccattctggggtagcatttgaccggcacgcctcccgtgcggactgccgagggcgcaatcccatgcaccgcccgaaatgcccggttgaacgccgtgggcgactcgtagccatagcgcgccgcgatgtcgatgaccttatcccgcccggcctgcaaatctgccgccgcaagggacattctgcgccgccgcacatattcccccagaggcatgcccgccagataggtaaacatccgctggaagtgataggccgagcagcaggcaatacgccccagccgctcacagtcgatctcccccgtcaggctgagctcgatttcgtccatggcccggttccagcgttcgatccattccatccggctgattcctcccttatgtatggacattgtagcacaatcgccggcgcctgtcctctccgcccttgcctgaaaaagagagcgggacggcaaggacttgcgtccaggccgtcccgcaggacatgtgatatcaggcttacttggcatattccgccgcactggcgcccgcgatgcggccgaacacgatgaagtcagccacagcgttgccgcccaggcggttggcgccatgcacgccgccggtgacctcgcccgccgcgaacaggccggggatggcctcgcccgcctcattgaggacttcggtggcggtgttgatcttcaggccgcccatggtgtggtggatgcccgccgtcaccttgatggcgtagtagggagcggtgttgaggggattggcgaagctggtacggccgaactcctcatcggtcttgctctcgacgcaggcgttccaggcttccatggtggcggtgaaggtctcggcgtccacgcccatggcctcggccagcgcggcgtagtcctcgccgctcacggtcaggcccttggtgatgtagccggcgatcacgctggaggcatccaccatcgcctgatccaccaccagccagctgtagctgccgggctgggcgatctcggcggcggaaaccacgtcgcgggtgcccacctcgtcggtgaagcgcttgccctcggcattgaccagaatcgcgccgtcgccgcgcaggccctcggtaatcagggcagcggtgtcaaactgcacggtgggatggatctgaatctggtccatatcgacggtcgccgcacccaccgcctgggccatggcgatgccctggccctgtgcgccggcggcattggtggtcataaagcctttcagctccggtttgtaggaggcgaccatctcaaggttcgccccgaagccgccggtggccagcacgactgccttggcctctacgatcacgttggcgccatccttggtcacgccttccacgccggtcacattgccgttttcatcctggcgcagggcggtggcggtggtgttgaaaaggatctcgatgccgcgttcctcgcaggcgctttccagcacgggcacgatgtagctgcccacggagatggtcttgccctcggcgtccaccgggcggtggatgcgcttgaccgacgcgccgccaaagctggccacgtcatgcagctgagcgccgatggtgtccagccagtcgatgccggcggcgctgttttcgcagagggtcttgaccaggtcaaagtcattgatcgccttgccgccgatcatggtatccagctccatgagttccacgctgtcgaagtagccctcgggattctcctgataggccttccactgctcgctcacggtctgagccagggcggtcacggtttcgtcgtccgcataggtctcggcggcgctggccagcgtcttttccacgccggcttcctctgcgaaggtgttctcgtcctgccagacggtcttgctggcgttcatgccgccggtggcgcgcacggagttgccgcccaccatcgcctggctctccaggatgaccacgctcttgcccgcgtcggcagcggtaatggcggcggtcatgcctgcgccgcccgcgcccacgatgaccacgtcgcagctgcggacctggtcttcgacggtgcccttgtccacggccacgttataggcctcggggtccacgcccgcggcggtcagggcggccctgacggcctcaaggatcgcgttggaggtgatggtcgcaccggccaccgtatccacggcgatgctgccggattccgacatatcggcgggcatcagttcgatggccttggagcccacgccctcggtctcccctgcgccctcggcggtcacggcggtgatagccccgtcggtcaaagtcacagtcacggtcacatcgccgccaaagcccttggccgtgccggtgaagtcgccgctgacttcagcaggagcggcttcgcccagtgcggcgccggtcatcaccaacataatggcggtcaggatcgcaagaatgcgctttttcatgatggtccttcctccctggtaaaattgatgattttttaaccagcgcgtagtatagcatgtttctcccggtgaatcaaggggaattcatcctatttttcatctcacatcagaattgacatcacacaggaatttgccttctgttagaaaaaagatgatttcataacaaattcttttccctttccttcttctgcaactttttccatccaggaattgcaattcccgccttagcgtgctaaactaatgcacaggcctttttgaggccgtgccatattataaggagatgattcctctccatggtggaaaaatggagcatcccttatcccgcctacacgggtgaggagccgcgcaatgtatatgtgtacctgcccgacggaatggacgggcgggagcggctgcccgtactgtatatgtttgacgggcacaacgtgtttttcgacgaggacgccacctacggcacctcctggggcatgggcgcctacatggacgaaacgaacacccgcatgatgatcgtggccgtggaatgcaaccatagcccggataacggccggctttcggaatactctcccttttcctttgaggacccgcatttgggccatgtgacgggccgggggcaggagacgatggactggttcactcaggagctcaaacccctgatcgaccggcgctaccccacaaagcccggccgcgcgcataccttcatcgccggcagctccatgggcgggctgatgagcctgtacgcggtcctgtgctacaaccaggtgttttcgcgcgcagcggcgctgtcgccctccctgtgggtggcccccaaaaagctgacccagctgatcgacgaggcggacatccggcccggcacggtggtctacatggattacggcgcgaaggagatgcgctcgcgccggcatatgaggcgcgcctttgccaccgtgggcgggcggctgatcgaaaggcgcgtgctgctgaccagccgcatcgtaccccacggagagcacagcgaagcgagctggtcgcgccagattccctttttcatcaacacgttgctctacgagcagtcctgaaaggggtgtccctccaatgcagacggagtattaccgggagtacagcccctcgctggggcgcgacatggagatcaagcgctacggccatgcggggcggccggtgctgttcatcccctgtcaggacggccgcttctatgactttgaaaacttccacatgaccgacgcctgggccccctggatcgactccggtcgcgtgatggtcttttccatcgacaccattgaccgcgaaacctggtccgacaagggcggcgatccccactggcgcatccgccgccatgagcaatggatggacttcatcacccgcgaggccgtccccttcatccgcggcgaggccaaccggctcaacggctgggagggatatcccggcattatcgcctttgggtgcagcctgggcgcgctgcacgcagccaacctgtttttccgctttccggacctctttgacgggctgctggccctcagcggcatctacaccgcctcctacggctttgacggctacatggacgaggagttctaccgcaactcccctgtcgattacctggccggaatgccggcggatcatccctacatccagcgctacaaccagaaccggggcatcctgtgcgtaggccagggtccctgggagatcccggaaaccaccctgcgcctgcgggacatctgcgcccagaagggcattcatatctgggtggacgtatggggatatgactgtgcgcacgattgggactggtggtataaacaggtggcgtacttcgtacccttcctgctggactgatacctgcttggccgcatcaacgcacgaaaggagccgggtctgaaatgaaaaattttgtctttctctctcccaattttccaaccaactactggcagttctgccgggagctgaaaaacaacgggctcaacgtgctgggtatcggagatcagccctatgacgagctttcgccccagctcaaggacagcctcaacgagtattacaaggtatccagtctggaaaactatgacgaggtataccgcgcggtggccttcttcatctttcgctacgggcgcatcgactggctggagagcaacaacgaatactggctggagcgcgacgcccgcctgcgcacggatttccatatcgaaagcggcttccagtcgcaggatatggagcgcatcaagtacaaatcccgcatgaaggaatactaccagaaggccggtatccccgtggcgcgctaccacatcgtggacgattatgacggttgccgggccttcattgaaacggtgggatatcccgtggtggtcaagccggacaacggcgtgggcgcggcccatacctt

SEQ ID NO: 4004 - DNA, 8352 bp, Unknown
  16S sequences of unknown bacteria
taaaggaattaattttataccgggatctggaaaatggccagatccttttggatatgacatggattttggagcatctagagaaaaaggagcagatcagtgaggtacgggatcgcttcttttcctgtatgcatgatctggttgagctggcaggaaattatggctttgagaacaatttgtggcataattatctgacttttctgcttgtgaataatgaaaatattttcagtacggcctgtgagatccgtggcgtgacagaaggaagcctgttaagtctggcgcgacatgattttgcgatcttccgcgagctgtttgcctgcgattttacggagctggagcgcatgctgcaggccggagtgtttgaagaatttttgcattatgcacgtacagaatctacggggaagctgttcaaccgccgcatccgtgaccggatctgtgagctgagtggtcagctggcgaatgcagagacgctcgaggcatttacagagtatatggtatcgttctataaggaattcggtgtaggaaagctgggcttgcacaaggcgttccgtgtggcgcatgtcggagacgatgtgcagatcgagccgatcacgaatatcgcgcatgtaaagctggaggatctcgtcggctatgagcttcagaaaaagaagctgatcgataatacagaggcgttcgtagaggggcgcagtgcgaataactgtttgctgtttggcgatgccggtaccggcaagtcttcgagcataaaggcaatcctgaaccggtactatgaccgcggactgcgcatcatcgaggtatacaagcatcagtttcaggatttgaatgaggtcatcgcgcagattaagaaccgcaattataaatttattatttacatggatgatctttcctttgaggagtttgagatcgaatacaagtatctgaaagcggtaatcgagggcggactggagaagaagccggacaatatcctgatctatgcgacgtcgaaccggcgccatctgatcaaggaaagcttccgtgacaacgaggagctgcatggcgatcttcattcgaatgacacgattcaggagaagctttcgctcgtgtcacggttcggcgttacgatttacttcggatccccggacaaaaaagaatttcagcagatcgttcggacgcttgccgagcgcaatggcatcgatatgccggaagaccagctcctgcttgaagccaacaaatgggagctgagccacggcggattgtcagggcgtaccgcacagcagtttgtcgactatgtgttaggaaaagcttagcgcagcagcaaaatgccaaggcagactggagcaaatttatttgcgtaaggctgtattggcattttgggatgggcgaagcgcccatcagccacagacaggagctgcgtagcagcggataattcgcgaagcgaatgggtctgtggcctgcgcgaagcgtcgcattatacaacctcaggaacaggaggaagcccatggcactcaaaacatttgcggcgatcagtatcggatccgcagtgacagaaatgaaaatttttgaattcacctccagaagagtgatgaaggaggtagactggattagtacgcggcttggtctcggcctggatgcctacacgatgggtcggatcagcagccggaatgtagaggaactctgccgggtgctccgtgattttgcgcgcatcatggacggctacaaggtgaatgcgtaccgggcctgtgcgacgagcgcattccgggaatcccgcaatatgctgatacttgtggattacattgagaaacagaccggccttacgattgaggtgctcagcaattccgagcagcgattcattgattatcagtcgatcgcgtcggtaacgacggagtttgaatcgatcattcagaacccggcggcgatcgtagatatcggcgggagcagcatgcaggtatctctgtttgacaaggataagctgatcacgacccaaaatatccggatcggcagcattacgacgcgggagaagctgacgccgctcgaaaagaacagcctccattttgaaaaaatgctgcgggaaatcgtcgatcatgagctggcgggcttcaacaagctgtttcagaaggaccgtcagatcaggaatctgatcgtggtaggcggaaatctgcttgaagtcattcgcccgacggagaagggaaataaaaagtttgcctccatttccggggacaattttcagaagttctacgaacgcatcacagtcatgcgtccggaggaaatcgcagcggagttttcccttccgcaggatgcagctgcagagggagcgactgcgatggtgctctgcaaggtgctgatggagaattttggagtggacaccgtctggcttccgggcttcagcctgagtgacggtctggcttatcattacggtgtgaagaagcactacatccagaaaggccataatttcgatgaggatattctggcggcggcacgtacaatttccaaacggtataaatgcagtcagtcgcatgtgaagaatctggaaagcaacgcgctgcagatatttgacaagatgaagaaaattcacgggatggacagccgggagcgtctgcttttgcagatcgcggtggtgctgcacaactgtggaaaatttatcagtctggaggatgtctccgagtgtgcgtttcacattattatggcgacagagatcatcggattgtcacattctgagcgggagatgatcgcctatacggtccggtttaatacaagcccgtttttgtattatcgggagtttacgcaggaggccgatatttcgaaggaggaatatctgacaattgcaaagataacagcgatcttgcggctggcaaatgcgatggaccgcacacacaagcagaaatgtcaggatgtcacaatgaccttaaaaaatcgcgagctgaaaatcacagtgacatctcaggaggatttgtcgctggaatttggaacctttcgggaaaaagcggaattcttcgaggaagtgttcaacgtacacccgacgatccgacagaaaaaaagcatttgacgagaggagcataagcgatggcagtgatcgattttgaaaagccagagtattttacaaaccgggaaatcagttggctttcttttaacagtagagtactgtatgaggcgcgggataagagcctgccgcttttagaacgcctgaaatttctgagcatcacatcgtccaatctggatgagttttttatgatccgtgtggcctctctgaaggatatggtgcatgcgaagtataataaaaaggatatcgcaggcatgacaccggaggaacagctcacagcgatcagtgcagaggcacatgatctggtacacctacagtattcgacatacaatcgttcgctgcttccggccctgaagcagatcggtgtggaggtcgtgacggagcatgagtgtatgtcagaagagcaggcgcattatgcggatcagtattttgaggagacgatctatccggtgcttacgccgatggcgatggattcctcccggccgtttccgctgattcgcaataagacactgaatatcggcgcattgatttccaaaaagggcgaaaagggcagagctgaatttgcaacggtacaggtaccgtcggtattgccgcggattatccggcttccggacggaccgaacggggaaaagtgtgtgacattgcttgaagaagtcattgagcgcaacattgacaagctgtttttgaattacgatgtcgtctgtgcgcacccgtaccggattatgcggaatgcggatctgtcgattgacgaggacgatgcggcggatctgctcaaggagattcagaagcagctgaagaagcgtcagtggggagaggtcatccgtctggagatagaggataaaatggagccggagcttctgaaaattctgaagcaggagtttgcggtaaaagaggatgatatttatcggatcaacgggccgcttgatctgacctttttgatgaaattgtacgggattgacgggatggacgcgcaccgctatacgccgtaccgcccacagccggttccgggcatgaacgatgaggaagatatttttacgcagatccgcagaggcgacatcctgctgcatcatccgtatatgacctttgagccggtgatccagttcgtaaagcaggcggcgacggatccggatgtgctggcaatcaagcagacgctgtatcgggttagcggcaattctccgatagtcgcagcactcgcacaggcggcggagaacggcaagcaggtttctgtgcttgtcgagctgaaggcacgctttgatgaggaaaataatattaactgggcgaagatgctcgaaaaggcaggctgccatgttatctatggtctacatggcctcaagacacacagtaagattacactggtcgtgcggcgtgaggaagacggaatccgtcgttatgtgcatcttggtaccggaaattataatgattcgacggcaaagctgtatacagactgcggaatcctgacctgtcatgagccgatcggtgaagatgcgacggcggtcttcaatatgctctccggttattccgagccgaagagctggaaccgtctgatcctggctccgctgtggctgcgtgcaagcttcctgaacatgatacggagggagacggagcatgcccgtgggggtgttccggcgcggatcgtggcaaagatgaattccctgtgtgatcaagaaatcattgcagccctctacgaagcatccgcagccggggtggagattgacctgatcatccgtggcatctgctgtcttaagaccggtattccgaaggtcagtgagcatatccgtgtgcgctccttagtaggaaactttctggagcatgcccgtattttctatttccgcaacggcggcgaggaagaattctatatgggaagtgcggactggatgccgcgcaatctggacaagcgggtggagatcaccttcccggtcgaggatcaaagactgaaggaagaggtacgccacattttgcagattcagctggaggacaatgtgaaggcgcatatcctgcagccggacggaagctacgagaagattgataaaagaggcaagacactagtctgcgcgcaggaatatttctgcgaggaggcagtgcgtcgtgcaaagacagagagcgaaaagcttccggagcgggtatttattccgatggaagcggaggaagtataagaaacaaaatcgtcaggacagaagacgtagaaaggaagaaagaaatgtaccgggatcatacaaagacagtaacgatcggcaaccgggtcatcggaggcggaaatccggtgcttattcagtcgatgacaaatacaaagaccgaggacgtggctgcaacggcagcgcagattcagaagctgacaaaggcgggttgcgatatcattcgttgcgcggttccgacgaaggaagcagcggatgctcttggcgagatcaagaaacagattacgattccgcttgtggcagatattcattttgactaccggctggcaatcgcggcgatggaggcgggtgcagacaagatccggatcaatccggggaacattgggagcaaggagcgtgtgcgcgcggtcgtcgaggtggcaaaggagcgaaatatcccgatccgtgtcggcgtgaacagcggatctctggaaaaggagatcgtagcaagggatcatggcgtgacagcagagggtatcgtagagagtgcattgcatcagtgtgcgatcattgaggatatgggctatgacaatctggttatcagcatcaagtcctcaaatgttctgatgtgtgcaaaggcacacgaattgcttgcccaaaagacagatcacccgctgcacgtggggatcacagaggccgggacattatactccggaaatatcaagtctgcgatcgggcttggcattatcctctatcagggcatcggtgatacgatccgtgtctcactgactggcgatccgctcgaggaggtgcgctcggcaaagatgattttaaagacgctcggattgcgcaagggcggtattgaggttgtctcctgcccgacctgcggccggacgcagattgacctgatcggcctggcaaaccaggtacaggcgatggtcgaggatattccgctggatatcaaggtcgctgtcatgggctgcgtggtaaacggaccgggcgaggcgaaggaagcggatatcggaatcgccggaggaaagggcgagggccttttgatcaagaagggcgaggtcgtccggaagctgccggaggaagagctgcttccgactttgcgggaagagcttttgaactggaagagtgtgaaatgatagaacaggagtcgatagattgaaaaagccgtttatggaagtatttccgacgctgcagctgcgtgaggagcttaaaagtgttctggaatttgccagtattgaccggattacgatgaatcgggatcgcgattttatgcgcatttatctggagagtgacaagctgattgtgaaatcctgcatctttgagctggagcaggcaattaccggtcagctttttccggatgccaaaatgacagtcaaggtcatcgagcgttttcatctttccaggcagtatacgccgcagaacctgatgccgatctatgaggagagcattttgctggagctgaaggcgtacaatgcgttgctttacagtctgatgcatgattcaaaaaaggtattttcttcagaggataccctctgtctggaggtgccggatactgttatcgcagatggaaaggagcaggagcttttacagattctggagaaaattttctgtgagcgctgcgggctgaattttcatgtaagcacaaaacgggtcgagccgcccaagagcaagcggcggaaaaatgcggagctggagctcgagcaggaggtcgcggcgatcacgaagcattatgcgtcggtgaaagcaggcgagcagacagctcaggccgacggcacagaggcagccgaggaaaagaagccggctgctgccgcaaaaaagcaggcggacacatccggcggtgcaaagaaagaggatgcacagccgaaacgcaataccttttttgccaatgaccgttttgctccaaagaaatccgacaatccggatgtcgtctatggccgtgactttgacaccgagccgatggatatcgagcagatcaccggagagatcggcggcgtgacgatccggggacaggtgctctcctgcgacctgcgggagcttcggatcggaaagactctgatctgttttaatattacagattttaccgatacgattgcggtaaaaatgtttgtgaaaaatgaacaggtagaggagctctccggtgcgattaaggtaggggcgttttttaaactgaccggagtgacgacgatcgaccggtttgacagccagctcacgatcggaaatgtgacagggatcaaaaagatcccggatttccgggaaaaacggatggatacatcgccggaaaagcgtgtcgagctacattgtcatacgaagatgagtgatatggacggtgtctctgatgcatctgcgatcttaaaacgggcgatggagtgggggcatccggcactggcaattacggatcatggagcagtgcaggcatttaccgaggcgaatcacacagtaagccgtgattcggattttaaagttatctatggtatggaagcatatctggtcgacgatctgaaggagatcgcggtcaatacaaaagggcagacgatccatgattcatttgtcgtatttgacctggagacgaccggattttcaccggagaggaaccagatcatcgagatcggtgcagtcaaggtgatcgatggaaagatcacggataaattcagcacctttgtcaatccccaggtgccgatcccgttccggatcgaggagctgaccagtattaatgatgaaatggtcatggatgcaccggtcattgcagatattctgcctgagtttatggcattttgcgaaggatgcattatggtcgcacacaatgcatcctttgacatgagctttatcgaggagaattgccgcaggctcggtctgccgtgtgagaaaacagttgtggataccgtcgcgatggcacgtgttcttttgcagcagctgaaccggttcaagcttgatacggttgcgaaagcacttggcatttcgctggaaaatcatcaccgtgccgtggacgatgcgggctgtacggcagagatttttgaaaaatttgtacagatgctggagaagcagggcatcgagacactggaggagctgaatgcgctcgggcgttcctctgagcctcagatccggaagcttccgacgtaccatgcgatcattctggcgaaaaatgacatcgggagagtcaatttgtaccgtcttgtctcagagtcacatctgaagtattacaaccggcggccgcgtataccg

SEQ ID NO: 4005 - DNA, 2572 bp, Unknown
  16S sequences of unknown bacteria
ggctttttcttttccccatggccttatgggaatcactatctgtattgggatgttaaccctgctcattgtcatggtcatgcggatgggctatggcgacacgggcgagtacgacaaagaccggaatttcatctattccaagaaaggcacctacggcacgtccggcttcctttctgaacaggaagcggaggaggtgctggacctgacctccagcttgaaaaagcataccggcaccattctcggcacgttaaacggcaagtatgtctgtgtgccggaggacagccggctcaacaaaaatatcgccgtatacggcgccagcggctcgatgaagagcagcgaaagcaccatcagcagcgatccgctgatcaccacggccgccgcgctcatcgaaaacgcctgatcggcgcgctgttcatgtcctgcgccgcgctcgatcgcgatgatcgtcgacgctccgaccccgaacaacaagccgatgcacgaatacagcgtgtacatcggcatcacgatattcaccgcggccagaccaagcgtgcccgacccgatagaaataaaatagacatctgccagacagtacagcgaattggataccatggcgatcactgtcggcagcagatagctcagatacagccggctaaccggcgcttcgctcatgctcagccggttcattctttttcccccttcatcatccgttaaaattggtctttgcgaacttggcccgatcgttaggcttgcccacgatctgtgaaagccgcttattgctgccctgcttctgacgggaagcacgcgcggcctccagcagcctttgtcctttgctcttctgcttcatcatcattcacctccaggatctcttccaattcaagcagcgtcttgatctcatatgtcggctgaacagccatcgatgccgctttcccctgcggattcagccatacgctgtccagtccggcgcctgctgccccttgaatgtcgctgcgcagcgaatcgccgatcatgaggcagcgtgtgcgcgcaggctctcccagcgccttcagcacggtgtcaaagaaccggggatccggcttgcgcgcgccgatctcctctgacaggaagacggcgtcgacataagggcggatgccggcctcgttgatccggcggtgctgcgtcgcgcacaccccgttgctggcgaggacgacgcgcgccctgccctgcaagccgatcagcacctcacgcgcatgcggcatgagcgcgtggcccagcgagagggcatgctggtacgcttcttcgaacaccagcggatccaccgccgcccccatctgcgcaaacagccgggcaaagcgcgtccggcacagctcatcgcggctgatctccccttgctcatagcgggcccacagcacatcgttgatggcgtggaaagcctgcttttcgcgcggggaaaagggaagcgcaaagcgtgcaaaggtggcatgcagcgcttcctgctcacaggcgccgaaatcaagcagcgtgtcatctacatcaaacaacagcacatcatagcgcgtggcggcgcctcctttcagcacgcacagagaaaaacaggacatgcatcctgtttcctcatgcgtatttttccttctttgcgccggcgtaggcacattccgcatcatcctccagctcttcctcggaaaggcgcgcattcgccagcatcaggcggatgcggttttcctgattgacccgggaagcgctggggtcatagtcgatggccaccaagttcgactgcggataagcttccttgatccggcgcgccatgcccttggcaacgatatggttcggcagacagccgaaaggctgcgcagagacgatgttggacacgccttccttgatcagcgagacgatctctgccgtcaacagccatccttcgcccatcttgacgccctggtcgatgaatccatccgcattgcggatgacatcgcggaaacgatccggcgcatggaacgtgccatcctcctccacgagacggatgaacgtctcctgcatgcgcatcaggacattctgcgccagcgtcagaaacgggaaggtcaaggcgtggcggtgataatagcgatgatcgatccgggtgttttccagacagtataatccgaaatcggccacgccgctgagcaccggctcaaagccttcctcgatcaggaaatcctccaggtggtgattgcccagcggagcgtacttcatgtagatctcgccgacgatgccgacgcggatcttcttctgatgatgacgcgggatggccgcgaaccggcggatcatctcgcgatagaacgccttgctggcgctgtaatcatccttgcggaacttctcctccagctcagcgatcagctgatcgaccagccggtccgtatccccggcgtttcgctcatagggcttcacctgattcttcagccacatcatcgcatcgccatacaggaaagcatagagcagcttcttgcccagcggcaatgtcagctccacggcattttccttctccaatccggagaaattgaccgagagcaccgggatgtgctcccagccttccatcgccagcgccttgcgcagcaggggaatgtagttggaggcgcggcag

SEQ ID NO: 4006 - DNA, 8876 bp, Unknown
  16S sequences of unknown bacteria
ctcatctatgcagttcacttgatccgcggcagggggaatttgatgacgttcccgcacgcctcggcccattcgagcaaaacgttcacgccgtcccgcgtttcttcctgtgcttcccgcagttcgtccatgtcgctgcgcatctgcgccatgtccccttccagccgtttcacccggaccttcatatccgccatgtccgtcttgagcatcgccacgtccgtcttgaggcctgctacgtccgtcttgaggcctgctacgtctgatttcagctctgccacttccgttttaaggcccgctacgtcgcttttgatttcctgaatgtcgctgcgcatttcgctcagcatggaaaggatcttctcttcgttgctcattgcttcgcacctccctgcggcgcgccggccgcggtctctctttggtatggacaaaattatagggcctcttcgccgccctgtcaatgcacattctgcacagtttccgcccccaaacttctcccgtcggcgcaaaggcaggcgcggcgcggcaaaaccgcgcctcgcctgcccgatgtcacatctgcgcccggtggcccggggcgttttgcccggcgcgggcggcttcgccgctcaataaacgctgtcgccccgggaaggatggaacgcccgctgtgccgcctcggcaatcagctccacacagccgtcgatgccgaaacgggcagtgttaagcatcaggtcgtaattctccgccgccccccaggtgcggtcggtgtagcgcttgcagtgggcgccgcgctggcggtccatcttcttgatttcctcggcggccttgtccctggccacgccgtaatatgtggtcacgcggtggatgcagtcctcttccgtggaacggataaacacatgcaggcagtcctcaaagtcgcgcaggatgtagtctgcacagcgtcctacaatcacgcagtcctccttggccgcaatatcctggatcactttgcactgagccacaaacagcatgtccgccggcggcagggtgtctttggaataggaaaagccctggctggccagattggcgaaaaacccgaacgcggagcgctgctcattggccttgataaaatcaggggaaaaaccgcactctttggcggccagctcaatcagctccttatcatagaacgcatagcccagcttattggccacctcgcggccgatcaggcgtcccccgctgccataggtacggccaatggtaatgatctttttactcatatcttactccctccattgcatggatatctgcaaaatgattataccataaaccgcgcaggtatgttataattttttgcagaaaagtgcgcgcacttttggaattgcttgcgccggaggcgcattgggaaggatgcgggagcatgaaaaatcatcgagttttggtaggcatgagcggcggcgtggactccagcgtgtgcgccctgctgctgcagcggcagggctgggaagtacagggactgatgctggagctgtgctccggcggcgccggcagcgccgccgacgcccgcgctgtggcggagcatctcggcattcccttttctgtgcacgacggccgcgctgctttttccgcgcaggttatggcagattttgccgaaagctaccgcgccgggcggacgcccaacccctgcatcgtctgcaaccgccgcgtaaaatttgcccaaatgctttccgcagcggatgccctggggtgcgcccagatcgccaccggacattacgcccgggtggaattcgacggcgcgcggggccggtatcttttgaaaaaagggaaaaatctgcaaaaagaccagagttatgtgctctaccgcctgacccaggctcagctggcacgcacgcaaatgcccctgggcgagatcgacagcaaggacgcaatccgcgccctggccgcagaagcgggcctgcgcgtggcgcagaaaaaagacagccaggacatctgctttatcccggacggggattacgtcgccttcctgcgccgccagggcgttgccctgacgcccggcgacttcgtggacgaagcgggccgcgtgctgggccgccaccgcggcctgccctgctataccaccggccagcgcaaagggctgggcgtgggcggcagcgcatatccgctctatgtcctgcgcaaggacgcgaaaaccaacaccgtggttctcggccccgaggagcatctttattccggccgcactgtgatcgaacagtgcaactggatcgcctttgaggatctggcagagccggtgcgctgcaccgcaaagacccgctattcccaaacagaggccgccgccacggtctcgcctctgcccggcagccggacggaagtggtgttcgacacgccccagcgggcgctgaccgcgggccagagcgcggtgttctacgacggagacactgtgctcggcggcggatggatctgcgcacaggaggaatactgatatggcggcacaatgcttttgggtggccctgggcggcgcgctgggcgccgtgagccggtatctgtgcggcatgctcccgtttttgcagcggggcgtttttcccttgcccacgctgctcatcaacctggccggcgcgtttctcatcggcctgatcgcccaggtcgccgctcagcggggcgcacagagcagcagcgcagtcttgtttttgaaagtgggcctgtgcggcggcttcaccacgttctccaccttttctttggaaacagtgacgctgctcagcgacggcaaaagcggcctggccgcggcctacgtcgccctgagtgtggtcttgtgtctgttgggtgtggtgctggggcagtggctggggcaaaaactggcataacagcaaaaggagcgtatcaatgattaccattgaagatatcaaaaacagcagtcagatccggacttacattcaaaaggccgacgaaaccatgtgcgccctggggtatacggagcattccttcgcccatgtgacccgggtcagcgaaaccgcccggcagatcctgctgaccctgggctacagcccgcgggaagcggagctggcccagatcgccggctatattcacgacatcggcaacgtgatcaaccgagtggatcatgcccagtccggcgcggtgatggctttccgtatcctcgacaacatgggcgccgaccctgaggacatcgccaccatcatcaccgccatcggcaaccacgacgagggcaccgccttccccgttaacgccgtggcggcggccatcatcctggcggataaaaccgacgtgcgccgcacccgcgtgcgcaaccgggatttctccaccttcgacattcacgaccgcgtcaactacgccgtccacacctcccgcgtccagatcaccgacgataaaacgcgcatcgtgctggaactggatttggacacggaaatttcctctgtgatggactactttgaaattttcatggagcgcatgctcctgtgccgccgcgccgcagaaaagctggagctgcacttctctctggtcatcaacgggcaaaaagtactataagggtaacgaaaacagcgagggtccatgccctcgctgtttctgtccgtgaaccctttatccggaaaaaaacggcatttcatcacagaaaacgcccccacattcacttgcccgttttttctcccgcctccggcgcaaactattcaccacagcaatcaatccgaaaccaaccgcaccgatgtatgccatctggccggcggattgggcaacacgcccaacagcgcagaaaccgctaaggtcacagcccgattccgcacgccacatccaactgccagcaaagcaaccaaccgccaattctacacagcatggtttcatcacgatcaactcccagcttacagcaacatgcggatcatcgccccacgcagcggagatctgcaagaaatcactgctgcgccaagtggggtcaccccacagctcgtcgttgtcgtaaccggatggctgcccgcagcctgccaacgccagcgtcagcagacgcatccgcaaagcagaacggctcatacgcacagctcttttttacagttcgtctaccgagaagccggccgcaatcacacggagcccattgcgcgttttcacgcttttcaccatccggtaataccccggcgagagcgaaaatcccatgcttgcagcaggaatacacagcttcccggaacgaccttccggtatttccagcgctttccatgccgtctcagccgccggagcagactctacacaataccacttccaccgtatactccgttccagccggtatgaagtatccgtttcaattgctgcaccggtatgattttcaaacaccacataaaatgtttcaatgctgcccggatcatacccgctccaggtctgcctgccagcggatgcgccagcaactgtgctgacaatacgcatggtcagatccgattcttcggacaaaacagtttgcgccggtgtaaaactctcactctgctgcccgtagtagtataaatatcccaaaataccgcacacagagcataccggtagcgccatcgtccgaaaaatggattcataatcccgccgcatcataaaccagacgcccagcacagcgcatcccaacagcaccgccaacatgagcggacgctcaaaaaataactttttaagtcctttccaaataggcttcacatgttctcaccactactgtttaaaaagatgtagaaaatggtttggctacttgattcgttttcccgttgggcgggcaaaagcgttttacggttccccgtcttttgcttccgtttcctgttgctttttcttcatgcagcgataaatttgccgcaaaaaagcggtaatgcaacagccccaaaaagaaaggacggaaaccatcagagaaagcacgtcgcggcatccatatgcataccagacaacgcgataaacgagaaccgccacgataaaactcaaaatgatttctttcatcatgcgtatcgcatccttacctgggtttgaactttatgaagaaacgcagcaaatctctggccagcgtgaaaagcagcattccaattgccggaaatgcggttataagaaaaatattgccccaatgcgttattctgctaatcctcgagatactgccgccattctccgccgcaaagtcttccgcctcctgccatgtgtcaaatgtgacttctacgctttccaagccatctccaatagctgtcacaatatacctgtcaccgctccacgggtcaagctgcacggcgcaaaacaggatcagcatacacgccgccaaacaaatcagcggagaaatatagcggtatttcggtatctttctgcaaactgcatactgcacaacaatggcaagcaggataaaagactctatcattcaaacccctcctattctatcctttcacagccagtctttggcatagaatatagcctcctctcatcggaaaggagtttggaggctgctgttttttgtgctgtgtacatgggaatccttcctttctcttttgttcagggttataattacccttctattatatagtaacaacgaataaaatccaaattttggacaaattttttcaaacttttttcatttcagcataatatatatttttaacttttgtttttgtgcagaaagcaattgtgcgatgaccgattcgcacgcttgcttcttgcttaataaatgttttccgcaatttcaaacagctccgacatactgacgttcgtataaatatcatgctcgattccatctttaagccagagcagggtgctaatttcatcgccgcccacagaagttccgtgaccgtaatacgcagtcacgccattgaatgtaatcctttcatgctcgagatgttcattatcaatccaataggcactgccattttgtgcaatagtaacctgaacatccagtatgactttcccatctacactggcataagtataaaaaaagcttccgtccgtttcttgataagacatttcttcatcaaaaatcagcccagcagggacataatgcggcccataaccattgggcagcgcggccagcggttcgcctgtcacttcaaaccggattcctatgtcacgtcccgtccattcaataatggtattgaccactgcagcgcggacggaggcattggccatgagaacacagaacagcagcgacaccagaatcgccgcagccgtcagggttttccgaacgacgcgcagcagatgccgtttgctgcggcgcccggcgcgcagcaggtgcgccgcggcttccagaacccgccggcggaacgccgcggtatcccccagcagcgcctcgatctcctgcagcggcggcagcgcggcgatccgccgctccgtgtcctcctccagcccccattgaatcagggtgcgcagggacactgtctgttcttcatagtgcatcctcgcgcaccatcctttcgcgtaaaacagcatagccgcgctgtgcccgtttgtaaaatgcctctctggaaatgcccagcatctgcgccgcttcctcagccggcacgcccgccatgcgcagcttcagcgctgcgcggcagggtgcgtccagctcatcgatgcagcgcagcagccgcgtcatggtatcctgccggagcacaatctgctcagtgtcgtccgtggcggcgcgcgccacttctccctcgtctgctttctccggcgcgccgttccgcctgcgcagcatatcaaccgcccgggattctgtacattccatcaaatagcgccggatttcagcatcttttctgccgcggaatttttcaaaatgatctgcagcatacaggaaaatttcctgtgtcacatcctcggcgttttcccggtttttcaagatcttgcaggccttatatagaaccggcttatagtgccggtcaaaaaatgcagtaaatgcttcctgctcttccggttccaccatggccaaacacagcgcaagcatactcttcccccctacggcattttcagggtatagtatagcatatcctccgccgcatgtccttctatatagtaacaacgtaaaaatgaaaaaatttggacatcatacttgaaacttttttcaaaaaacctcatttccgtatattctcacaattctgcttttcttttttgtgcgctttgccaaaaaggtccgcctgcatcaaagatgcaggcggacctttcctatcggttttccgcgcttacttatccccgaacactttcacataatcagccttgaacttttcaatgccctgatcggtcagggggtgcttgaccatctgctcgatcaccttgaagggtaccgtggcaatgtggccgccggagagcgcgcactgggtcacatgggtagtgttgcgcacgctggcacagatgatctccgtcttgatatcgggataattgtcaaaaatggccacgatatcggcgatcagatttgcgccggattcgttgatatcatccagccggcccaggaaggggctgacgtaagtcgcgccggcgcgggccgccagcagtgcctgattggccgagaagatcagcgtacagttggtggggatgccctcggcggaaagcaccttgatggccttgagcccctcagcggtcatggggatcttcaccaccatgtgctccgggtccagcgcgtaaatggcgcggccctcttcgatcatggtctctgcgtcctcagtggtggccttcacctcaccggaaatcggcccgtccacaatcgacgcaatttccttaagcgtctcggcataatcgcggccttccttggcaatcagggacggattggttgtgacgccacagatgacgcccatgtcgttggccttgcggatttcctccacattggcagtatcaataaagaatctcattggtaaaaacccctttcttgcgatccgaatatacctttagcatacacctatcttcatcgtttgtgaaccattttttacattgccctgtataattttcccgccggccggggaaactcccggtatacagtttaattgcaaaggatggaatcgcatgaaacatttgaaaaaaacgcttttgcctctggccgccgcggcgctgctgcttgtttccctcgcggcctgcggcagcaacaacgccgacccttctaccaatgacggcagcgccgacaccccctccagcaaccaggaggacgccacaggcgatacagtagccaaagaggactgcagctcggtctatgctgagatcatcgccgtcaacggcagccatttgagcgtcagcgccggggatcaagttctggacctgaccgtaaaagacgacatcctgaccaaatggacccagggcgatcaggtgatcctctattacaccggggatttcggcgaggatatgcaggtgcgctatatcgacaagtggaccgaaaacagcgacgtgcagcgcccggaaaatcaggaaaacgccgacaaaggcaataccgacagcagtgttttggactgaatctgtgcaaaaggggcggcctgtccgatggacaggccgccttttcggcgcgccgcggcgcattatttcagcagagggaacagattggcggcgctctcatccgtcggtattgtgccgctttgggcgccgtccgggttatcggtaggaacgtgtttgaaatcatcctctgccgcaggcgttacgtttgccggcgtcaccgttacgctgcagtcatagcgctgtccgtcccaggttacgctcacttgcgctgtgccgggggccgccgccgtcaccagccctttttcatccaccgtggccaccgccgcatcatcgctttcccactgcagcgccgtggtgatgccgatcacatggagctgccgctgctgtccggcctccagcgtcacttctttctcctgcaaataagcgcttccggtaccgccagggtcgccctgacgcatcacggtttcgccttccgtttcgccggatgcggcgcggatggccgggccgccgctggtcacggcagtgaaggtctccccgccatcgacggt

SEQ ID NO: 4007 - DNA, 32759 bp, Unknown
  16S sequences of unknown bacteria
tcgagatatccggctttcgtaaattcgaagcaaggttagggttaaataaatcggaatatgatatttgaaatagactgtatgtggttttgaaggtacataagtaagacatcgaagtgattcggtgtcttttttttgttcaaaatctacgctgcggcaaatatgaggttgctatttcgataactttcgtgtatactcaaaagtataaaaaacaacagagttttttcaaactgaaatttggaacaggaaaggaaaggagaagagaatgagaaaaatccacaaaaaactgagttacctgctattgacagccctgctgctctgcctgatggtcggtacttctgcggcggcaagccttaattacgaccgcacctgcactttttatctggaaggcacaggaaagtatgcgaagggaaccggaataattggtgcttttgaggatggaagcggcacaccatcgatcgtccgcacatctttaaaaagcagtgcgccttctgttgcagccctgaaatacctgcgatcagagacgttcggaggcgaaagccgtgaatatcggatcggtctgacactgaaaaagcctggcacgacaaaagtgacatttcagtcaggaaagaaaacgtgtacctcaacagtaaaagtgctgtcctataagaatccgctgtcggtggtaaagctctcgggcgtaaagagcggaacaaatccaaatctgaccgggcttttaaagaacaaaaattatgcgacggtaaagatgagcagcacacagaaaaaagcggttctgacactgaaagcagcgccgggctggacgattacatacgtatcgtatgagaatccgaagcgaggactgcattatttcattgcggaagagacaacttcggatacctttacacttggatattttccgaccggatcaaatgcaaaacttcgcatcgtgatgagaaataatgcgaattttggaactattgactgtctgtatacaattaaataaaacagaagaaggaggaaagcaaaatgaagaagctgtggaaacgaatgacaggtctgctttttattggatgcctctttgcactgatactttctgtcactgcgggagctgagccgctgtatcctaaaacacagtattattacttaaatgaaaagggcggcgaaggacagggacaactgaccatcagcggtctgccgtttaaacagaaactgtcgaaatcatctataaaaagcagcaatccggctgtggctaaagtcagcgggctgagtcagtcgcaggtgaccacagaggaagatcagtttggaaaactgccgacttcgggaatacagtataagaatggttatacggttgaactgagttttaccaggtcaggaacgtcaaagatttcgttcaaatcaggaaataaaacatacacgtcaaccgtaagagtgctgccgtacacaaagccactttccagcctgaccatcagcggaatcaaaaacggtactaccacgaaccttgcgggaaaatttgcaaaaggacattgggtatctgtaaagcagccaaagacgcagaacaacggacagatttccataaaagcagcatccggttggaaaatcatatccgcctactatatggcagagggaagaaaccgtatgctcacaagtgagagaggcttaaattccgtcacattatttgcaggccgaatgccggctggtgagtctttccgaagccttacgatgaagtttcgtaacagtaagaatggagcggtgatcgagtgtatctgtcagattgactaagcggatatgcgagatctgctttgttacttgcttataagagaatagttgcttcgctcctgttcttgtaaagtcaaagcggatattcgcaatccgcttcgctactcggttaaaaaatggaggcagttagagaagagaaaatgagagaaaaattaaagaaaatggcaatttacctgttacttttggcatttttcattccgggaatcataggaaggcggattgatgcacaggcggccggagattccgggaatgatacgctggcagcagcaatcagaatcagtaagaccgctgcgacactgtcaccgaagcagaccgtgacgttgcgattaaacggtacgacaagaaagccggtctggaccagcagcaatacaaaggtggcgacggttggccgtacgacgggaaaggttacagcaaaaaaagccggaacgacagtcattacagcgaagctcggggcaaagacgtatcgctgcaaagttaccgttcgtgcccgctataaaatcctttacaagagcttccttggcagacatccggagtatgacagttactatgtcctgaatgtggataaaagcggagtgccggagctggttgtgttgacgggagtaggcggagtgataggaaattataatgtttatacggtggcaaacaacaagataaaacttcttggaagctatcagtcgatgggcgtttcgaccgcaaatccgagtttcatgtatgttgcgggacagaaaagtctgtatgcatcaggctgggtgaatcgtgttggcggagcctggggaaaactttttacgatctcaagaggaaagctgaaagagacacgttacgcttatgaagcacacagctggaaagatgagtactataccggtacgagctacaaaaactataaaaaagtaagtaaatctgcatttataagtttttgtaaccgctattttaaaaatcataagacatattcgctggtaaaaaatacgaaatataaccgggataagacattccggtaaaaaggaaaggacaggtgtgcgcagtatgattttgatgcatggaatgacagtagttttgatactggcagcctgtctgaccggagtggaaaccatggaaatgtcaggcgcagagcaggcagtggagaatccggcggaaaggtctggcggggtggagacagaacagatgcgaagcatcgcggagcagaatgcagaatcgtttctgaaagaattcttttcctttaacaaggatgaccgccgtgcactttttgcggatacggagagtacggatgagcagatggtggatgcggtggcggcgtattatgaagggtttcttccatatacagagcaggcctgcatcgaagagatggcgtccgcgcggcttccgctcaaatatgaccggatgtgcggtgactggatcgtttcggtaaaagcgaaagaggtctcactggaagaggacggatcggaagcctttggtgacgggacggtgtatgattacacggtactgctggaaaaagaagagtacaacacggatacgattgaattgtttgacattgacgggcagattacggtcgatgcggagggattcgtgaaacggatttatgtggacgagccggaaggactggagcggtatctgggaaaagcggcggagtgaagttgggaagaatcaggtaatatagtttttcaaaaaattcatggatagaaggatgaattgctaaaagaaacataacggcgatgacggatttcgcgaatatatcgactgtgaattgaaacaaaagacgaaatattagataaaataacagaaaagcgagtcggaaagaaatccggctcgcttttttcatgaaataaaagttttttgaccttcagcataaaaacagttccagcgcaaacaccacaatacacgctgccgacgacacaaaaaacaggctttttcccatccaggccgcggcgatggctacgacaagcgctgcccaggcggagaacgggcttccggtcgcatcgaggatggccgggaaggtcatgaccgccagtgttacgtaaggaatataatagaggaacgaacggagcgttacgtttttgatttccttccggatcaatgtgagtgggaggacacggatcagcgtggtaacgcctaccatgattgcaatataaagaaagatattattctgcattttcagaatcctccttgatcgggaataatacagcggcaaggccggaaaggatcacggtcaggatgatgacacgcataccggacgagatgccggagagcagcggcagataagaaaacaggctgctggccagcatcgagatgattacaagaactgcaatcacgcggtttttccgggcgggtggaatgatcacggcaaggaacattccatacagggcgacgctgagtgcgcgcgtgatccgcggcggcagcgcggtcccgagaatgacaccgagacaggtaccgagcgcccagccgggaacggcgatgcttgcggtgccatacgtatagaacggattcagttttccttcacgggaagacgaaactccgaaaatttcatcagtgataaaaaaaccggtccagaaacggtgaaacattggagtatcagttggcaatttctgggaaagcgcacaggacatcagcagatagcgcaggttgatgatggcctgggaaaataccatttcgagataaggtgcgccggcactgatgatgccgagtgcggcaaattctccggcagaagtgaagtttgtgagactcatgatcgtagccggaaacgcatggatgccaaaattccgggcagcaatgccaagggtgaaggcaacggcgaggtagccgagtgcgatcggaacgccgtcacggagtccttctttataatttttcacatttatacttttcataatgcccccataacaagaccgcaggaaaaaagatgacagctgcggtgtgatatccaacaacatattataggagttttagaatagaaaagcaaggctttgtttactggcgcagcagacgccacagcgtagagcggctgatgccaagtcggcttgcagcccgtgagcggtttccattttcctgctccagtacgatccggacaatatcataattaataagatcgagtgtctgattgagattcagagtctccaggccgccgctgcctgagtggggatgagcaggctgttcctgattaagaagatgctggacaaggtgggtcggaatataatagctttccgtctgcagaacaagttcacggatgattcgtttaaactgcgacagattttctctccagctgtactgtttcataagtgccatggcttccggctcaaagccaacaatctgttttccgagttcattattgatctggctgatatacagggttgcgatgcctggaatatcttcggtgcgttcgcggagcggcttcaggcgcaggacaagacaggaaagtgcgttcatgagcgtccggcagcagacactttcttccgtgacagattcaccgatggtacaggaaaaaataaggcggtttctgcgatgaatatcgccctggatcagataggaaataaagctgttggccagtgcttcatcgagctgctggatgtttttgatataaatagtggtatgcagatcattcagcggagagtttacgctttccataagataggtccattttttcggattggcctgcgtacagtcgatcgtaacgaacggacttttccggtattcactgtgttcataaataaactgtgcagctttatcttttccggtaccggtttctccggtgataaggaccggatacagtgttttcgcatactgctccataagacgggcattatttccgaccagattggcgcttccgtaatagaatgaagaattctttttctgttcacggctgtcatagagtgagatgccgagttcatcgatcgaaactggagcatcctgcagaagcagataaatgtagacatatggcgtaccgttaatattgatgtgtctggaataaagagagaagagcaaacttccgacacgatcttccagacgaaggcgtggatcatttaaaaattcattaagatgagtttctacataagtaaagaaaggttctgttgcctgactgcgttccagactggaaaaaaagagcgaaccgtcctttgtgtaaacaaacagagattcacggctctgtacgacggcagttttcaggacaagagcctgctgacgctggagagaaaaaagcctggcgatactgacgcactgctccagcgccgtttcaatgctttcacgcccggaagtgatcaggataaagttcatgccaaggtcatttgcgacagaagtgcctatcatatcacagaggatcatttcacatccgtcttttttcagtgattttacaacttcgtatggatcgattccttctccgagtgtgatgatctttatattatattgaagcagattgcagagaatccgggcacagtccgtgattgcaggatagccgacaatggcaaaactggaagtataattttctgccagcttgattgcatggagaacatcgtatacggatatctcgacagcaacaaccgggatctggatatgggaggcaatcagacgcgcggtaccacctctggaaaggacaatatcatagtcgtcaagatcacagttttgcaggatctggagtccgttttgcaggtttccaatttgaacggtcagctcaacatccggccaggattcctgcaggctgaccagtacttctttcatcccctggtagggcgcgatcgccagtattcgtgttttcatagtgttttctccttgtattaggtcaacgtgtacaaagtaacaaaatgtatcgaaacgaaaccttagctgatggcaatattatagcatatgtttcaaaataaaacaatataaagatttgaacggattgaaattaagaatacaggtgtgataatatgagcatacagaaaataaaaacagaaagcgatcgataataaaacagttaaaagagaaggaggataaaaatgaaaccagttcttggaattacaatgggagatccgtctggaaatggaccggaaatttcaattaagtgtctgatgaagccggagacctacgaaagatgcagaccggtcgtgatcggtgatgcaaaatgtattgaggcagcacttccgacagtagaaggtgcacagaacatgaaacttcatgtgattcatgatgtgcaggatgcaaaatttgaatatggcacaatggatatctatgatctggatgttgtggatctttcgaagaggctttataagaaagaccggaaaaagcttgcacagaccatgactgcagaagaacttgaggctgcgtataaagagagccagattatgtgcggcgatgcagcgttccagtatgtggtaaaggtgatcgaactggcgatgaacggggaagtggacgcgacggttacgaatgctctgaacaaagatcatatcaatatggcgggacatcattattcaggacatacagaaatctacgcagagtatacgcatacaccaaaatattccatgatgctggcacacggagaacttcgggttgttcacaccagcacacatgtttccttaaaacaggcgattgaactttgcaaaaaagagcgggtactggatgtgatccacatggcggacatgggatgccgggcacttggaattgaaaatccgagaattgcagtggcgggtctgaatccacactgcggcgaaaatggaatgttcggaagagaagagatcgagcagatccagccggcgattgatcaggcacttgcagaaggaatcaatataccggacaaagcaccgacaccggcagataccgtattcagtaaggcacttggtggctggtatgatattgtagtagttcattatcacgatcagggacatatcccgcttaaggtacttggttttgtttataataaggaactgcagaaatgggatgcagtggcagggatcaatgtgacactggggcttccgatcatccgcgcatcggtagaccatggtacgggcgaaggccatgccggtgatggaagcgcaaatgaactgagtttaatgaatgcaatggattatgcaattcgtatggcacttgcaaagcagaaacaggagtaaaaaatgagagagaagagagaaacacgtattaaaggaattataccaccaatcctgactccgttttatgaggatgaaagtgtaaattatgaggaactgcgcaatcaggtcaatcgaatgatcgaggccggagtgcatggactgtttccttttgggacaaacggcgaggcgtatgcactgagcaatgatgagaaaattgaaatcttaaaagtcgttgtggatgagacaaaaggcagggttcctgtttatgcggggacaggctgtattacgacaaaggatacgatcgagctttcgctgcgggcaaaagaagcgggagcggatattctttccattatcacgccgtattttgcagcaatctcccaaaatgaattatatgcacattataaagaggtagcagaagcagttgatcttccgattgtactctacaatattccgatgagaaccggctgtaacattgaaccggagacggtggagcggctggctgagattcccaatattgtcggggcaaaagattccagcggaaagtgggagaacctttctgcttatatcgaaatttcgaaaaatacaggactttccattctttcgggaaatgacgggctgattctgaaagcactgcaggctggcgcagtcggaggaatcgcaggctgtgcgaatgtatatccgtacaatatggtcgcaatttatgattgcttcgtgaaaggggatctggagggagcgcagcgcgcacaggatgcaatcggtgtataccgttcctgctttaaatatggaaatcccaatacaatcacaaaaattgcggcaggtcttctcggctatccggtaggaaactgcagaaaaccgttctgcacactgccggaagaaggaatgcaggcattgaaagaggtacttgagataaaccggaaaaacggtatgaaataacagaggcaggagggcaatcactaaatgagactcttaatgattgctgatgacttcacgggtgcgcttgatgccggagttcagtttgccaaaaaaggcttcaagacgaatgtgcttgtagcagacggcgtatgtatgagccagtatgaggatacggagattcttgtaattgatgcggagacaagacacagagaggcaaaggaagccggggcgattgtacagcagctggccgaagcggctgtacggtatggcgttccatacatatttaaaaagacggactctgcgcttcgaggcaacattggtgcagaactttctgcggtgctttcggcaggaaaggaaaaagtcctcacttttatcccggcttttccaaggatgaaccgtctgacggtcggaggaagacagctgatcaatggagtaccggtcaatgagagcgttttcggagcggatccatttgaaccggtgcggactgctgatatagcagaactgatttgcagtcagagtgattttccggtaaagacgatgaaaagtggagaatatttaacgcaggcgaaagaaaaaacaatcgcagtatatgactgcagctctgatgaggaaatgcgacagatcgccgaaaaactcaaggatggagacgcctttcagctgatcgcaggctgcgcagggctggcagagattattccggagattttgaactggaattgtacggaacaggaactgccaaaactgccggaacagtttcttgtaatttgtggaagtgtaaatccgattacggtaaaacagctggaatatgcagacagaaacggatttgtgaggattcagcttacaccggagcagaagcttgagaaaaattattttgaatcatcggagggaaaaagatttctggatcagattgaacaggtctgtatggaaaaaaggaaagtcatcattgatacaaatgatccgacaggcagtgagatgactgctgaatacataaaaagatacggattaaaacttgatgacgccagagtcaggattgcggattcacttggagttattgcaagaagactgatggctggagaaacaaagcgatgcatccttatgacaggaggagataccctgcttggatgtatccgaaagctgaaaaaagcacaactgaccccaatcggagaattcgaaacaggaattgtattgtcagaactgaacacaagccagggcagtacatttgtatttacaaaatcaggaggcttcggagacgaagcgcttctggtgaatatgggaaaagaaatctgcggaaacgaaacaggaggtataagaatgagttatcagataaagcttccgtcctgtgtgtatggcggtgaaggaagcatagagaaaataaaagagattattgcgcgggaaggtgccggcagaattgtcgtattttcagataagggaattgaggcgaccggtcttttgaagcttctgacttcggaacttgatcagctggaggtgcagtatcatatctttacagactgtaagccggagccgacatacctccaggtggaagaggttgtgaatcttgtacagggatatgcgtgtgatctgatcatcggaattggcggcggttctgtcatggatgcggcgaagcttgcgagcgtactgaaggatgcaccatatacgatccgtgatctgatgaatgacccgtcacttgcaaagaaaaaagtgaaaaccgtgatgattccttctacctgcggtaccggttcagaggcaacctgtaatgcgatcgtagcagttccggaagagcagtcgaaaaaaggaatcgtaaatgaagaaatgataccggattatgtcatcctggattccagaatgatcgcaaaactgccgaaaccgatcgtagcggcaaccggtgtcgatgcactggcacacgtcgtagaatgctatacttcaaagaaagcaacaccattcagcaatccgtatgcactggaaggcgcaaagctgatctttggcaatatccgcgaggcatacaacaatccggataacatggaagcaaaaaacaacatgatgctcggagcttattatggaggaattgcgattacaggaagcggtacgacagcagtacatgcgctgtcctatccgcttggcggaaaattccacattgctcatggagtatcaaatgcaatcctgtttgcacatgtaatggcattcaacaaggatggctgcgagccgcagctggcacagatctgcgatgcaatcaatccacagcttgcaaaggagagcgaatccgtacgtgcacagtatgtgatcgatcagatagcagaaattgtaagagacacaaatattccgaccgatttgaaccagtatggcgtaagcatggaggatctggatttccttgtaacggcgggaagccagcagcagcgccttctcgttaacaattgcaaggagctcagcctggaggatatcagagagatttatctgaaggtactgaaataaagagtcataaagggaagaaatcctgaaaacaggtgtcgcagaaagcagatacagaccggccagaagaaagtctggccggatggctgtcaaaaagacagccggaaaggataaaaatgaaatatgtaatgacggaagccgtgtgtgcggaaggaatggcacttttggataatggcgaacagatttatgtggcacacgatgccaatccggcaaattaccaggaggagatgaaagatgcagatgcattgattgtccgtgcagcgccggcaaaaattgtcagccgtgaggtgatggagcatgcatcgcagctgaaagtaatcggaagaaccggagtgggatatgacagcgtggatgtagctgcagctacggcgcttggcattccggtcgtaatcacaccaggtgcaaataaccgtgcggttgcagaacatacactgaccatgatgcttgcactttcaaaaaatctggtagaagcacaggtagagacggcgaagggaaactgggcagtccgcgatgcacataagcagttcgaactgtatggcaaaaaagccggaatcattggcctcggaagaattggaagagacgtggcatcgctgtgcaccggaattggaatgaaggtggcaggatatgatccattccttacaaaggaacagatcgagggtatgggatatgaatactttgcggatgcagagcagctgatggagcagtgtgatgtcatttcaatccatgtaccgctgacaccggaaactgaaaatatggtcagaaaagaacagttccagaagatgaaaaaaacagcgatcattatcaactgttcccgtggcgggatcatcaatgaagcggatctgatcgaagcgcttaacagcggagagatcgcaggagcaggtctggatgtatttgtcggagaagagttaaaaccgggtaacccgctccttacagcacaaaatctcgttttcagcccgcacagtgcagcgcagaccagagaggcggtcatcaatatggcaactatgtgcgtgaatggatgcaaagcggtttgtcagggcgagaagtggccgtatgttgcggatccgaaggtatatgagcatccaaagtggagcggaaagtaaaacggacagaagaggaggtcttagtatgaatcagctggtgcagggaattattactccgatcttgacgccgatgtatgaagatgaatcgattaatttcgatgagcttcgcaatcaggtaaatcgtctgatcgcagccggagtatctggattgttctgttttggaacaaacggagaaagctacatcatcagtgaagaagaaaaatatgcagtattaagctgtgtgatcgaagaaacagcaggaagagttccggtatatgcgggtaccggatgtcctggaacgaaagatacgatccgtatgagcttaaaagcaaaagaacttggagcagatgtgctgagtattatctgcccgtatttcgcggcagcgaatcagcaggaaatttataaccattatgcggcagttgcaaaggcggtagatcttccgatcgtcatttacaatattccgccgcgtaccggaaatgcagttgcaccatctaccgttggaaagcttgcacatgaattttccaatattgttggggtgaaagattcctctggaaattttctgaatatgcagcagtatattgaggcaacgagagatatcgagaactttagtgtcctttccggaaacgatgctttgatctttgacaatctggtaaacggcggagccggagcaatcgcaggatgttcaaatatttatccaaagacgatttgccagattgtggaaaaatacaaagaaggaaaactggatgaagcacttgcacttcagagaagtctggtgtcgctgcgtgatacattcaaatatggaaatccgaatacaatgatcaagtatgcaactcagcttttgggatatccggttggcagctgcagggcaccgtttaacagcatttccggagatggaaaagaagcactgcgcagggtgctggatgaaaacagagaaaaaggcatggagtgagattggagaaaacaagatgaaacgatatttaaaagatcgcaatgtcgtggccgggctgttctttctgatttttgatctgttttaccttggcttcggactgcagattccggtttcagacacttccagtgtcggtgcgggatttatgccgcgcgtatatggtttttgcatgctggttattgcactgattctgctgtttacttcagtaaaaaaagtgaaggcagaagacaaagccggaaaagaagtaacaaatgatttttcgatggataaaagagatgcaactcgggtggggtgttcctttgtccttatcctgctgtatgtgattttgctgaaagagcttggatttttaatttgcagtgttccgcttttatatgggctggtatatttgctgagtccggcttacgtaaaagaatctttcattcagaagcactgtatggatgaaaacggaaacaaaaaggaaggctgttttgattcaaacggaaaagtgaaattcacttccatgcttccttattatggaaagattctgttttttgcagtaatctatacggttgtgatttatgttttatttgcaaaaggacttggccttaagatgccggctggcattcttaaaggagtacttccgttttaagaaaggagagaaaagatatggcagcatcatttgcagttgggttatccagcgtgtttaccccgctttgtctcctctgcattcttggcggtgtatttattggtatcatatttggcgcggtaccgggactgagcgcaacaatggcgcttgcgctgtttcttccggtcacttattccatggattcggtcagtgcggttgtactgctgacctcactgtatatcggaggcatttcgggcggattgatttctgcgatcctgaccggtattccgggtactccgtcatcggttgccacctgttttgacggatggccgatgacacagaaaggacagggagtcaaggcacttggagttggtgtggtagcaagttttggcggaagtattttttccacgatcattcttatttttgcggcaccgacactggcagcaattgcaatccatttcggaaactatgagtattttgcaatcgcgctgttcagtctttctatgatgtgcggactttccggagagaacatctggaagggacttctttccggtctgagcggctgtatgtttgctacagttggaatggatgcaatcggagcggtaagacgttatactttcggtagcaaaatgatccagaatggatttgatacgcttccggtactgatcggtttattcgctgttgcagagatcgtttcaagagtggggacagcacgtgcggcaaaaaaagaagaaggaatcgatgtcgatatgcggaatatccgcggctttggtttttcggtgaaagaggcagtcgggcagattaaaaactttctgctctgttccggaatcggaacagcgatcggtattcttccgggtatcggaggaggagcggcaaatgttatggcgtacaccgtttctcagcagacatcgaagcatccagagaaatacggtacaggtatcattgacggtgtggtagcgacagagtcttccaacaatgcggcagtcggcggtgcactcgttccgcttctggcacttggaatccctggggataccgtaacagccatgctgcttggcggtctgacattgcatggaatttcggcaggtccgctgatgtttacggagcacacagatgttgtttattcgatctttatcacaatgctgattggttcctgcgttatgctggtgatggagttttatggcctgagagtatttgcaaagctgctttccattccaaagtattatctgcttccggcaatcttcctttgctgcgtaattggagcgtatggaacaagacacaatatgtttgacgtgtggtctgtgatcgtgtttggactgatcggctttatttttacaaaactgaaagtacctacggcaccgtttattctcggatttattatcggaccgcttgcagagaacaatctccgccgcggactgatgttcgcacagggggatttcggaaaattcttcacacgcccgatcgcatgcgtattttttgcaggtgcgctgatcagctttgtattcggaatttataaaagcgtccgtccgaaaaagaaaaaggcaatagatgtagacgattgaaaattgaagtgaaagagaacagtattgtaaaaacgtaatggagtgccacaggcatgtaaataaaaaacaaatacacaggaggtaatgaaatgaaaagaagattagcggcagccctgcttacactggcagcgattgcgacgggagcagcaggaatcggaggttcggcatttgcggaggaaacaaactggccggaagatgacatcacaattgtagttccatttaaagcaggaggagatacggatttccatgcaagaaatcttgcaagctatctgggcgaaatcctggatgtcaatgttgttgttgaaaatgtagacggtgcaaatggttccacaggtatgcttcaggtaatggattccgatccggatggatatacgtgcctgttcttccatgattccatgctgaccaataagctggtaggaacctgcgaatataattattctgatctggatgtatgtgcggcaacaatcgtagataattcctatgtactggctgtaaacagcggatccggaatgagtacactggatgatgtagtgacaaaagcaaaagaaaatccgggaaatctgctttatgcatcctctgtaggagcttattcctactatcttggacgtaaattcgaggtggagaacgatgtagatttcaatattgttgatgctggcggcggaacagaccgtaatgcggcactgcttgccaatacgatcgatacgaactgtaatccgtacggcgttatgaagagttactttgattctggagactttacggcagttgcatgtctggcagatgagagaaatcctctgttcccggatgtaccgaccgcaaaagaacagggctatgactgggtagcagagagaaactatttcctcagcttcccggcaggaaccgatgaagccattgtagcaaagatggaagaagcgatcaaagaggtatgcgcaaacgaagaattcattaaggcaacagaagacgcatactgtgtaacaccgacctttgtcggaacagaagatctgaaagcaaaactggatgctgaatttgctgatttcactgcaaatgagaacctgatcactaactaaaaaacgaaacgcggcggatgcttcaatgaaagcagctgctggcggatgatggaatggtaaaaagctgtttctgtggctgtcggaccggatggtccgacgctgcaggacagctttttttaatcgggcaggccgcgagcggattacgaatatccgttataaagtttcctgccataacaggaaaggaagtgaaggtatggggggatttctgacactgctgcagctggaactaactctgtatattttgatagcactcggagtttttctcagaaaaaaaggatttttgaacgatgaaaatgagtcatttttgagcaaactgacattgaatgtaattttgccgtgcagtattatcaaatcttttttgattgagtttaacggggagatcctgaaagaatttaccacagtgctcgtaattgcattatttgcagcaatctttcaattcgcatcaggcaagctgttcttccgtttcatttcagaagaaaaaagaaaaattctggcttatggagttatcaatccaaactgtgcttttcttggaattccgatgatcgaaggggcatttggggaggccggacttgcacaggcttctgtttatatgataccaaaccgctttttcatctggacagttgggcttggacttttcacagaaaagggggcggataggaaaaaagtactgaaaaaatgcctgatgcatccatgtatggtggcattatatatcgggatattttttatgcttactcagatacagcttccggtatttctgactgacgcgctgcggcttatgagcaactccatgacagcgttgtcaatgcttctcatcggctcgattatttcaaagatatcgccgggggatattctgaacagggagtgcctgtatttctgcctgatacggctggtggtaattccgggcgttatttttctgctttgtctggcaggacaggtatcatcatatattacgggagtgtgtgtaatgatgacagcgatgccggcagcgagcattaccgctgttcttgcaaagcaatatcatgcggatgaaaagctggcaggaatggtagtaataggctcgacgctgctgtcagcagtaacgattccggtatggttgtatctggtttctgtttttttctaacttgctctccctgcgggaagtgtttgtcctgaaaagaaaatgagaaaaatagtcagaggagagaatcgtaaatttcttgacaatttttcccatgcgttgtagtttattaaaagattagtataagctaactaacataagggaggacaaaccaatatgcgtaatcgagattgcgtaaagaagtgtctggcgatgatactttctgtcagcatggcagtacagcctggctttattgcactggcagaagagacagagcaggaaacgcttcagagtactgaagcggcaacagaagcgccgcaggcagaggggtcagagacggaaacaccggtaacagaggcagcgcagacggaagcgcaggcaactgaggcaccggaaacggaaacactggtgacagaagcgcctgagacggagacaccggtaactgaggaaccagagaccgaggcaccggaaacagaagcagtacagaccgaggcaccggagacagaaacttctcagacacaggcggaagaaacagaggaaccgtcagcacaggcggagacgcagtatacgtttaaataccagatttatacctggaatgaagcacagaaacgtaatacacatattagtatgaaaaggatgacttcagatagtgcagtggtgacaatttccatgccggatgcatccagtacaccagatgtgacagtcaatgggaagaaatatgtattcaagggctggagagtcggccgtatcggagaaaataatgagattcagacagagcttcagtttgctgccggagcagcggtgacagcagatgtcagcgagcttggcaacaaatatctgatgatttatgcagtgtacgaggagcagagcacatcttatacctatacactgaattatgacggaaatggaactggcgtaacttctgtaccgtcagcacagacagatacgaacgcagacggaagtgccgtatttaaagtaaccggcagcaagccagtaagaccgggctacatcttccagggctgggcagagagcgcagatgcagcgaaagtaaaatatgcggcaggcgatgagatccgcattgcagtaagcgaggagaaccagacaaagactttgtatgcggtatggaaatctgcaatggtaggcccgcaggaggataccgagatcaatgtatacgtagagtacatggattccagtctggaaaaaggctaccgcgtagacgagtcaagcaagaagacggtgaccgtaacgtgccagaataagactgagcatagcaagtacacgagccatcaggtaaaatacaacgatgtcgtaaaggcagcagacgtatcaggcttcgcagtaaaggaaggctgggagatcgtagggatcgcaagaaatgcgggtacaaaccagagtgtattcggattggacaacacgtttatgcagggcggcgtacagagcccgtacaacagcttctatctggtggcaaagaagaattatacttacagcttaaagtatgacggaaacggagaaaacgtaacatccgtaccggcagtacaggaagagactacggcaaacggagtagcggtatttaaagtaaccggcagcaagccggtaagaccgggctacatcttccagggctgggcagagagcgcagacgcggcggaagtaaagtatgcggcaggcgatgagatccgtgtcgcagtaagcgaggagaaccagacaaagaccttgtatgcggtatggaaatctgcaatggtaggcccgcaggaggataccgagatcaatgtatacgtagagtacatggattccagcctggaaaaaggctaccgtgtagatgaagcaagcaagaaaaccgtaacggtaacgtgccagaacaagactgagcacagcaagtacacgagccatcaggtaaaatacaacgatgtcgtaaaagcagcagacgtatcaggcttcacagtagaggaaggctgggagatcgtcggaatcgcaagaaatgcgggtacaaaccagagcgtcttcggactggacaacacgttcatgcagggaggcgtgcagagcccgtacaacagtttctatctggtagcaaagaagcagtacacctacagcctgaaatatgacgggaacggagagaatgtaacatccgtaccgtcagtacaggaagagactacggcaaacggagtagccgtatttaaagtaaccggcagcaagccagtaagaccgggctacatcttccagggctgggcagagagtgcagacgcagcggaagtaaaatatgcggcaggcgatgagatccgcattgcggtaaaggaagagaaccaaagaaaaacactgtacgcagtatggaaatctgcaatggtcggcccgcaggaagacacggagatcaatgtatacgtagagtacatggattccagcctggaaaaaggctactgcgtagacgagtcaagcaagaagacggtgaccgtaacgtgccagaataagactgagcatagcaagtacacgagccatcaggtaaaatacaacgatgtcgtaaaggcagcagacgtatcaggcttcgcagtaaaggaaggctgggagatcgtagggatcgcaagaaatgcgggtacaaaccagagtgtattcggattggacaacacgtttatgcagggcggcgtacagagcccgtacaacagcttctatctggtggcaaagaagaaagtttcttctgttactttgagtaaggaaacgcttacccttgagttcggcgcacaggagacactgaccgcagagctgcttaacgtaaaagagacaacatggacctcttctgatgattcggttgtaactgtagcagaggatggaaccatcaccgcagtcggacttggcactgcagttgtaacctgtgcagacaaggcagacgcaaacataaaagcaacgtgtgaagtaacggtagaggacagcaccgtgcttgcagcagcagtaaccatcatttccggaacaagcgtaaaagttacatggaacgaagttccgagtgccgagagttatcagatttacaggctggaagttggaaatggaagctatgaagttgcagcgacagcagaagcaggcgagacggaatggaccgatatctcacttagcgcaggcaaaaaatatcgttactatacagaggcttatgcaaccgtaaacggagagaagaaggcaatcaagaaatcagcagtgagaacctgcattaccccgaagatcaccctgtcaaagacagcaatgaatcttcagtatggcaagactgcaaccctgaaagcaacaaaggtcggcgtaaaagcggtgacctggacttcttccgatccaaagattgcaaaggtatctgcaaacggcatcatcacagcagcaggacttggcaccgttacgattacctgtacgtcgaaggcaaatgaggagatatcggcaacctgcgaggtaaccgtaagagatacaacactgcttcagatgaaggcaacagcaggcaagaccaacaatctgctttcctggaataagatcccaagtgcagatggataccgcatctatggcggtgaatgcggaagcacaatgaagctgatcaagaccgtttccgcgggtacacagtcctggaatcacagcggcctgaaggctggcaaagcataccgctactgcgtaaaggcttatcggattgtaaacggaacagagactgttaccaagacctccaacaccgttcacagcattacggcaagcagcaagtttacgaatgcaaagagcgtaaccgtaagcgagacaagcgtagcacttcaggtgggtgagtcaaagaacctgggagcaaaagtcgttgcggcagatgcaaaccgcacgctcctgactcatacagcagagcttgtatacaagtcaggcagcagcaaagtggcaactgtttcaaaggatggaaccgttactgcagttggaaaaggaacctgccgcatctatgtgacagcaggaagcggagcatccgcaactgtaacagtaactgtaaaataaaacggttcgaattaagtgcggaaaagcaaatggtaaacggccattggaatcgcggagatagtccgtaataatcaaagctgataccaaaatccccagaaagtttccaaaaagagaaacttccgggggattttttgcgcagattcggaaatactaccagaaaaagagaatggagcatgacaaatggaaaaagaatcattaaagcgctatatcatttttctggcagccctgatcgtttgtgcaggcgtggcctggtatttttcgaagaatgtggaagatccgcaggacaatgcagtactggcggggagcagaaatctgatcattgatcttggaacggctggcaaaggatggcaggaggagatggagagtgggacggaagaggcaacaaggaaagcagcggagcctgaaaatgtgagtgtacagcaggatgagcagcaaagagatatcacagaaaagtatgcagcgaaaacagggaaggaaaaatgaagatggcggacacactgtatttaaaaatagataaaaatgtgcaggtaaaaaacaagcaggttcatctgaaggatatcgcagtgctgagctgtgcatcaaagtcgattgagaataaagtaaaaacgctccggctgccgactgagatcatgaaaggaccgggacgatacgtatttgatattatcgatgtaattgagacgatcgaaaaggagttcccgtcactggaaatcaataatctcggagaagcggactttatcattactgtagagaagccggagaagctgccggaaatcctgagcttgggaaaaacggcggccgtctgtatcctttcattttttggcgcggccttttcaattatggcattcaacaatgatatcggtgtgacaacgctattttcacagctttacgaaacatttacaggaaaaaaatcaaacggattcacgatactcgaactgtcttactcaatcggtgttgggcttggaatcctgattttcttccatcattttgcaaagaaaaaaggaggaacggacccgactccgcttgaagtcgagatgcgcacgtatgaggatgagatcgatacgacgattatcgagtcagggaatcggaatgagcggcagtgctgaagcgaaggaaatgaagagaaatgaagagaaaggaaagatggaaaagcggaagggcgtaaggataacagaaaaaggaagaagtgaaagacaaaagggaaggcgaaacagaagaaggaaaagaaaaataaagcaggaggaaaaaagaacaaagaagagtaaaaagaaatagcaggaaaatagtttgcaggaagagacagaaacggagaagaaaaatgggtgagacattagcggcagtgacaggattttcatcgggtttcattgtggcaggcggcgtggtggcacttatggtcggccttggcatcatcacgcgctttatcggtatttcacatacagctgcccatatccgtgcgggtgagaatgcaattctgttcggcacagtggtcggcacaattctgactgtctatgaggtaagccttccgtttggcagctgggtgctcgcgatcgccggtgtgtttatgggaacgtttgtgggtggctggattatggcactggcagagatcgtaaatgtgtttccggtgtactgcagaaggcttgaaattacaaagggaacaagctggatcgttatctttctggcaattgggaagatgcttggaagcctgttccatttttatatgcggtgggggaaaggatgaaaaatgataagcgtaagataaaagaagacgaacaggtaaagacaatctgaaaatggcattttggaatgaaaaacattgctgcaggtgacgtagaaagatataaaaaaagatcaatgcagcgtaatagaaatgagatgcagattgcggggaaaaaggagtagagaaaaatgagaagaatagcaaataaaatcagaaaaatgtctgtgtaagaatacagtgataaagctacaaaaaaataaaaagaaagagatagccggaaaacaggtagttcctaattagaagagggtgtgataaaatgaagaagctggatgcaggccgcggaggtctgcgtcagatatctttgcccttcgcattctgacaaactgtcctgaattcgaaacagcagagaacaaacagaaagacaaaatataagaaaaggaagtcagaccatgaaatcaagtgaagaactccggcgccagctacgccagatcgatcataagggatataaggcatacaagattctggaaggagaatatgagtttggcgcgtatcggctgtgcattgaccatgtgcagggagatccgtttgcaacgccgtccagggtacggattgtatacaaaaatcagaaaaacataccggatgagctgtttagagaaaaacatcgaaagacagcgatagaagatacactgcttcggagactgcaccgaagtatcggcagtgttgtaaaggggcagcggcgcggctccggaaagagtggaatggtcacaacatgccgcgctggacaggaaattctggagcggagcgcgatgcacattacatcgactgtagccgaagcaagaatagaggttggcttccctgcctttggaagaacgatcgcggcgggagagctggaaacacttttatttgatgtgctgccagaagtggcagagagtaccttccgggcaaaaccacagctgctggaggaattaaagaaggcagcgtatctggcggatgatcagcgttttatccggcaggagttaccgcggcttggactggcggcattcgtggcagacggggccatccttccaagagagagtggaatttcacagaaaaaaatgaagggagcggttccgtttgagagtccggaaagtcttgcagtgacgctgcagcttccgcatggcgggatgctgcggggaatgggcatccgccgcgggatcaccgtgatcgcgggcggaggcttccatggaaagtctacgctgctcaaagcgctggaacgtggtgtctacaaccatattgcgggggacggaagagaatatgtgattaccgatgagacagcattcaagctccgcgctgaggaaggacgcagtatacacgaagaaaatatatcgatgtttatcaatcatctgccgacaaaagcggatacggcagattttacgacggagaatgcgagtggcagtacctctcaggcagcaaatacggtggaagcactggctgcaggcagtacagtacttctgatcgacgaggatacctcggccacgaattttatggtgagagacggccggatggcacagctggtatcggatgaaaaggaaccgatcacaccgtttatccggaaaattcgaagcctgtatcaggatcttggagtatcgacgattctggtagcgggaagttccggcgattatttatccgtggcggatacggttctgcagatggactgctaccgggtttgtgatgtgactgaaaaagcacacgcgcttgcacaggaactcaaagaagaaaaggcagacgctgccagatggctgcgcaaaccagtcaggaaaaaggagattgaaaagatccgcgttcacggctgggattccttaagtatcgataaatctgagatcgatctgcgctatctggagcaggtggtagatgagagtcagaccgcagctcttggctatatcattcagtacatattgaccagaactgcggatggaagaaagacgccggatgcgctggcagaagaaatagcgaaaaaactggatgcggaaggaatcctgagtatcactcccaaaaactacagcgccggcccgtcggcgatggtgcgaaagcaggagatcctagcatgtctgtgcagatatcggctgttgtaaaaaacagttgatttttcgcgaaaacaatgttatggtgtaaatgctcatatgactgacggaagtggggaaccacagggagtatgggtcttgaggaagccgaccgtctgggcacagaaactgtggacagagtgcgtcggcatttttgcgttaccagttctgtacaccagcaacatgcagagctgggcgcaggcaaatttatttgccggagaccagaactgcatgttgggatgggcggaacgcccatcaatccacagacatgagctgtgaaacagcggatagtccgcgaagcggacgggtctgtggattggtgtacagaacgtccggaaagaagcagcaacatgcagagctgggcgcaggcaaatttatttgccggagaccagaactgcatgttgggatgggcggaacgcaggaaaattttaccccaccagaaaaggagacggaacaatggaaatgatttctttggaaaaggaactgaaagagaacagctacccgggaagaggaattgtcatcggcagatctgcagatggaacgaaagcagttgcagcgtattttattatgggaagaagtgagaacagccgcaaccgcatctttgtggaggacggagagggaatccgtacacaggcatttgatccgtccaaactgactgatccgagcctgattatttacgcaccggttcgagtactcggcaataagacgatcgtgacaaacggtgaccagacggatacgatttatgagggcatggatcgtcagcttacgtttgagcagtcattgcgcagtcgcgagtttgaaccggacggaccgaattacacaccacgtatttcaggaattatgcatattgaaaatggacgatacaattatgcaatgtcgattttaaagagcaacaatgggaatccggaagcctgcaaccgctatacgtttgcatatgagaactgtgtggcaggagagggacattttatccatacctacaagtgcgatggaaatccgctgccgagctttgagggagagccgaagctggtggcaatccctgatgatatcgatgcattcgcagacctgctgtggagcagcctgaatgagaataataaggtgtctctgttcgtacggtatattaatatcgcggacggaacgtatacatcgagaatcattaataaaaataaataaagagataagataaacgggataagtaagaagtcagcgggtacagcaggatatttattttctggaaagcatcgtagataaaaaatgaaatactgaataatttatcggtatgtgattctcgataaaaaaggaatatctgttttggtgtgatgaatgatagtatctgtctggctttatcaggaatgaaacagaaaacacaaaatgatttcgaaaggaagatcgatatgaacgaattacagttaaaatatggatgcaacccgaatcagaaaccgtcccgcatttttatggaggatggttccgatctgccaatccaggtgctgagcggccgtccgggctatatcaattttctggatgccttcaacggctggcagctggtaaaggagctgaaagaggcgacaggtcttccggcggcgacttctttcaaacatgtttccccggcaggagcggcagttggacttccgctcgatgagacacttgcgaagatctactgggtggacgatcagggtgaactttcaccgctggcgagtgcctacgcgagagcaagaggtgcagaccgtatgtcttccttcggtgattttattgcactctctgatgtctgcgaccgcgatacggcgatgctgattaaacgtgaggtatcggatggtgtgatcgctcctggctacaccgaggaagcgcttgagatcctgaagcagaaaaagaaaggaaactacaatgtcattcagatcgatgcgaattatcatccggcaccgattgagcataagcaggtatttggtgtgacatttgagcagggacgtcaggagctgccgatcaacgatgagctgctttcaaactttgtgacagaaaaaaaagacgttccggcagatgcactgcgtgatatgaagattgcgctgatcattctgaagtatacccagtccaattcagtctgctacgtaaaagacggacaggcaatcggaattggagcaggacagcagtcccgtgtacattgtacaagactggcaggtcagaaggcagataactggttcctgcgccagaatccaaaggtgcttgcccttccgttccgcgatacgatcacgagagcagagcgtgataatgcgattgatgtttacattggaaacgagtacatggatgtacttgcagacggcgcatgggagcgggtatttaccgagaaaccggcggtatttacagagaaagagaagcgtgcatggctggatcagctgcagggtgtgacgctcggatcggatgcgtttttcccattcagcgacaatattgagcgggcacacaagtccggtgtagcctacatcgcacagccgggcggatccgtccgtgatgcagatgtgattgcgacgtgcaacaagtacggcatggcgatggcatttactgggattcggttgttccatcattgatgaggaatcaggttctccactgcttattgctccgcgcaatcctgcagtggtccttaaaacgaaatgtagaagaaacaaaactggctggagtactttgaaacagtactgccagccagttttttatgggatagatacctgttttttcccaagatgaagccagaacgcagaggggcattttaccgcatcaggtatgcggaacaaatgcaaatgctgttttcgggcagatctatttccgttcgtcctgttttttcagtgctgcctccacgaaaccacgaaacagcggatgcggtcggtttggacgggatttcagttccggatgagcctgtgtggcaatgaagaacggatgatccttcagctcaatcatctcgacgatgcggccgtccggggaaaggccggagagtgtcagtccattgtcggtcaggatacggcggaagtcattgttgacctcatagcgatgtctgtggcgctcgtgaatttcctcagccccatacaattcataggctttcgtcgatttatccagaatacacggataagagccgagacgcagggtgccgccgatatcctctatgccattctgatccggcagaagtgcgataacagggtaaggagtctgcggattgagttcgatgctgtgtgcttcctccagtccggctacatggcgtgcatattcgacaattgcgagctgcataccaaggcagagtccaagaaacggaatgttatgtgttcttgcatatcgaatagcttcgatttttccgtcaataccgcgatccccaaagcctccgggtacaaggataccgtctgcgcctgcaaggtattcatctgcattttcttctgttacatcttctgaattgatccagtgaatattgacagtagcatggcttgcgattccgccatgcttcagtgcctcaacaacactgatataggcatcatgcaaggagatatattttccgacaagtgcgatattgacctcacgggtcggtgtacgcagggcttccaccatagctttccagtcattaagatccggttccggacacggaagattcagacatttgcaggctacctcggccagatgttcacgttccattgcaagcggcgcttcataaagatattccacatcgagattctgaagaacattactgcttggaacattgcagaaaagggcaattttatctttgattgctttatcaagaggatgctcggagcggcatacaataatgtccggccagattcccataccctgaagctcttttacactggcctgggtcggttttgttttcatttctccggatgccttgagataaggaatcagggtgacgtgaattaaaatggcgttttcatggccgatatcgtgctgaaactggcggattgcctcaagaaacggctggctttcgatgtcgccgacagtaccgcctacctcgatgatggcgatctgtgtttcgttggatgtgtttgtatagtcgcgatagaagcggctcttgatttcgtttgtgatgtgagggataacctgtacggtgccgccgccgtagtcgccgcggcgttctttttgaagaacggaccagtaaatctttccggtggtaacgttggaatttttggtgagactttcatcaatgaaacgctcataatggccaaggtcaaggtcggtttctgcgccgtcatcggtgacgaatacctcgccgtgctggatcggattcatggttccagggtcgatgttgatgtacgggtcaaatttctgcatggttaccttatagccgcgtgctttgagcagacggcccagcgatgctgcggtgataccctttccaagtccggaaacgacaccgcctgttacgaaaacgtattttactggcatggctttcctcctgtattgttgtgtgtgatgtgcgtgattgtgatagggaaagcggggatttcagatccgcttttttaaaaaactgttatattatacaaccatcggaaaagaaaatccattctttttttcaaaaaaataaaaccgcctgaatccatgatactgaatgattcggacagtttgttatgtgtgagtctgtttttctatagcaattcaataaaataatgcaggcaagacgatttggcagagtgcgaaagacaaagatttctgacgcagtatttcgcgctctgacagatcggaggggatgcattattttgcagaattgctatatattgcggcgtgaagcacattttttatcagaacagagtgttcctgtttctggcagtttctcatatttgttccagaaatgcccggatataatacagccctgcaccgatcgacgtgatctgatcatcgtgtgaaccggaaagaatccgtactttttcatcggagataccgcagttttctgccgcaagacaggagagcgtctcatagtcctccgggcagaaataagcatttaaaaatccgccgagcagaaaatcaacatcgagaatatttcggatgtttgagatgacacgggcaagatggtggagaaaggtatcccaaacctgtatttcatgcatttctccggaacgcagcttggcaaagaacagttcaagactttcacctgcttcttctttgagcgcgttggcagagcagtatgattccacgcagccgcatttgccgcagtagcatggtttgccgcctggaattagacacatatgctccagggtaccactgattaaggagtttccttcgaagaccgtaccgtttaaaatcacagcgccgccaatattgcggttcaaagagacatacacagcgttggtgatctctttctggaaccagatctgtgcagaggccgcaacttttgaatcatgcagaaaaatacatgggtaattcaggtgttcctgaaaacggtcgagtgaaagaccggtgtgtccaagtacctttccgaaggtaacagtctgaccgtcaggggagatcagtccctgaattgcgataccgatgccgagaataacagaagggtcgtacggaagagcggcaataaattcatttaaagcacgacaaacttcaagaaagtagtatggatcattgctgtagggcaggttgatgatatgatgtgccagcactgtgccatagagatcaatcacactgactgagacgaattcacggagaatttccataccaactgcgatacgggcagtggcacggcataaaaggcattgtgctttgcggccgccggtggattccagaaagtctcctttttcaatgagaccggattcttcaagatcaacaagattctgagaaacggtcggaaaactgagatggagggcggtcgcaatatccggccgggaagtctggcgctgttcataaatatattgaaagacctttgttcgattgattttttttacttcgtgcgcggttaaatttgactgagccatgatacctccctgcaagtagcaaagcagatcgaggatatctgctttgactaaaataaaataagtttaagaataaatttatcataacaaggcacaggtagattgtcaatcagaaggggaagaaggtatgcgacaaatataacaaaaatcaggggatgagattgggaataatgcgtattgtacagcttctgaaattgtggtaaactactttttaaataaacttacataaagttaataaataaagggtctttgaaatggaggaatcaggtatgaaaggaacgtattttctgggagcacagaagactccgaaatttgaagtgcgcgatatggaattcgctccgcttggagaacacgaggtgctggtgaagaacatggcctgtggtatttgcggaacagatgttcatatttatcatggagaggccggttcagcagatgtgacaccgccggttgtacttggacatgagttttccggaattgtaatagaaacaggagaggcagttacaacagtcagcgtcggagatcatgtggcaatggatccgaatttgtactgtggaaaatgtcttccgtgccgtatgggaaaaaagcagaattgtgagcatctttcagcactcggcgtaacgcgcgacggaggttttgcggagtatgccgtatgcccggaatcacagtgttttgtagtaaataaagagattgattttgatgtggcagcgatggcagaaccgcttgcctgtgtggtacatggaattgatcaggctgcgatacggccaggtcaggcagtattagtgatcggaggcggaacgattggacttctaatggttcagatggcaaaaatttcaggagcatcaacggtaatgttaagtgagccggttgagatgcgcaggaaaatcggtctggaagtcggagcagatgctgttatcgatccgttaaatgaggatgtcaggggaaagatcagagaaatctgcggcagagacggagcagatgtggttattgaatgcgtcggaaagccatttgcagtggaacaggcattttatgctgcaggatttggagcaacgttgcttctgttcagtgtgccggcaacggatgcaacggtagcactcccactgtttgatgtatataaaaaggaattgcggattcttgggtcaatgatcaatccggatacacatcagcgggcagtgaatctgattaatggacactgcctggagatcaaaaagctgatcacacatgcttatgatctggagcatcttgacgaggcgattcatatgcagatgagcagtgaatcaatcaaggttatggtgcatccgtggggataaaaacatttgagcatgatatgcgtatgtcatggtagcttactgaaaaaaagtgaggatattatgacatatggcagggctgaggaaaggagcagatagatatatgaagaaagaaatgctgcagcaggtaatgactgcaccgaaaaaaattgagtttcgaagcgttccggtaccggaaatcggagaggatcaggtgctggttaaaattatgaaaatcggaattt

SEQ ID NO: 4008 - DNA, 32759 bp, Unknown
  16S sequences of unknown bacteria
cggcaaagccgtttcgggcgccggcaaccgcgagcttaagtcgctttcgggacttctgcgcggcaagcagggaagattcagacaaaaccttctcggaaagcgcgtggactactccggacgaagcgttatcgtcgtgggacccgaacttaagatgtatcagtgcggacttcccaaggaaatggcgcttgaacttttcaagcctttcgtaatgcacgagcttgttgcgcaaagcaaatcccacaacatcaaaagcgcaaagcgtttcgtggagcgcggcagcaaggaagtgtggggcgtgctggaaagcgtcattaaagagcaccccgtgcttttgaaccgtgcgcctacgcttcaccgtctgggtattcaggcattcgaacccgtgcttgtcgaaggcagggcgattaagcttcacccgcttgcgtgcggagcgttcaacgccgacttcgacggcgaccagatggcagtgcacgttcctctttccatagaggcgcagacggaggcgcgtttcctcatgcttgcgacaaacaacgtccttaagctttcggacggcaagcctgtatgttcgcccacgcaggacatggttataggctgtttctaccttaccatggataaacccggcgcgaaaggcgagggcatgattttctgcgacagtgacgaggctaaaatggcttacgccaacaaggaaatcgagcttcagtccaaaatcaaggtgcgtatgcagggtacgtttaacggtcagccgaaaagcgcaatcgtggataccaccgtgggcagaatcatcttcaacgaggccgttccccaggatttgggcatagttgaccgctcgttggaaagcgaatgccttaaactcgaggtcgagtaccgcgtgggcaaaagccagctgcaaaagattgtcgaccttacgttcaaaaaatacggcgcgaccgaaacctgcaaagtgcttgataacatcaaggctttgggctttaagtattctactatcggcgcgattacgaccagcgtcttcgatatgcacattcccgctgagaaagaagctatcctcgacgaggcggaaaagaaagtcattaattttgaaaaagagtacgaagacggcatccttaccgaggacgagaagtaccgtcacgtagtggaaacctggacgaaagccaacgacgacgttaccgaagcgcttaagaaaaccctggacgaattcaaccccatcaacatgatggcggtctcgggcgcccgcggaagcatgaagcagatagctcagctttcgggtatgcgcggacttatgaccaacccgcaaggcaaaacgctggaaactcccgtccgttcctcgttccgtgaaggactttcgccgcttgaatacttcatttcttcgcacggcggcagaaaaggtcttgccgataccgcgcttaagacggcaaactcgggttatcttacccgccgtcttgtggacgtaagtcaggacgtcatcgtgcgcgaagacgattgctgcgagggaagttcctctcccgccggcattaaaatcgagcgtattttcgacggcgactccgttgtggaaagtcttaaggacagattaagcggaagatttgccgcaaaagatatcgtcaatcccgtcacgggcgaagtttacgtgcgcgtcaacgaaatgattagcgaagaagtcgctaaacgcattgacgaggacgaccttaagcttaatgccgaaggcaaggaaatacccgtgtttatccgttccgtgcttacctgtaagaccaaacacggcgtgtgcacaaagtgctacggcaaggatatgtcgggcagcactcccgtaaaagtgggcgaagcggtaggcattatcgccgctcagtccatcggcgaacccggtactcagcttaccatgcgtaccttccactcgggcggtgtcgcggcggcggaagatattacgagaggtcttccccgtgtagaagagttgttcgaggcaagaaagcctaagggcgtcgctaccattacgaccgaggagggcaaagttacccttatcgagaaagacggaagaagagacgtcgtcatcaccaacgccgaaggcaaggaattcagttactccattcctttcagcgcaaagcttaaagccaacatcaagacgggcgctaccgtaaaagcgggcgacccgcttaccgaaggtcctatcgacccgcacgatattctgcgcatcaagggctataaggaagttcaggaatatatcgttaaggaagttcaggcggtttacagatctcagggcgttgaaattgccgacaagcacatcgaagtaatcgttcaccagatgcttaaaaaagtgcgcgtggaggacagcggcgacaccgatcttcttcccggcgaaatggtggattccaacgcgttctcggaggctaacctcaaggcgattcagtcgggcggcagacccgcggcggcaaagcatacgcttttgggtattacgaaagccgcgcttgcgaccgacagcttcctgtctgcggcttccttccaggagaccgctcgcgtgctgaccgaggcggcaatcaaaaacaagatagatccccttatcggccttaaggaaaacgtcatcatcggtaagcttattcccgcaggtacgggtatgaagaggtacaataacgaatatccttacgaggttgctccctcttccgacgacgatgacaacgaaagcgtaaacgcgtaatattaattagttaaaaaaagtgccttctcttaataaagagcgggcgctttttgttttggcgtaaccgtaaattaaagtcacgaaacgagttttgatttttttgtccgaatgtgcgtttttgccgattaataattgttttataaagccgtttgacgtatttttttaacgacttgtttttaacggcagtcaaggcggcggacaaagagcgggtgtatttgttaaaggcattagaccgcgattgatatgtttattcaccgtttattattgcaattgcagcaaaaataagatatactgtacgaaagcatggacagcaaaaacgaggacaggataaaccagcttatgaaaggcgaagaccgcctcctcgagttaaaagaaaagcaaaacggccaaggctgtggattttatactttatgaaaggataaagcgggagatttatcgaaacaaaaagtagttttttaacgtaaaaaagcaaatactttaaacgatatggctttttacagtgataaaaaactaaaaagcgttgcggtaaattctttcgccagcaaagaaaatcacaaagcggtatatgttctgcatttattctttctggtttctttggcgggctggataggggaaagcgtttttttcgttataataggcgcgcccgcggacagaggttttctgaccatgcctttttgtcccgtgtacgggtttaccgtatgcgggatttacctttttatcgggacgccgagtgacgggatatggtggaaattatacggaaaacttaaaagaaacggaaatctgtccgatttaggttcggcgatgtgcgttattgtactttattacatagcggtcacgttttgcgtgactttttcggaatttatcggagggttgtttttcgataaagcgttaaaggtaagactttggaattattcgggattcgcctataacgtcatgggatacgtttgccctcagttttcttttttgttcggcgcggcggcaagtctgtttgccgtaattgcggataaagtgatcttgtttttaaaaagagtgtcggattacgaaactctgattgccgttgacgttgtgcttagtgcgcttatggccgcggattttgtttttaacgtaattgccgttattataatcggcgaacatctgatgctttacggcactcatgtttgaaagtcctgaaaaaaagccgtattgacaaatcgggatttccgtgttaatataataatataaaacaggcgcgaaatttgtcttttcaaaattatgtttgcgtcttgaggggggcttgtatggacaaaaaagttatcgttaccataagccgcgagtacggcagcggcggcagaatcatcggcagcaaagtggcggaaaaactgggggttcctttttacgaccgcaaaattatcgagctcagcgcggaaaaaagcgggcttgccgtgagttttgtggaaaacaccgaacaaaagataaaaaacaaatttttgcacaatctcgctttcggcggttattgcatgggtgcggacctgggcgccgcgcagctgtcgcttccggacaggctgtttatagcgacctgcgaaattatacgcaatcttgccgaggaaggctcctgcgtaattgtgggaaggtgcgccgattacgttttgaaaaagcgtgacgacgtaatcaatattttcgtatattcggaccttgagcacaaaacgcagcgcgcgattgccgagtacggtatcgagcccgacaaagccgccgccgaagtccagaaaacggacaaataccgcgccaatcattataattattatacggagcagacttggggagacaaaaacaactatcatctttgccttaacagcggatttctgggcgtggacaataccgtggatataattgtggacgcggttaaggattatatgaaaaacaggcagaattaaaaaaggcttaagccgattgctttatgtcgtaaagctaactgaaacttccattataagcttttccgaaacgggttaattttttttcgggaaagctttttttatcggtaaaaactgtttttttgctttaaaaaatccgttatttccttttggtaaaacggataaaggctgatatggggcagcttatcgtgcgcttgacaaatgtggataacttttatataatgatttcgtgcagaaagcgctggacataattgaaaaacatatcggaaaaacagacaaaacgggcgttgccgtaagcggcggcgccgattcggtatgccttttgcacgttttactgtcttttggtgccgtagacaaaaacaacattgtggtgcttaacgtggagcacggcatccgcggcgaaaacagcaggcgggactcggaattcgtaaagaagttatgcgctgactacggcgtgcgatttaaaggcataagcgtaaacgttcccgagcgttgcaaaaaatccggaagaagcgaggaaagcgaagcgcgtgaggcgagaaaggagtttttcaacggtttactggagtcccgtgaagtagactgtattcttaccgcgcacaatctgggtgacaggacggagggtgtgctgatgcacgttttccgcggctgcggaattcaggggcttatcggcatgacggagcgcgacggcaattacatccgaccgcttataaactgctcgcgcggggaaatagaggattacgtcgaaaaaaacaacttaaagttcgtcaccgacgaaaccaattccgaaacgcgttatacccgtaatttcttaaggctcgaggttctgcccaaaatccgcgaaaggtatccgcttgacgccgccgtgaatacgctgagcgagcttgccgcaaatgacgaggcgtttatttcctcttgcctcgatttcgggaaatacatcgaaaaccgcggtgaagaagtgaggctggaccttgaagttttaagttttcccacggcgctttcgtcgaggtatgttttcgagtgcatgaggcggataagcaccgttaccgacctcgattacaagcacgttaccgccgttttgggactgaaagataaggagaacggcaaaagagtttcgcttatcggcggaataatagccgcaaaagagtacgattgtattgttttttttgacggctcggattcggttgatttaataagcgacgaggaaattccgtttacggcgggttttacgcctttcggcgacggaatagcggaaatttctttctcgaagccctttccgcaaaaagggaagcttatcgtggacggagataaagtgccctcaggcgcggtcattcgctttcggcgcgagggcgacgttttccgcccgtacggctcgggcagaaaaaaactgaaagaatatcttatagaccgtaaaattccccgtcgaatccgcgacaatctgccgcttttgtgttataatgaaaacgtgcttgcgatattcggcgtggaaatttcggacgacgtaaagcttacggacaaaacggtcaacgcgctggagcttaaatttacgcggtagggttttgttttttgccggggatgcgtgttttttttcggtaagtcgcggatatcaactgcgcattccgatttgtttaggattttattaattgcgtattgacgcgaaatcaaaaacgcagttatttttacggaggattttgtacataatgcaggaacttaagaagaatttgcttttcagcgaacaagatatcagagtgagggtcaaagaacttgctgcggaaatttccgcttgttacaaagacgacaagcccgtggtgtgcgtatgcgtgcttcgcggcgcggttatgtttttcaccgaccttatgaaagaaataaagtccgacgctgtggtttatgatttcgtgacgctttcaagctacgaaaacgcgatggtggaaggcaccatgagtacgacgggaaaaatcaagcttattcaggacctgagggaaaacgtggagggtaagcacgttctcgtggtggaggacattgtggactcggggtttactgtcgattatttaagacgttattttgcctccaaaaacgcgctggacgttaaaattgcctgccttctcgacaaacccatgtcgagaaaagtggacgcgcatgccgactacgtcgcctttactttggaaaggcctgcttttattatcggttacggactggattacgatcagaagtaccgcaatcttgacggaatttacgaggtggtaagcgattgacgttatcgacggaaaaccttgtgcttccgtttgaacgggtggacgaccttctcgtcaacggacttaagattatccagaatccgttggctttttgcttcggatgcgacgctgtggagcttgccaatttcgtaacgggcggggttaaggacaaagcttacgacttaggaagcggcacggggataataactcttctgctgggcgggaaaaagggcatacgctgtacgggtgtggaaattcagtccgacatggcggaaatgtcccgaagaagcattgcgctcaacgggcttaataatgtttgcgacattataaacgcgcccatgcaggagataggtaagttcgccgcagcggggtcggctaccatagtagtcagcaatccgccttacatgaaaagcaaaagcggttttgatatatcggagcgcgcgcttgcgcttgccaggcatgaagttgccgttacttttcccgaagttgccgattgcgcggcgtatcttttaagcacgggcggagctttttatctcgtacatcgcgcggaaagacttagcgaggtaatgaaaatctgttcggacgtaaggcttgagcccaagattctgcagcttttgacgccgtctgtcaaaaagcctccgcacctgtttttgctgaagtgtcttaaagacgccagacccggtcttaaagttttaagagaaaggattgtggacacccgggtttaaaaatttttaagtatggaaaacgcggtttgttaaaaaaggagtgacaatgctttatattgtggcaacgcccataggaaatctcggtgaaattactttccgcgcggtggaaacgcttaaagaagcggacgccgtgctttgcgaggatacgcgccgaaccgcggttttgctgaataagtacggtataagcaagccgcttgtttcttatcagaagttttccgaaaaggaaaaagccggttacattgttgaaagactggaaaaaggcgaaaaccttgcgcttgtgaccgacgccggtatgccgcttatttccgacccgggcaaagttctggtggacgagcttattgcgcgtgggctggaatacaccgtgataagcggaccgtgcgcgcttataaacgccgcggtgctcagcgggatggacgtttcttccttttgtatgtgcggcttcctgcccgaaaaaaattcggaacgcaaaaagtttatcggaagatttgccgcacttacaagcactttgattttttattctccgccgcataacgtaagaaaggaccttgagtttttgttccatgcgctgggggcacgccgcgccgccgtcgtgcgcgaaataagcaaaatccacgaagaggttgtaagaggtacgctgggcgactttcccgagtttaccgaaaaaggagaattcgttattgtgacggaaggcgcgccggaaaaagaaagcgagcttaattcgcttccgattgccgctcacgttgaaaactacgttaatgaagggctttcgaaaatggacgcggttaaaaaagccgccgccgacaggaaaatgcccaagtcggcagtgtacgccgagtacgaaaaatatcttaaagaagacaaacaataaacgtttttacggagtgaattatgaacgcagcaaaagaaatctggcaggaaatgctgcctacgctggaaacggaggttaacgccatcagtttcgacgtatggattaaaccgcttgaaccgcttgacatcgacgatgacaggctgattctgcttgccccgaccgagggtaaccgcgatgccgtcaacagcagtttaagaccgcttataaaaaaagttctttcctccgtcaatccgttgcttacggacattactcttttgcttcccgcggacgtaagccgcatgaaaggcgcggatttttcgcccgaagagcttaaagaggacggcggggaggaagaggctcctgttcccaaagtggacgcaatgcttatcaatccgcgttatactttcgacaatttcgtcgtgggcgagtgtaaccgtttcgcagttgccgcggcgcgcgccgttgcggaaaacccgggagtgaagtacaatccgctgttcatttacggtggcgcgggactcggtaaaacgcacataatgcacgcgataggcaattacataaggaaaaataaccgtcatctcaaggtactgtacgtttcttccgaaaagttcgtcaacgagcttattgcgtccattcgttcaaagagcggcaacactttcgatttccgcgacaaataccgcagtgcggacgtattgatgatagacgacatacagttcatctccaaaaaggaaagcactcaggtggagatgtttcataccttcaacgacctttatcagatgaacaagcagataatttttgcttccgaccgtccgcccaaggaaatacccgaccttgaagagcgtttgcgcacgcgtttcgagtgggggcttattgccgacgttcagccgcccgaccttgaaaccagaatagccattttgcagaaaaagtcgcagatggaaaaatacaacgttccgcccgaggtgctcaactttatggcgcagcgcatcgacagcaacattcgcgagatggaaagtcttctgaacaaggttattctgcttgcaaagctttacgacaagcccgtcagcgtggagcttgccgccgaggctttcaaagactataaaaagcccgcggaagaagcggtggacgccgaggatataatagaggctacgcttaaactttatcccaacgtcaccaaagaggagcttttgggcaaaaaacgcgataaggaaatagtggagccgcgcatgatttgcatttacctgattgccgagcttttgcctttgccgcttacaagcatcggcgccattatgggcggacgcgaccacaccactataatgcactccaagaacaaggtcgcaacgcttatttccaaggacgaacggataaaaaacaaagtggaagacatcagaaacatggtttataaaaactgaggaattttaatccgcgccgattcttttattaaagaaaacagtttttgttttacgcgtaattatacttgggtgcgcggtaataaacgcttcggtagttcggtttatgcggcttaaatccgtaatgcagtacatttaagccgtttacggtttaaatttgtgcgattaagaaaaagaattattgttcttaaatgccgttaaatcggtttcgctatcaaaaaaatcggcataaaggaaaaaatacaacggttaaagcgatatcgtttaaagttatgcttaaaaaacgtttgacaaagccgcttgaaagtattataatagcctatgcaagtaattttgaggagatactacgatgaaaaaagatatacatcccgattatcatgaggttacggctgtttgcgcgtgcggggctacgtttgtgaccggcaccacaaagaagggcgacgtccttaaacttgacgtttgctccaaatgccatcccttctataccggcaagcaaaagcaggttgagacgggcggacgtatcgataaattcaaccgtcgtttcggcagataaaaggtttcaatttcaaaaacggataaccatgccttttgctttcagcattaagtgtatggtttttcttttttacggactttatttttttttcgaggttgttttgaaggaaaacaaacaaaaacttaaccgtactttcatcggcggacaggcgcttatggaaggcgtcatgatgcagggcgcgacttccatggcgatgaccgtaaggacggaaagcggcgacattcttaccgagacaaagcggcttagtcctaaaaaatggtataacaaggttcccgttttaaggggatgcgttgcttttgtcaagtcgcttgtgggcggcacttcggcacttatgaaaagtgcggaagtcatttatcccgaggaggagacgccgggaaaggcttcctttgcgattgccgcggttctgggcgtcgtttttgctgttgcgctgttcattctgcttccttcttttattgcgtccatggtcgacaaataccttatatcgctttcggtgcttgctttcgcgcttatcgaaggacttttaaggatattgattttcgttttatatcttctcatagtgtcgcgcatgaaggacataaggcgtacttttatgtaccacggggcggagcaccgcacgattaactgtttcgagcacggactcgagctgacggtggaaaacgtgcagaagtgttctactcggcacaaccgttgcgggactactttcctgtttttcgtcatggttgtgtccattctcgtgttttcgctggctacctggattttatctcttttaggttggaccgatctcggagttcttgctaaaatgggcataaggctgctgttgttgcctttcgtagcaggtctgtcttacgaacttttgcgctttctggcaatattgcccgataacttttttgtaaacatattccgcgcgcccggactggcgcttcagcggcttacgacttacccgcccgaggacgaaatggcggaaatagccattatatcctttaatctggtgcgggaaatggacgcggacccgacaataaaacctcataagttcggcgagtttaccatgccgcaactcaaaaaattcgtgtccgataagcttgccgccgcaggtataaccgaacaagccgaaaccgactggcttattgccgccgcgctcggattaaaacggggtgagctttcttcggtggaaaaaaccgattacaagcaataccgtaaggtttccgactacgcggcaaagcgcgtaaagggtgtgcctctggattatatcacgggctacggcgaattttacggatttaaagtaaaagtcaacgaaaacgtgcttataccgcggcttgacaccgaaattcttgccgatgaggttattaaataccttaaccgaaccggaaaagactgcgaggtacttgaccttatgacgggcagcggctgcattgctttggcgattgcgaaaaaaacttccgcgcgcgttacggcatcggacgtttcggctgaggcgattaaagtcgccgagcaaaatcttgcggggacgggtgcgcaagtcgtcatgtccgacggcttcaagtctttacctgacaagactttcgacctgattgtttccaatccgccttatatacgccgcggcgaaatagattctcttgctcccgacgttacctgccagccgcgcatcgctcttgacgggggagaggacggactggatttttaccgtcttatcgcccttgaggcgcccgtaagacttaccgagggcggcatgctgtttctggaaatcggtttcgaccagcgggaggaagttacggcgcttttagataaagattttaccgacatcgaatgtataaaagattacggcggcaacgacagggtaatcgtcgcgcgcaaaaaacattgatttatctttaaacccaaaaccgcagagtaaacgcgcggcaaaaactcatgcaactaaacgcgcaacaaaaccttaaatattaaataatttaaaacgagtaaaataacgcgcacggcggattatattccgcaaaataaaaattaaacatcgggtgcaaaatgaacactgaaaaacttgacggtatattaagtaaatacgaggagcttgcctcgcttatatcaaagccggaaataattgccgacaacaaggaatggactaaactcgtcaaagaacattcttcgcttgagcctgtcgtggacgcatatcgccgccttcttaaaatcgacaaggaacttgccggtcttaaggaaatgatttcttcggaagaggataaggagcttaaagagcttgctttggaagaagaggctgctaaacgcgaagaaagggaaaagacggaaaacgagcttaagattcttttactgcccgtcgaccccaacgacgagaaaaacgccattatcgaaatacgcgcgggtgccggcggagacgaggcggcattgttcgccgcggagctgatgcgtatgtataaaatgtacgccgagaaaaaacattggcgagttgaggacgtggacatcaacgaaacggagctcggaggcgtcaaggaggcggttttttcgctgacgggcgacagcatattttcgcgtcttaagttcgaaagcggtgtgcacagggttcagcgcgtgcccgataccgaatctcagggcaggatacacacttctaccgttaccgttgccgtgcttcccgaggtggaggacgtagtggtggaaataaacgaaaaggacctaaaaatcgacacttaccgttctggcggggcgggcggccagcacgtcaacaagaccgaatccgcgataagaataacgcatcttccgacgggtatcgtcgtgcagtgccaggacgaacgttcgcagattaaaaaccgcgaaaaagccatgcgcgtgcttaagtcgaagctttacgacaaaatgcaggaggacgccgacaaggaatattcggcggcaagacgctcgcaggtggggacgggcgaccgctccgaacgcataagaacatataattttcctcagggaagagttaccgaccacagaataaatcttacgctttattcgcttgaaaattttatgaacggcgatatcgacgagatgcttgacgcactcagaattgccgaccagaccgcgaagctcgaggccgaaatagactgacgggacagccgttactgaagacaaaaaattaccgacgggacagccgttttttaaagcagaagtctttactaaacggcttctttaacggaaaatttgtcttcgcggtttaatcggaattctgaagatatatcgcgtgtttattcggttaatttctgtgcgggttagaaaaagtttaccgacgctgaaaaatgtttgagtgcaaaataagtattttaatgtattttgcgtttgccacgaaaaaatctcgcaaaaaagcataaaaaaatcaaaacaaaaggctttcaaaaatgaccaggaaaaatttttacttacaagtgcttatacttgccgttcccattgcgcttcagaatcttctgacggcgcttttgaacatattcgaccagatgatggtgggatggctgccgggcggaatagcggacagcggattgtcggctgtacttttggcaaatcagatagtttttatctttcagatagttatattcgccatttgcaataccgtgaatatttttatcgcgcagtataccgaaaacggcaacgaacatctcattaaaaaccgcgcaggttttacttttatcataatagctttcgtgtcaatcgtttttatgctgctgtgctatcttgcgccttcctttgtcatagggctttttaaccccagtgaaaattaccgcaaaatggcggaagattttttaaggctggttgcgctttcctttattcccatgggtataagcgtgggaatagttttcatgttgcgcgccgttaaacgccttaaagccgcgcttgcggtcaacgtgtgcgccgtcgcgcttaactttttactgaactacacttttatgttcggtcttatgggcgtaaaacccatgggacttcttggcgcggcttacggcacgatattttcccgtcttgccgaatgtattgcaatgattgcggtattgcttatccttaaaaacccgcttgtgggacggataaaagaaatgtttgctttcgacggcaaattcatatcgcagtactttaaaatgttttttcccatactgtgcaacgagattttctgggtgctttccaccaccgtttaccttttcgtctatgataaactcgaaaacagcgcggtggtgctcgcttcggtaaacattgctcagtcgctggataaaatagtgtccgttgtgatgataggcgtgggcagtgccataggcgtggttttgggcaatataatcggaaggggcaacaagaaagaagttgacctttatgcgcgcgaatcgcttaagttcggctttattaccgggcttgcggttgcgctgctcacgttcggtgcggcgtttgtcgcgcccgcggtattcaaaaacgtcagtgccgcaacccatgccaccgcgcgaaacctcatcatgctttacgcgcttacggcgacgctgcgcacgctttcgtttaccgcagtcataggcattttaagaagcggcggcgacactactttctgcatgataagcgaaacggtcatagtctgggtgttttccgtgccgcttgtaatggtttgcgggcttgtatttaacgccaatgtttacgtggtgtatcttatgtccaacgtgtgcgaggtgcttaaactgattgtgttttaccgtcgtataagaagcgacaagtggcttaaattcggtttgacgcataacgacgctatgcccaagacggaaaccgccgtatcgggcgaggatgatattgtcaacgatttagttgcggatttatgcgtcgaaaacggcggcgaagaagaaaaccgctcttaaaatattttttgctttatctgtaagcttgtttttttagttgcgattaagttcaaaattgcggttcactatcaatcgtttcatgcaaatcacttcaatccgtaaaaacagttttgcagcatagaagtaaaaagaaagagcgttaaatttatccgaggagacgtcccgacatgaacggatttttacccatgacaagagaagaaatggaggctcgcggctgggagcaggctgattttgtttatgttctgggcgacgcctacgtggaccatccgtcgttcggtcccgcgataatttcccgcgttctcgagaaaaacgggtacaaagtctgcattgtatcgcagcccgactggaaaaacggcaaagacatcatgcggttcggccgtccgcggctgggatttctggtgtgtcccggcaacatggattccatggtcaaccattataccgtggcgaaaaaacgccgcgacttcgacgcttatactccaggcggagcagtgggtaaaaggcccgattacgcctgtaccgtttactgcaattatattcgcagtcactttaaagacgcggttatcatagcgggagggatagaaccgagtttaagaagacttgcgcattacgattattggtcggattctttgcggcggtcggagcttgttacctcgcaggccgacattatttcttacggcatgggcgaaaggtcgattgtcgagattgccgacgcccttaacgcggggcttaaaccctgcgacatcacttttgtgaggggtactgcatttaaaagccgcgacaggaaagttctgggcgagtttatagagcttccgtccttcgaggaacttaaaaaagacaaaaaaagatatgccgaaagctttcgcgtgcagtatgaaaataccgacgcgattaccgccaaaacgctggtggaaagttacggcgacttctttgttgcggtaaatccgcctgcttatccgctttcgcaaaaggaaatggacgaagtttactcccttccgtatatgcgagcgtggcacccgctttacgacaaagatggcggcatacccgcgtttaaggaaatcaaattttcgctttgttcttcgcgcggctgcttcggcggatgttcgttttgcgcgctcacttttcaccagggaagaaggattcaggcgcgctcgcacgagagtattgtcagggaggcggaattacttgtttccgaccccgatttcaaaggatatattcacgatgtgggcggacctaccgccaatttccgcgctccgtcgtgcaaaaaacagcttaagtcgggggtgtgtaccaaaagacaatgtctttttcccgaaaaatgtcccaatctcgaggtttcgcacgaggattacgtggcgttgcttaaaaaattgcgcgcggtaaagggagtaaaaaaagtttttataagaagcggtataagattcgactatcttatggcggataaggacgacacgtttttccgcgagttggtcgcgcatcacgtcagcggtcagcttaaagtcgcacccgaacacgtttccgaccgtgtgcttaatcttatgggcaagccgaaaaacgcagtctataaggctttttccaaaaagttttattttgttacgcgcgcgcttaaaaaagagcagtatcttgtgccttacctcatgagttctcaccccgggtcagggcttaaagaagcggtagagcttgccgaatatctccgcgacaacaatttaacgcccgagcaggtacaggatttttatcctactccgtccaccgtatcgacgtgtatgtattatacgggaatcgatccgcgtgacggcaaaagcgtttacgtaccgcgttccccgcacgaaaaggcaatgcagcgcgcgcttatacagtataaaaatcccaagaattacgatttggtgcgcgaggctctcgttaaggcgggaaggacggaccttataggaaacggcggcaaatgccttatccgtccgcctaaaagagtaaacgcaaaccgcgcgaataaggttgagccgcgagcaaaatcggactacggcaaaaagaaaaagtaacgttttgatatttaataaggttttttttaggctgaataaattgcgtccgcgtaaaaacgggcgttttttattgcaaaaaaagaaagagattttcaatgcttatccgattgtcttttcttcgccgccgtgatataatggttaagacgtttaaagcgcggtcggttcttttgcgtcggcttaagcgatatacttaattataaaaaaaatgcggctgtcgttttcgggctcggattggtttacgggctcagactaaaacagggaaacaaccgtcgctatattaaaaaaggataaaacgggagagacgcttatgaggaaaacagggttcgacaacgataaatatctcgagatgcagtcaagtcacatacgcgagcgcattgcgcgtttcggcggaaaattgtatcttgagttcggcggaaaactgtttgacgactatcatgcctcgcgcgtgcttcccggatttcagcccgacagtaagcttaaaatgctgcttacgcttaaggaccaggcggaaatcgtcattgtcatcagcgccgaggctttggaaaaaaacaaggtgcgcggcgacttgggaattacgtacgaccttgacgtactaaggcttatcgacgctttcagaagcgtggatttatacgtgggcagcgtggtgcttacccattaccgtcagcagcttcaggcaactcagttcgagaccaagcttaacaatctgggcatcaaggtttaccgccattacccgatagagggctatccttacgacgtggcgcatatcgtcagcgcggacggatacggctgcaacgattacatcgaaacttcgcgttcgcttatagtggttacggctccggggccgggaagcggcaaaatggcgacttgcttaagtcagctttatcacgaccacgagcgcggaatcaaagccggctatgccaaattcgaaacttttcccatctggaatctgccgcttaagcaccccgtaaacatcgcttacgaggcggcaacggcggatcttaacgacgtcaacatgattgacccgtttcacctcgaggcttacggggaaaccaccgtcaactacaatcgcgacgtggaaattttccccgtacttaacaatattttcgaaaaaatttacggtcagtccccctataagtcgcctaccgacatgggcgtaaacatggcgggaaactgtattaccgacgacgaagcggtgcgcgacgccgctaaccgcgagataatacgccgccacttacaggcgcttgtcgattaccgtcaggacaaagtgggagaggaggtcgtttccaagaccaaacttctcatgaagcagtcgggccttgacatttccatgcggcccgttgtcaacgcgtcgatttccaaagcggaggagacgggtgcgcccgccgccgcgctggagcttgaggacggcaccatcgtcacgggaaaaacttcctcactgctgggcgcaagctccgcgatgctgcttaacgcgcttaaagtacttgcggggatacaggacaacgtgtttttgctgtcgcccgcggtaatcgagcccattcagaaactaaagaccaaacacctcggcaacaataaccccagacttcacacggacgaaattctgattgcgctgtctatctgcgcggtcaccagccccaccgcaatgcttgcaatggaacagcttcctaaattgcgcggctgcgaaatgcattccacggttatactttctcaggtggacgtcaacgtcattaaaaaattgggaattaatcttacctgcgagcctaagtatcagaccaaaaagctttatcataagtaatgccgcgtttttctcgcggataaaaacgctttacagtttaagggtgcggtagtataataaacgacatgaaatacgggttcatcaaaatcggagcaagacccgcaggcgcaggctttctcaatcagacgcgaataatcgttttaagttttcttgtggtcattcttgtgggggctgctcttttgatgttgcctttttcctccgtgaacgggatagatttcatcgacgcgctgtttaccgccacttccgccacttgcgtgacggggttaagtaccgtagatcttgcgagtacgcttactactttcggtcatgtcgtggttcttctgcttattcagataggcggactgggcttcatgacgctggcttcggctacattcgtcatgctggggcgccgtttcagtcttagagaaagactgaatatgcgcgattatctttccgaagacaacatgagcgtgctgggtcggcttgccctcaacgtggtaaaactttcgtttttaatcgaaggggtgggcgcggtgctcctgaccgttgctttctgctccgatttttctttcggccgcgcactttggtacggcgttttccacagcgtttcggctttttgtaacgccggactcgatatcgtgccttacaaagagagtttcgagccttatatttccgatccgttcgtgctggtggtgctggctcttcttataattatcggcggacttggctttatcgtggtgggcgatatcgtaagcgtaaaaaggttcaagaaactgcgcatggacagcaagatagtgcttatcgtcagcggcgctctcctgttgttcggtactctcgtttatatgatttgcgaatacaataacgaagctactatcggcggacttaatttcggcgacaaacttgcaaacgcgttcttcctttcggcgtctacgcgtaccgcgggttttgcatccttcccgctaggcgaactttctcccgtgtccagaagcgttaccattatgctgatgtttatcggcgcgtcaccgggctcaaccggcggcggcataaaaaccacgactttgttcgtccttttggtgtgggttgccgctcacgtccgtcaaaaacgttccacggtaatcggaatgagaaaggtgggcaacaacgtccgctccaaggcggcgacgattttcgtgctggcaattgtcacgcttaccgtgacgcaaacgcttttgcttgccttcgacggcgggaaattcacttacgagcagcttttgttcgaggcggtaagcgcgtatgcgacggtgggactttcgatgggtatcacgggctttttaagcttgggcagtaagattataatcatccttgtcatgttcatgggcagggtgggcgcgtataccttgcttatggcggcgataaaaaggaaaaagactcaggaaagaattcaatatcaggaattcaatataatgatgtgacgatttcgtcttgtgacgaaggaggtttattgaaatggttaaatttccccgaaaaaaacttgatcagtttgccgttatcgggttgggaaggttcggcagcgagcttacccgtgcgcttgttgcgggtggcaaagaagtacttgcgatagacgacaacgaagagcgcgttcaggaagtggccgcgtttgccacgcacgccattaccgcggacgccacggacgaaaacgtgcttaaagccgtggaaataagctctttcgacgcggttatagttgctatcggcgatattcaggcgtccattctgacaacgcttacctgcaaagaaatgggcgtgccttacatcatagccaaagcctacaacgacaagcacaaaaaagtgctggaaaaaatcggcgccgattacgtcatggtgcctgaagcggatatggcgtataaaaccgcaaatagactcatcaaccaaaaactcaacgaccttatggaagtcaacgacaagtacagcatcatggaaatcgccgtacccgtcgcgtggtcgggcaaaagtcttatcgagcttgacgtaagaaagcatttcaaggtcaacgtcattctggtgcttgcgggcggagaagaagttattacttcccccggtggcgatacggtcctgtcgtccatcgaccacatcatcgtgggcggaaacaacgaggatatcgcaaagttcagcaaatatctcaataagcttaagtagtttagttaaataaaaatacaacccgtcttaaaggcgggttttgttttttttattctgttttttccgtaaactcttaaaccggcggcgattcaatacttacgggctgtaattattgccgtattccgttcgtgcggaaggaaaaagcattttatgtttataaagccagcttttttaagtgccgacaattcgtgcttgagcgtcagcggagtatcgaaatgcacataagccaggggaggaatactgtactttctgcgccttttcgaacattcgtcaaaggctgcattttctatttcctgagataaagcaatgtaatcgcagtctataaaaattccgccgctgacaagagagcgaaagattttttcaaacaatttccgtttttttgccgccgtaaaatggtgcagggtttcaaaggccaccgccgcgtcgaaaacgttttctccagcgtcgaaatcgaaatagtcgcattttttcaaagttaagtttttgtcggcgtgtttgtttttcagcttagccagcatactttcggacaagtctacgcccgtgacgtcaagaagagggaaacgcgtgaaaatcgcgtcaagttccagcccgcttccgcatcccaggtcgaaaagattacgggtttgcgtcggcaaaacgtttgcgacatattcgtagtgacggcgccaatgcgacatatgttcttcgtaaaactcaatgcgggcgtcgaaaaagccgtccatattttcaagcggttcgtcttttgtgtccgcaaaaaattttttaagttttctgtattcttcctttttactcatacttaaattgtacatttaagcttccgattagtcaatattatgcgttacgcttttctgtttttttacccaaggttacttttaagcggagtcaggcatatattgtaagtggagtttcgggcaaaaggcaatttcttccgatttgtatttcttttgtccaagcgcttgaaaaattgattgaaatgaggtacaatatatgagcatggcactcctcagcgcgtacacgagtttcggcatcggaggagaggcggacatcgccgtcatacacgatttagaggatgccgcggcggtgcttaaggacgattgcataattctgggacgcggcacaaacgttcttgcatccgataagggctcgggtaaaaaagtggtcgtaaacagactgggtacgcttactttcgacggagagcacgtttatgcgggcagcggcgttacgcttgtcactctttgcgccgcctgtgccgagcgtggacttggcaacatggaatgggcttgcggaattccaggctctgtgggcggggcggtgcttatgaatgcaggcgcttacggcggctgcattgccgattcgcttgtatatgcggacgtattgagaaacggtaaaatcgtgcgcttaagccgcgaggattgccgttttgcttacaggcaaagctctgtcggcggcggcgattttgtacttggcgccatgttcaggctttcgttttcatctcaggcggaaattctgtcgcggatgcgcgcgcttcagtataagcgcaaccaaagccagcccaaaggacgcagtgcgggctcggtttaccttaaaggcgaaaaacccgcaggctggtatatcgagcaatcgggactaaaaggcgcaagagagggcggcgccgtcgtgtccgaaaaacatgcaaattttatattgaacacgggcggagcgacggcaaaagacgtgcttacgcttatggaaaggatagaagctgaagtttataaaaacttcggagtaaggcttaaaagagaaatcagacttatcggagatttttgatgtcattctggggcgactaccatactcatacaatatattcgcacggcaagggcactattgaggaaaacgtggtccgcgctttgaagtcgggattaaaggaaatcgcgattaccgatcacggctttcgtcacatgacttataacgtgcgccggatggactggaaaaccatgcggcaggaaacggagtttttaaagaccaaatatccttccattaatatttatctgggactggaaaccaatttaagctcccgcagaggcaaagccgacattctgccgtcggacatgcccatgctggaccttgtgatatgcggctatcataaattcgtgcttccggacaagctgtcggatttcggtatgttttttctgcctaactttattttcggcaatacggaaaaaagctcggcaaagcttattaagcgcaatacggacgcttatataaaattgctggaaaagtacagcgtggacatagtttcgcacattaattacgggataaaagcggacgccgtggaagtggcgcgcgcctgccgccatttcggcacttatgtggaactcaacggcaaaaggatttccatgaccgataaagaacttgagctgatagccgccgagggtacggagtttatttgcgattcggacgctcattccgtggaaagagtgggcgacttttccgtcccgattgcggcgatagaacgggtgggaattccttactcgcaaattgccaattgggaaagacttccgcggtttcggagtcgcaaggaaaaggggctttataaggattaattcgttttatcggggcggaaaaagcgggcaaagcggcagttaaatacagatttaagacaaaaaagagtggataaaaggcgggacatgaacagttattcgttatcggcaaaaaaggaaatagcaaggccgtctttcagtacggactgctgtaagcgcgcttttttgtccgctctcgtgcatacgggcggctctatcgtcatatcgcgcggggaaatgaagctggtgcttcccgcattaagccgtgaacttaaaaataaaacaaacgagctttgtcttgaacttttcgacggcgtggccgtttcgttcgacggggcggaaacggtgataagcggaaacggtttaagcgcagctttgtttgctttggggatattcgtgcgcaacgggcaaggcgagcgggtcgtaaaccgcggtatttccgctttcattgtaaggtcggattgctgcgcggttaattatatccgcggcgcgtttctgggcgcgggcagcgtttctttgaatacgggatatcatctcgagttcgcggtaaccagcgaggagttcgcggaaagtctgcttgctcttctgacaaggttcgatatacctgcaaaaatcaccgtgcgcaaggataaattcgtcgtttacatcaaggaaagcgagggcgtaagcgattgtctggcgcttatgggcgcgtccgaggcggtgctggagcttaattccaaattggtgcttcgtcagctcagccgcgaaaccaaccgccgcacaaattgcgaaatcgccaacatatccaaaaccgtaaacgccgcggtaaggcagtgcgaggatataaggcttatcggcaaaaaagcgggactggattctttgccggacaagcttctggtagttgcaaaagcacggctcgacaatcccgacgacagcttttccgcacttgcggcaaaaacgggattaagcaaaagcactcttaaaaacagacttaacaagattgaggaaatcgcaagggagctttccgacaaggagaaagaaaacaactaatggaaaaattcgttcatcttcacgttcataccgaatacagcctgcttgacggagctacgcgcatttcccgtattttcagccgctgcgacgagcttggtatgcccgcggtcgcaattaccgaccacggcaatatgtacggtgcgctggagtttgtaaaagctgcaatccgtcacacggacaaggacgcggacccgttcagatttatcgcggaaagacgggagtttaaggtcaaacccataataggctgcgaaatatacatgaccgacgatatggacgtaaagactaccgttaacggcaaaatgcccaagtacaatcacctggtgctgcttgccaaaaacatgacgggctataaaaaccttataaaactggtcagcatcgcttacgtcgacgggctttattacaaaccgcgcacggattttaaacaccttaaagaacacgccgagggacttgtttgtctttctgcctgtcttgcgggcgaactgccccaggcaatcctcaggggggacatggacgccgccgacgagattatcgaaagatacaaggcgcttttcggcgaagattattatatagaaattcaggaccataacattcgcgaccaaaagaccgtgcttccgcatcttgtgcgtcttgcgcgccgtcataacgtcaaaatcgtggcgacaaacgacgtgcattacctcaataaaaaggacgcggcggcgcaaaaggttttgcagtgcatttctttccgcaccactctttcggagaatgagatagatgaaaccgactcgggactggccgagggcggcgtggacgacaacggctatttccccacgaaggagttttaccttaaaagcggcgacgaaatgaaagcgcttttccccaacctcgaggacagcattacaaacaccttggaaattgcggataaatgcgagccttactttttttccaaggagccgcttatgcccgcatacgttccaagcgacggaagcactccttacgaatttctgcgtaaacttacgtttgacggattaaaccgaaagtacggcgagattacggataaaatccgcgagcgcgccgaatacgagctgggtatagtcaagcgcatggggtttgtggattactttctgatagtttgggacttcatcaactggtcggaaactcacggcgtacccgtgggacctggaaggggcagcggtgtgggaagcattgttgcctatgccataggcattaccaaagtcgagccgctaagatacgaccttattttcgagcgttttcttaaccccgagcgcgtttccaatcccgacttcgacatcgacttttgcgtggacggacgcgagcggacaatagagtacgtcgtcggaaagtacggcgtaaacaacgtgtcgcagattatcactttcggtacgcttgccgccaaagccgcggtcaaggacgtgggcagggttttcaatcagccttttgccgaagtggacaagattaccaagcttatgcccaagatgatggggcacaatcatatcggacatcttctgggatttgaaaagcccaaaaaaccggacgaccccaatccttttattcccgagcttaaagaaatgtacgacaacgaccccatggtcaagcgcatactcgacatggcgatggaggtggagggtatgccccgtcagacgggaatgcacgcggcgggagtcattatctgccgcgacccgattgccgaccatattcctatggcaagatcgggcgagggaatagtcaccacccagttcaacatgatagagtgcgaagagcttggtcttcttaaaatggactttctggggctcaggacggtcacggatataaacaaggctataaaatacgtcaaacagactcgcggcatcgacatagatttttacggcggaatcggttacgacgacgagggcacattccgtctgataggagagggcgacactcacgcggttttccagcttgagtcggagggaatgaaaaagttcatgcgcgaccttcgccccaactccttggaggaaatcatagcaggaatttcgctttaccgccccggacccatggataaaatccccgtgtatatcgccaataagcgcaaccccgcgggtataaaatacgaccatcctcttctggaacccactcttaaagtcacgttcggcataatggtgtatcaggaacaggtcatgcgtatcgttcaggacgtggctggttattcgcttggaagggccgacgaagtgcgccgcatgatgagcaagaagaaaaaagacaaaatggaaaaggagcgcgaaattttccttaacggtctgcacaacgaccgcgtggacattaaaggcgcggttgccaacggcgtttcaaaagagattgcaaacaagatttacgacgatatgtccaccttcgcttcttacgctttcaacaagtcgcacgccgcggcttatgcgtatctggcgtatcagacggcttacctgaaatgctattacactgtggagttcgtaaccgcagtgcttaacaaccgaataacgtccatcgaggaaatttcgaattaccttaactatcttaaagagcgcggctttaaggtgctgccgcccaacattaaccgctcctacgccgagttttccgtcgaggacggaggcgtgcgtatcggaatggcggcgattaaaaacgtgggtatttccgtcatcgaaaacatcgtggcggagcgcgaaaaaggcggagatttcaaagatttcgtggagttcgtaaaacgaatgcaggactccatgcttaacaaaaaacagcttgaaagtcttatttatgcgggtactttcgattgcttcgggcttaatcgcagtcagcttatcgccgtgtacgagcagattctggacagagtggcgcgtgaccgccagcagtcggcaaaaggacagatttctttcttcgacaacatagcaagcgattttgacaagttcgattatcctgcccttgaagagtacgagctttccgaaaaacttgccaaggaaaaggaggtcgccggcgtttatcttacggggcacccgcttgagcagtataaggaacatcttaaaaagtattctttcaacacgtctatgctcagcgcggtcagcgaggacgatgagggcgacggggaaaactacgttgttcccgacgatactaccgttacaatcggcggacagcttaccgaagccgctaaaaaaaccagtaaaaagacgggtaaagaattcggcataggcaagcttgaagacctttacggcacggtagagcttatgctgggcggctacaagctgtcgcgttacaaaaacgtattcgtcaaggacaagctggttaccgttacgggtaaagtcaggcacagggaagacaccgtttcagtttccgtggactcgatagagtcctgggacggcgtgaaaaaaggcagcaacaagaagatttgtttttacctctcgtttaccgagtcggatgaaagcgtggtcgatatgctgcagaacattcttaaggcttatcccggcgaagacgaaacatatatcaaaaacaccgacgacaataaaatttatcctttgggcataaacacttcggttaatccgcttatgtacaacgagctttgcgggcttatcggggagaaaaacataaaggtcggttaattgtcgggctaaaactgaccgcaacaattaaaaacaggaaaaatgacgttaaaatcgcttttcttatgacatttaaaatgatataataataaaaagtcgcagctttctcggaggtatgacattatgaaaaaaatcgcaatactcacaagcggaggggacgcgcccggcatgaacgccgccatccgcgcggttgtcagatacggcatttacgccggtatggaagtcgtgggcgtcgaacgcggttattcggggcttttggacggtaacttcgtcgaaatgggattaagaagcgtttcggacatcattcatcgcggcggtaccattttacgcaccgcgcgttgtcccgaattcaaaactcccgaaggtcaggcgttgggtattaaacgtcttaaagaaaaagggatagagggtcttatcgtggtcggcggcgacggctcattcatgggcgcgaaagttctgtccgaaaaagggttccccacgataggtataccgggcaccatagacaacgaccttgcttatacggattacactttgggcttcgataccgcatgtaacactattctggacgcgattaataaaatccgcgataccatgtcctcgcacgagcgcatttccattgtggaagtcatgggcaggaattgcggcgaccttgcgctttacgcaggcatcggcggcggggcggaggttataatcgtccccgaattgaagctcagtcttgacgacatagtcgctaaactcaaagaattccgtgcaagcggcaaacgcagcggcatagtaatccttgccgagggcgcaggtcatgcggacgaacttatgaaggaacttaccgacaaaaccgacctgcacattcgttccacggttttgggacatattcagcgcggcggctcgcccagcaaccaggacagatacctcggtacctgcttcggcgcgcatgccgtcaaacttctggaaaagggcatcggcaatcgcattgtaggtatccgcgaaaacaaaatctatgacatcgatatcgtggaaggtctgaatattaagagaaaattcaataccgaactttacgagcttgcttccgttgtcgccagataagttgttaagagggcataaatatcattatgccctttttcgtatatgcattgctttaattaaacaaagtaaaaggaggaaataagcaaaatatggcattcgacgtcaacagtcccgttcttttcgtgcttgttgctgttgtcatagctttcgtgcttgcgcaatcagtgttttttctggtgcgcgccgtaaaaagagccaaggcaatgggcatggattcgggtattataaagcgaacgattaaaaaggcggcggtgttttcggtagctcccgcaatttccattttcataggcgtcattacgctttctttcagtctgggtattccgcttccttggctgagactcagcgtaataggttctcttacatatgaaacgactgccgcggacgccgcgcttaaagccgtgggttcgtctttgggacagaccgtttcggccgaacagttcgtcaccgtgtccaccgtaatgatgctgggtattatcatgggactgattctggtacctcttctgtgcaaaaaaatcgaccgaggtcttgtcaagtttcaggctaaggataaaaaatggggcgaaattttcattacttcgctgtttatgggcatgataagcgcgtttctcggctttattttctgcgatattacggacggaatcacaggctggattcccgttttcgtcatgcttatttcggcggctataatgtgcgtatgcggattcgtcatcaaaaagcttaactggaagtggctcagcgattacgctttgcctatatgtatggtggcaagtatgctgcttgccattcccattacctcgtggataggttaaaggaggggcttgactatgaaaaaagcaaaacgtaacatgacttatcttgacagcgtgcatttctacgggcgtatatggggctgggcggcggccgcgcttattttcgcgttcccgttcgtcaccgcgcttatttttcaggcttggccgaatatgagcggcgtgcttaaaggtacgcttgctgtggcgcccattttctggacggtgggagtcatcgaggtttttacttacgtacccatgctgggcgcgggaagctcttacctcggatttgtcacgggcaatttgtctaaccttaaagtgccttgcgctctggcgtgcatggagggcgcggaggtaaaacccggcacagaggagggcgaaataatttccactatttccactgccgtttcatcgatagtcacaacggggattattataataggcgtatgtcttatcattcctcttacgcctgtgctgcaaagcgagttccttcagcccgcgttcgcaaatattctgcctgcgctgttcggcgctttgggcgtggtctatatctccaaaaattggaaaatagcagtcgtccccgcagttttaatgcttgttttgtttatttccgtgcctgcgcttaacgcgggaacggtgggcattatggtgcctgtcggcgcaatcgttgcaatagccgcatcccgctttatgtataaaaaaggctggcttggcgaagtttctaaagtgcctgccgtgacgggcgacgacgaccccgaaacggttatcgagaccgccgaagaaacgggaaaagaaaacagtctttccgatacggcaaacaaggaagaaagctccggcgacgcagttgactcttcagccgcctatgatgcggccacggaagaaacgggaaaatcggaaaacggagataaggacgacgttacggcttttaaaactaatgccgaggacggaaaaaacagaaaggagaaatagtttatgacgtggtggctttatttgataatagccgtttcggctgtgcttgtaatcctgattgctgtggtaatcgggcgcacgcttgcgtttaggcccgttgcaggaaaaaagcccgaagaaaaacccgttaccttcgacaaagaaaaggcagttaacgaccttgctgccatggtaagattgcgtaccgtttcttcgcgcgataaaagcgaggaggacgagtcggagttcgaaaaattcgagtcgttgcttttcaaatcgtttccgcttgtcgcggggacctgcgagttcgataaaatcggttcaagaggtttgcttttcaagtggaaaggtaaatcttccgccgcgccgtcggtattcatggcgcattacgacgtggtttccgccgtcgaaaaagactggctgaagcctgctttcgagggaatagtggaggacggagtgctttggggacgcgggacgcttgataccaaaattacgcttaacggcgtcatgcaggcggccgagcagctgataaaagacggttttatacccgaaaacgacatttatctcgcgtttgcaggcgatgaggaaatcgcgggcaacggtgccgtaggcatagtggacgagtttataaaacgcggcgtaaaacccgctcttgtcgtggacgagggcggcgcggtcgtggaaaaggtttttcccggcgtaaatcttccttgcgcgcttatcggcacgggagaaaagggcatgatggaccttgagttttccgtcagaggaaacggcggtcacgcttcggcgccgcctccgcatactgcggtaggcaaactttccgcggcgtgcgtcaaagtggaaaacaagccgtttaaatcggtgctttcccgtcctgcggcggaaatgttcgatacgctgggaagacattcgtcgttcggactaagaatggtgtttgcaaatttgtggctgttcaaacccgtgctcgacggaatgtgcaagaaaaaaggcggcgagcttaacgcccttatgcgcaccacctgcgcctttacccagatgcagggcagtaaaggcaccaacgttttgccgcccgaagcgaaaatggtggcaaacatcaggataataagcggcgaaacaaccgattcggtcattaagcgcattgaacaaaccgtggcagaccccgaggtaaaactgagaattattcacgccatgaacccctcggcagtttcggttacggaaggcgagggatggcagaaactgaaagacgcgatttcactcacctggaaaggagcgattatttcgccgtatcttatggtggcgtgcagcgattcaagacattacggcaaaatttccgacaaggtttaccgcttttccgccatggcgctttccgctgaagaacgcgcattgattcacggcaacaatgaaagagttccgcttgaaaccgtttataagactgtggaattttatttaaggcttataggaagctgctgatttcatttttttgcaggcgtttcggagtatttgtgattatgctttagtctcagcataaaacttcggcttttacgctattgtaaaaaacgaaacgggtttgccg

SEQ ID NO: 4009 - DNA, 15029 bp, Unknown
  16S sequences of unknown bacteria
tcgtcaccgtcaacgactatctggccaagcgcgacagcgagtggatgggcaaggtgcaccgcttcctgggtctcacggtggggctgatcatccacgatatggataaccccgcccgccgcgaagcttatgccgccgatatcacctacggcaccaacaacgaaatgggctttgactacctgcgcgacaacatggccatttataaaaacgaactggtgcagcggggccactctttcgccattgtggacgaggtggactccatcctgatcgacgaggcccgcacccccctcatcatttccggcatgagcgaaaaatccactgccatgtacagcactgcagatcaattcgtttcccgtctgaaaaaaatggtcgtctcctctgtggataccaaggaggaagaggcttcagacatcgacgccgactatgtggtggatgaaaaggccaaaacggccaccctcaccctgcgcggcatccacaaggcggaggagtatttccatgtggacaacctggccgacccggaaaacgccgaattatcgcaccacatcaaccaggccatcaaggcccacggcgtgatgaagcgcgatatcgactatgtggtcaaggacaacgaggtcattattgtggacgaattcaccggccgcctgatgttcggccgccgctacaatgaaggcctgcaccaggccattgaagccaaggagcgtgtggagatcgctcacgagtccaagaccctggccaccatcacgttccagaactatttccgtctgtataataaactttccggcatgaccggcacggctaccaccgaaaaggacgagttcgccacgatctacaagctggacatcatcgagatccccaccaacaagcctgtggcccgcatcgacaaccccgacgtggtgtataaaactgaagccggcaaataccgcgctgtggtgcgccaggccaaagagtgccacgaaaaggggcagcccgtgctgatcggcaccgtgtccatcgaaaagaacgagctgctttcgggcatgctcaagcgcgagggcatccctcacaacgtgctcaacgccaagaaccacgaaaaagaagctgagatcatcgcccaggccggcaaattcggcgccgtcaccgtagccaccaacatggccggccgcggtaccgatatcatgctgggcggcaatgccgaatacctggccaaaaacgaactgcgcaaggccggctacagcgacgagatcatcaacgaagccaccggctacgccgatacggacaacgaggagatcctcgccgcccgcaagctctttgcgcaggccaacgacaagttcaaagccgagatcgccgaggaggcggaaaaagtgcgtgaagccggcggtctgtatattatcggcaccgagcggcatgactcccgccggatcgacaaccagctgcgcggccgtgccggccgccagggcgaccccggtgaaacccgcttctatatttcccttgaggacgatctgatgcgcctgttcggctccgagcgggtcatgggcatgatggaaaccctgggcgtggacgaagacactcccatcgagcagaaagtgctctccaacgccattgaatcggctcagaagaagattgaatcccgcaacttccagacccgaaaaaatactctcgaattcgacgacgtgatgaacactcagcgcgccctgatctatgagcagcgcaggcaggtgctcgacggcgacgatctgcgcgagagcatgcagaaactgatccacacctccatcgccgatcatgtggcttccgccgccgcccacaacgaatatgtaacccaggcagtctttgccgacatgtgcgccccctatctgggcctgttcctggacaaagaggacttctccttcaccgaccaggaactggagggcatgagcaccgacaccatcactaccatgctttttgacaaagccgccgcggtatacggccagcgcgaagaaaccttcggttcccccatcatgcgggagctggagcgcgtggtcatgctgcgtgtagtggacgaatattggatggaacacatcagtgccatggatgagctgcgccgcggcatcaatctgcgcgcttatgcccaggagaaacccaccgacgcctacaagcgcgaaggctacgaaatgttcagcgaaatgatcgccgccattcagagcgaaacgctgcgccggatgtatctggtgcgcgtgaagaaggacgaagagatcaagcgcgagcgcgtagcccgggaatccggcgagaacgcaggcggcgacgattccctgaaaaaaaagccccgcaccgtgaaaaaagtgggccgcaacgatccctgcccctgcggcagcggtttgaagtataaaaaatgctgcgggcgcaacgagaagtgaacagcgcttttaccacacatatccaggaggacggcctgctgtacctgaccgcctcttccctcagcgtcccaagcctggcccacgggttttccacccggctgggcggcgtcagccgcggcgtattcgccgcgctgaacctgggactgcaccggggcgacagcacagaaaacgtgcaggaaaactatcgccggttctgcgccgtgctcggcgtagcgccgcagcgctgcgtgctggccagacaggtacaccgggatgatgtaaaagtcgtcaccgcacaggacgccggagcggggctcctgcgtccgcaggattacgaggccgacgccctggtgaccaacgtacccggtttgacgctgacgatcttttccgccgactgcatccccacgctctattttgaccccgtgacacgctgtatcggcgcagcccacgcgggttggcgcggcaccgccctgggcatcgccgccaaaaccatcgccgccatggagcgcctgtacggcgccaaagcagaacacatccgcgccgccatcggtcccggcatctcccggtgctgctttgaaacggatgcagacgtacccgcagccatgcgggcggctctgggcgcggaggtggagccatacctgcagcgcagcgcccaggacgggaaatggcacgttgatcttaaagccatcaaccggcactggatgctgcgcgcaggactcgcgccggaacacatcgccgtgagcggcgcgtgtaccgcctgctgcacggatctgtactggtcgcaccgccgcatgggcgacgtgcgcggcagccaggccgccatgatctgtttgaaggaaacaccatgacaaaggaggccgcgccactgtgaagcgtttcacccgaaggagtcttttcctgctgctcaccgccgcactgtgcctgctgcttgccggctgctggggcagcgacccgctggcggaggaaaacggcgatctgaacggcctcctgggactggaaggctcagatacagccgacgatgtggttcccatcacttcctttgcccttcctatcctggccggggaaacgctggaccccattgactgcggcgacggcgtccagcagcttctgctccctctgctctacgaagggctgttcgaactggacccgtcttttgagccgcagcccgttttgtgcgaaagctatactcattccgaggatttcacggtttggactttccaggtacgcagcgtctccttttccgatggcagcgctctctccgccgcagatgtagccgcagcgctgcagcgggcaaaaacatccgcacgctacggcgcacggctgtcttccgtatcctcgatccgtgtccaaaacggcgctgtggaaattacgctcagccaggccaacaaccgtttccccgccctgctggatattccgatcccctccaaatccagcgccggaagcgccgtgcctatcggcaccggcccgtatgtatacactacgggggacaatggcgcatccttgatgaaaaacaccgcctggtggaagggggaatctctaccggtggacacaatccctctgcgcaccgtggacagcgagaacaccctgacctatttgttttcttcccacgccattcagatgctgcttactgactacactggcagcgacccagtcagctataaaggcaatttatccataactgacacacagaccaccacgctgcagtaccttggcttcaactgccgcagcggtcccttttccgacgccaaactgcgccgggcgatttccctgggaattaaccgcgacagcatctgcaaggcttatctgtccggccacgccgtcagcacccagtttcccgtggctccggcctcgtcctggtaccctgcagctttggaagaaagctacaatgccgaatccttcgcccaggccatgaccgaagccggttataacggcggtgcccacgccgcctccgtccgcatgctggtgtgcgaaggcaatgcgtttcgtctaagcgcagccaaagccattgccgccgcgctttccgtatacgatttgaaggtggaagtacacacactgccctacgaggagtatctctccgccctgcaaagcggaactttcgatctctattacggcgaaacgcgcatgaccccggatttcaactgcgccgccctcatacaaaccggcggcagcctgaattacggcggcttttccgatccggcgctggacgctcagctgaccaccgccttttccaccgccgcatcgcccagcggcgccaatgaaacactgttttccactttccaaaccaatgcgcccatcgcgcccatctgtttcaaaacccaatctgtggtgctgcaggccggcgcagccgacaacattacacccaccgcttctaacgctttctaccgctttccggactggaccatccatttgaccggtgccgacagttgacgggaaaacttcccgctccgggggtaggcatggcacagtaaatatggtacaatcaaaacaggcgttgtacgccttatcatttcacttcaccggaccggcccgctttgcgggccgcgcctgtttgaaaaagagagactattcgcaaaatttcattagggggaatctttatggcacatgtatttcgatgctacacggaaaagcgggacggctttgacgtagaggcaaaagccctgctcaaggatctgaccggcaccttaggcgtgacgaacctgaccggcgtgcgcctgttcaaccgctacgacgcggaggggatcgacgaagccacctacagggcagcccgcagcggtgtgttttccgaaccgcagtgcgacctctgttatgatgaagaactgcccgcgctgccggaaggatccaccgttctggctgtggaatctctgcccggccaatacgaccagcgcgccgactcctgcgctcagtgcatccagatgattacctgcggcgagcggcccctgatccgtactgcccgcatctatgttctctccggctccttaaccgccgaggatcttgtcgccatcaagggcgacctgatcaaccctgtggaatcccgtgaagcgtctctggacaagcccgaaacactgaaccaggagcatcccgcccctccggatgtggctgtgctcaccggctttatcggactcagcagcgaggcagaactggaaactatccacgaaacttacggcctcgccatggatatggaggatctgaaggtattccaggctcatttccaggaactcggccgggaccccacggtcaccgaactgaagctcatcgatacatactggtccgatcactgccgccatactactttttccactcacattgaccaggtggaaatccaggactatgagatcctcaaatcctatgagcgttatctcgctgcgcgcgaagaggtctacggcccggagaaagccgctgcacggcccaaaactttaatggacctggccacgctgggcaccaaagtgctgaaaaagcgcggccagttgcccatgcttgacgagagcgaggaaatcaacgcctgctccgtgcgcatccgccccaccattgacggcgaggagcaggactggttgctgatgtttaaaaacgaaacccacaaccaccccacagagatcgaaccgttcggcggcgcggccacctgcatcggcggcgccatccgcgatcccctgtcgggccgttcctacgtctaccaggccatgcgcgtcaccggcgcgggcgatcccacggtgccggtcagcgaaacgctgcccggcaagcttccccagcgccgcatcgttacccgcgcagccaacggctactcctcctatggcaaccagattggcctggccaccggcgtggtgcaggaattttaccaccccggctacatcgccaagcgcctggaagtgggcgcggtggtggccgcagctccggcagaaaatgtgatccgggaaaccccggaaccgggcaacgtagtgctgctgctgggcggccgcaccggccgcgacggcatcggcggcgctaccggctcttccaaaagccacaatctcaaatccctgcaaaccatggcctccgaggtacagaagggcaacgcgcccgaagagcgcaagatccagcgtctgatgcgcaacggcgaggtcacgcgcatgatccgccgctgcaacgatttcggcgcaggcggcgtatctgtagccatcggcgagctggccgacggcctggacatcgatctggatgccgtacgcaaaaagtatgagggcctggacggtacggaactggccatctccgagagccaggagcgcatggccgttgtggtgcgcgccaaggataaggacgctttcatcgccgccgccagtgccgaaaacctcgagtgttaccaagtggccactgtcacaaaagagccgcgcatggtcatgcgctggcggggcaagaccatcgtggacctcgaccgcgcattcctctcttccaccggcgccaccaagcacaccgcagtaaagatccccatgcgctttaccccccaggaagaaacccgaaaactctccatcggcgaacgtttctttgagctggccaaggataagaatttctgttctcagcgcggcctggtggagcgcttcgacagcaccatcggcgcagccaccgtgctgatgccttacggcggaaagacccagcgcagcccctcccaggtcatggcggccctgctgccctgtcagagccgcaccgaggactgctccgtcatggcgttcggctttgacccggcgctgttcagcgctgatccctatgccggcgccaaggccgccgtcaccgaatcgctggccaagctggtggcagccggcgtcagcccggaaacttactatctctctttgcaggaatattttgaacgcctgcgccaggaaccggagcgttggggcaaaccttttgccgccctgttgggcgcgctggacgcccaaatcggtctgggtgccgccgctatcggcggcaaggactccatgtccggctcgttcaacgatctggatgtccctcccacgctgatctcctttgccgtagcgcccgccaaggcgccgggcctgatcagcacggatttcaaagccgccaaccacggcgtgtacctctttaagcccgccgatgattccttcgacgccatccgcgccacctggcggcagttccacgcatactgcaaagccggcaaaatcgcctccgcctgggccgtttccggcggcggtgtggctgagggcctgatgaagatgagcttcggcaacaaagtcggcttcctggcttccggcaatattgacgccgatttgctcttctctaagcagtacggcacaatcctggcagaatgcaccgaagtgctacccagtgatgaggccaacgtcatttccgtgggcaataccgtggacaagcccgccttttatatcaacggtcaggaattctccatcgaatccattctggacgcctgggaagcccccctggaaagcgtgtatcccacccgtgtcagcaaagccggccgcattgagtccatcacctgccacgagcgtagccccttggtggctgcggagaaattcgcaaagccccgggccgttttggccgctttccccggcaccaactgtgagatcgataccgctatggctctgcaccgggccggtatcgagccggaggtccacatgatccgcaacctgacggcagcagatttagaacaatccgtccaggaaatggaacaggccatccgcaacgcacagatgattatcctgcccggcggattctccggcggcgacgagccagatggctccggcaagttcatttgcgctttctaccgcaatccccgtatcaccgaagcggtggacgatctgctctaccgccgcgacggtctgatgctgggtatttgcaatggcttccaggcccttttgaaactgggcctgctgaccacgggccacatctgccccgtggacgacaccttccccactctgacctataacctgatcggccgccatcagagccgttatgtctccacccgcgtggcctcggtccactccccctggatgacgctgtgcaagcccgacgagctgtatcatgtacccgtgtcccacggcgaaggccgtttcgtagccaatgacgagcgcattctggaattgttccgcaacggccagatcgccacccagtacgtcgatcctcagggccgtccgtccatggacgtggaatataatcccaacggctccgtgcaggccattgaaggtattttcagccccgacggccgtatcttcggcaaaatgggccatatcgagcgcagcggcaaaaacattgcccgcaatatcccgggtgaaaaattcatgccggtgttcgagtccggcgcagcttattacaaataactccggatccgcagcactaaaacacccccggcgaagttgcctttcggcaaccccgccgggggcattcttttaacagttcacagctcactcaaaaacgaaggacataccgcacacatccacccgctttaccatatcgctgcaaaacagcgtaccgcgctgcggcagaaccaatatctgcgcactgcagtcctcccccgcagtggaaatagaggcagagttcgggccaaaggaatggacgaccgtaccgtcacgataaacgacctggagcgatgccattacctccccggccgcatccggcgcttcgtcccgcgcaagctgcacggacaatcccaggggagacagcgcacagataccctccggggtctgggcgaggcgctcctctgcccggcgctgcacagtccaggacagggctagcggctcttccggcagcgcggcatccgccggaacacccgaaagagtaaacgcgcccagggtcagcgtcagcgtctcgcccaaaagatctgtgtccggaaagcgaaatgtggacacacactgcacgcagccgcgcgccgcgtcaaaaccggtgacagcggtcgcccggtagtccggcgccattccttccgccgcgctgcattgagcctcaaaggccagggcgccagcatcctggtgcagcgccgaccacgccgccgtccagttctccggcagggtcagctcgtagtacaggcagatcagatccccgcccgccgccgtctggatcagttccagagaaaccgcgccgctggagacgcactcctccacagtctgcaccagatcatttccggcacggtccgcctcctcctgctccagcgacagagcctccaaaaaccgcggatcccattgcgcctccgttttccctgccgttcctgcgttccaatacagaagcgcacaaaacaggatcaggacaacagcaaggactgtgataaaaaccgccgccttagatttccccatagcacatttcaccccacttttcatattttaaggaatggaacaacatacaaaaaagcgcataaactgccttttcctttcacagcctacgcgctcaatcagatactttaatccgatccttccagatacgggaaagaaccgctgactggctttgcatctggctgtacggcctgctgacaaaacctggcacaccatcatctccctccactttcatatattcagtatatcgtaccgttcaaattcggtcaatgacctgtttttttagcgggaaatacacaaaatcccgtatgatattacagcagcccccgggattgctttcccggaggctgtgctgtttctggaaaaagacaggttgtcttgatcaaccatacagattcatcagaagaataccaataatgatcagcaccacgccgatcaagccggctttcgaagttttctgccggtaggcgatgtaaccgatcaaaggcgtgattgccgtacccagggcgccccaggtgccgtatgcaatgcccatgggaatgtgagtcagggacatgcccagagagtagaagcagatcacatagcagataatgcacaccaggcttggcttgagcttggtaaagcacatagtggcaggcagtgtcgaagtcgccacgatttcggttcctacggcaatggccaggaacacataggccatccacatcgtaatttccattaccgtttctcctccttctcctgcgctgccggcaccacattgtctttatcacggtcctcttttggcgtgccgtacagattcagaatgaaaataccaacacacatgattacaataccaagccagcccagcggagaaatatgctggccgaaggcaaacaggccgatcagagccgcgctgactgtgccggccgccgtccaggtggcgtatgatacgctgagattgatgtgctgcagcagctgggcaaagaaccaataggacgccacatatgccagaatgaggcaaatggtcggcaccagtttcgtaaaggcgtcgcaggcctccagaaagcccgtaccgatctgttcgaaaatgatcgagataaccagaataccataagcctgctttttgttcagtttcagaatcaaaaaatctccccctctgtttccttttgatccaattttttcgaatagcctatcgtcatttataaaggtttccactgtgtaagagtcaagaaatttacagcactttgtcagggattttcctccgaaaatcttggactattttgttctttttcccgttttccactggaaactttttacccatccagtccataaatccggaaaaagcaagaaagtctgacataatgtcagactttcttgtttgccgctgattctttcaggactcccgcttccaacgttccagccgttcaaagccctccgtatcctcctgcaccggcagcagcagttccgtgacaaaattttcctcccgcgccgtggaatacacatccagcacatggcgctcgtaacagtcgccccgcagggtgaaacggtgctgctgcgcccacagcagcatgcgctcgtagctgtcgcgcacattccgcggcgcccccagatgataaccagccaccgccaggaaaccaccgaaatgcgccgtgttattctggcttttgctgtttggaaacatggtctgcagcagcgtcatgctgcagtagcgatcctccatgcgctcagctacggaatcgtatttaacatgaaacgcgccgcccatatccaccatggaatggccgtcccgcttgctcatggtaaagtattcaatttccaaacggatttcggaatcctgctcttccggcgcacgctggcgcgtatagtaaaaataccgctcttccgggatatatttcatggtaatggcgcggttctggtgccgttgcgccgcccgcccctccaccagaaggccgtaccatgcccacaggctgtccagccgttgatggtaatattcaatttcgctgcgggtctgatcaatcttctgcagaaaaagggcctcaaaacggtccatatcctcgccagagagcgcctcgctgatctcttccaaccggaaaccctgatcaatcagataacggatcacctgcacccgctgcatggtgcgcacgctgtagtagcgataatggctgggttttgcgatgtgatccggagtgatcagccccactttttcataatagcgcagcatacgctgggacacatcgcagattttgctcacctggccgatggtatacagcgcttcctgttccatactcttcctcctcctgccgcacagcgcagcagtctgcaaaagccgcggggaggcgatgccatccaccgtctccccgcgcttgctttttaatactggcgcaccactgcggtgacccggcccaggattgcagcttcgctgccgtcgatgggctcataatccggattctccggcagcagccagatctctccgttgctgcggtgcagccgcttcaccgtggcttcctctccgatgagcgccaccacaatttctccgttgtgggccgtaggctgctgcttcacaatgaccagatctccgggcagaatacccgcgtccttcatggagtagccccgcacacgcagggcaaaatagcccgccgtatcgccgcccacgtcaaaggtgaggtaatcctccacacactgctcggccaaaattggcgcaccggccgccacggagccgacaatgggcactcgcatatcctgcgcctccacctccgccgcagccgagaccgcagcggcgttccccgcctcgtccagatcaatcagcgggcgcagcgcgcggccttttccggctcccttttcaatgtatccctcgtcagccaggttcttcaggtgaaaatgaacggtggacggcgatttcagccccacggcgtcgccgatctcgcgcacggagggcggataaccctgttccttcacgcactgcacaatgaagcggtaaatctgcctctgcatggccttgtgtttcatggcggctcctccatttgatggtttataccctcagtatagcacagccatgtttcgaatgcaaacatttgtttttcttttgttcgattctttcgcctgttttaccatacaatctgcaattttttgcagcaatatcccctattgtattttctttttcccgtttccgcagcaccgcgtcaggggcaatacgtcttgtacagctccacatgatcgtaaatggcgcgccaggaactgtaggcgttcgctgtgacacagagatagccgtgtccccgggcgtcttccccgtagctggcagcgcagttgccggactgcattacatagccggttttggccgccacagcccgcacggcgttatcggcatcatgatcttcgatcttacgcaaaaaccagttggacaaaacctgcccctccgggtgctcttctgtgggatgggtctcatagacgtgggccgaaagcacctggcggcacaacgcattgtccatagccgccttgaggatcaccgccatatccgtcaccgtgcagtggtggttctcgtcatacaggcccacacagttggtaaaatgagccgttttgtccagcccaagcgcagccagcttttcattcatctgcgccacaaaggcttcgtggcttccggccgtataacaggccagcgccagcgccgcatccgctccggatgaaaggatcgtcccatacagcagttcccggacaggcaccacctcgtccacttccagccccaccacgctgcagtcgttcacataacaataatcggtgatttcacgggtgatcgtcaccgtatcgtccagagcctcctcgccctccaactgctccacagccaccagcagcgtcaggatcttcgtcatggatgcgggagaaatcaccgcatcggcgtcttttgccgccaaaatttctccgctttcggcgtcaatcagcaccgcatggctgcttggaatctcatcccccagcagcgccgtggctgccgtcgcctccgggacaaagcgcagctcctgcggctcttttggctgctgcactaccgcattgcccaccgccggaacatcaccggcgtctttgcttgtccccttctcccggtgccccaatccggacagaagcaccaccgcaatcactccggcggccagaaagggcgccaacagcagcatctgccgccgccggcgcgcccggaaccgctcccgccgcgctctgtcccgccgcgcccggcgggcggcccgttcttcttccgtcattgctgtcgtatcgtttcgttccatgtgcgctcctgccttgctgtcaatgcaccatccgtgcatgcgttttttctatatgggatgtattataccaaaaagcgcgcagaaatacagcacctgtggaaaagatttcaaaaaagctgccgcgggccgcgcctgccaaggcgaaaaaaagaccgctcccggcaggagcggccttcttcacagatttgttgttcaggcaatcaggttcagcagcagcgtcaggatgatgaacacagcgccaatccatttggtggctctggccatcttggcgtccgccgtttttgcctcgtgtttgctcataaaggaatctgccacgccggcaatggagccggacaggccggcgctcttaccggactgcatcatgatgatgccgatcagcagcaaaccacagatcacctggatcaccgtcagaaaaatggtcatagtttcgtcctcccgctatcgttacagcaaaagcccacgcgcttttgcattttttttgcttatttgcagatctatatgttagcacagtttttgccgcattgcaaggctattttgaattttctttgcaatttcagcgttttttctcataaccgctcttcccaggcgttgcggtacagctttccggcctcagctttcgtgccgttcaggcgcagcagctcctctaccgtaacgaattcgtacccctcttcctgcagccggtccacaatgcgcagcgccgcctccacgctggtggggtagaaatcgtgcagcagaataatgtcgccatcctgcacatgggagcagacgtgctcgctcactttatccgcgtccagcaccttccagtcctccggatctacagaccagtagaccatgggcgttttcaccagttttttgcccgcttcgtcaatcaggccatagggcgggcgcagccagtattcccttccttcgcccagcacgctgctgagcagcacctcggtcttgttaatctcctgcagaatcgtgtctttgccgcttcccgccagcttttggtggctgaaggtgtggctgccgatctgatgcccgttttcggccatccagcgccccagccactcgttgccctcaatctgctctccaatcagaaaaaaggtcactttcacgccccgctgctgcagcccttccagtaaaacggaggtggtgtccgcccgcgggccgtcgtcaaaggtcagcgccacatatttgggcagcggctc

SEQ ID NO: 4010 - DNA, 32759 bp, Unknown
  16S sequences of unknown bacteria
aggggtaagtatatgatattatgtaaaactatattttcacctttttaagcggttttaaaataatctcagtctgaaattattttttgccccggcaatcctttgtgcagccggcacagccccaaagtttatcggcggtccggttccagtttgccgcatatggaattgttttttccgttaagtgttcaacggattccgggctttgcatatctgtggattttgcgccggtatcgtgaaccatttttacaatcttttccgggttttcaagcatggggcatggctttaacatattgtcgttaaaaggcatattgttgtggtatgccataaacagcggggaacgcaggcagtcaagcaatgttttttctctgatatttgaatcggaatagtgaataaatacacaggggtcaacatcgccgttggcgttaatatgcaggtatctcttgccgccggcaatacagccgcctacatattccgcatcattttggaagtcgattgagaaaatatcctttgtattgcggtattctcttattttatgataaatgtattctctctgttccggtgtaggcataagttccggcacggcgtcatttcccacaggcatatagtggaagttccaaacaaagcttgcgccccagttaatcatctggtcataaaattcttcacttgtaatcatatccatatttgcggatgtgtaacaacaggaaataccgaaaggcaagcggtttttcttcaaaatgtccatggctcttgtaactgcatggaaagagccgtcacctcgtctgccgtcgtggctcaattcgtcaccctcaacggaaatagccggtataaagtttttaactctcagcatatcctctgcaaaagcctggtcaataagtgttgcatttgtaaagcaaaggaaaatgcaatccgagtgtttgttgcaaagagagattaagtcgttctttctgaccatcggctcgccgccggtgtagatgtacatataaacacccagttctttgccctgtgtgattatatcgtcaatttcatcaaaagaaaggttcagtttgttgccgtactccgccgcccaacagcctacacagtgaagattgcaagccgaagtagggtcaagcaaaatccgccatggaatattgcagttgtatttttgacggttttcttcctgctttttccagccgataagggaggcgttaaggaaaaagtttgtaaatacggtctttacaacctctctgtcggtgtccttgataacacgcattataagtttgtaccggtttgaatccgggtcgtccaaaatgtcacggatatatttacgctgaacctcaaaggtgtcctcacctgtgccggcaaaattatcaacccacttcataattgtttttaaattcttttccgggtcgttttcaatataatcatatattttttcaagacccaactgttttatatctttcataataataacctccgtttttaaccttgcctgtattctataatatttgcaaaactaattaaatatacaaaatttttaatatgtttaatttgcgtacaagtatggagaagtggctaaattattatcgaataccgggggcgaaatacaggatttatcatatgttataaaataaattgacatataatgtaaaaatatgtataataataaaaacaagtgtattttatagaaacacaaaaggagggtatataatgaaaaagaaaggtaccggccgagagatatttaaaataattttggcttccggggttcttgtaattcttacctatatgtgcgttaaaaccggtatattcccgggtgtgggtagtttaatagacataagttttgacacaattttaaaaatcataatagcggtggcttttatacaggttgtaggcggtgtgcttattgttgtattaagtttgtttaaaaataaaagcggcagagtgggcacaatgtcaaccgttttaataagcattgtaaaatattctatgcggataataggcttttgttgggttttgaccataatcggggttaatgtcagcacaatttttgcaagtataggaattttagcgctgataatcggctttggggccgaaagtcttgtggcggatattgtaaccggggtttttgttctgtttgaaaatgaatataacatcggggacattatagaagttgacggttttaggggtacggtgacggaaataggcatacgcacagtaagtgtacaggattccggcggtaatataaaaatcataaataattccgatttaaaaaatattatcaaccgttcaaatcaaaaatccacggccgtgtgtgacatcggtgttgcatacgaaacagaccttgaggagtttgacaaacttgttataaaaatcatagatgaaataaccgacagaaacccggaagcctttaaatccggcataaaatatttaggcatacaggaattgggagattttagcataacactgcgttttgtggccgaggcagaagaaaacaaggtttttgccacaaggcgattattaaataaagagctgaaaatcgcatttgacaggcataatgtgtcaataccgttcccacaaatccaagtgcgcaataggtgataaggcctatgaaaaaaaacgaaataaaaaaggatcttgaatttaaccggtcggataaagaatttgcccacttgcaaaaatcggaatttcaggggtcaaatcaagaattttttgaagagaatatcggccaaaaagccgataaaaggaaagaaaatcggcaaaaccacaggaaattgcttaggaaaatgtcatacttagtggtttcggttattgccgccgtaaatattttttcaacaaccgacgatttaaaggaaaatgtaaaaaaatacggcggtactgtggatcgggatttcaggtttaccattcaatggaatgagaacggcaaaaatgatgatgattttgacgcagtgtgtacagagccgggcggttatgggatttcttatttgaatttgaacagtgtgtcaccttccggcggatttcttgatattgatacacgcatgccaaacggaaatctggccatagaaaacattgtttataaagaaagggatgaaatgcaggaggggacatatcttctttcggttaaatgttttgcaaaaagcaacggcaaaggcggttttaaagcgcaaattgaggcattgggtaaaatttataattttaagtacaataaaaccttatcggaaaaggaaaccgtagatgttgcaaaagtcacattaaaagacggaaagtttaccgttgaaagacttttaaaataatttccctttaaataattgacaagcctgccgaggcaggcttgtttgttttaggccagtttacaacttggtaatatctttgttatatattatggttatacagtatcggcaggaggtttgttatggcgtatatattggttgcggaggacgaaatccccattaacgatttgatttgtaaaaatttaaaacttctgggctataaaacggctcaggcttttgacggccccgaggcactgcgacttgcggaaaaagaaaattttgaccttgtgctccttgatgtaatgttgccgggtatgtcaggttttcaggttaaaacaaagctgccgaaagatttgccggtgatatttgtaactgcaaaaacttcggtgtcggatcaacttaccgggcttaacttaggggcagaggactatatcaccaaaccattcgacactcttgtgttaatcgccagggtggaaaatgtcttgcgccgaacaaagaaaaatgatgcggtttttacaattaaagattgcgttattgatttgtcaatgcgaacggtttacaaaaacggtgagagagttgatttggctttgcaggagtataatcttttggaggctcttgttttaaacagaaactttgctctttcaagagaaaaacttttacaactggcttggggctacgattacagcggagacacccgcaccgttgatgtgcatatacaaagattaaggaaaaagctgggtttgtaccgggaaatcgcaacggtttacaaatacggctatcgcttggaggttaaagggtgaaaataaaatttcggcaaaaaatatacctttgggttttatttgtatttttgttgtttttcaacacggtgatttttaccctgcgggcagtgcaaaattcaaaaaatttggcaaggcaaaaagaaaatcttttggcacagcaggaatatattattcagcaggtggtagacgatatgtccgccgtttatcaaagccgcccattgggaattccttatataatcagccggtacggaagccgccatgccgcaaggggaatacttatgtgggttgcaaatggggacagtgtggtttattcctctgtggaaaacacggcagatgaaacactttttacggatttttcggagaaaagagtatcttttgtaacggatataaacggaaaaaagtattttcgggtgaaatcagccttgaccggggattttcggcggtataaaacggttatcgcctttcctttgtacgaattttataaagaatggaatgacacagtaaccgttattatggcggtgtgccggggtgtttccttaatcgtggcggcggttctttatctgcttttgaacagaattacaaaacccatagaggaacttaaccgagccaccatagaattcggcaaagggaatttacaggcaagggtagagcatatcacagatgacgaagtggggcaaacggcggaaaactttaatattatggcagggaaaatttgctcgcaaatggaaacccttgaaaatgcggcaaaggaaaaacaaaatttcattgacaatttttcccacgaaatgcgcaccccccttacggctataagcggttatgcacagtatatgctttccgcccaagtaaccgatgaggagtattattccactttgacgattatttccggccaggcgaaaaggcttttaaatctggcagacagtatgctcaacttaacacttatgcaaaataacaagatagaatttgagaagataaatttaaaaaatcttttgggaaatataccctttccgaaaatggaaaatatcggctttgatataaaatgtccgggagatatttttattttcggcaatgaaacccttatagaaagccttgttataaatcttgtaaacaatcggtttaacgcttgtaaggctgaccaaaaggaaaatcacaaagttacggttaaggccaaaagtataaacggatatgtaattttgtcggtagatgataacggcgtaggtatgaatcgggaaaccttggcaaatgtgagcagacctttttaccgccgggatgttgccagaagccgcaaaaacggcggagccggattagggggaagcataatacaaaaaatcgtggatttacaccgggcaaagctgcaatatttttccacgccgggacagggaacaacggcggagataacttttacaactttgaaataactttgataaaagcctgaaaacaatattccgtaaaataaagttacaaaataaaagccgccatacaggcggcggaaaaggcggtataaaaatgaaaaaaacagttattatcacaatagccatgttggtttgcttcggcattgtattaaaaatcggtgcaaagggcgttgctgacagttggaaaaagccacggcaggacgatgtgaaaccgaccacaagctcgcctgttgatcgggtagagcaggagtacaaggagtataggaatattgatataagtaatcttgacaaaaaccggcaggtctattatgagtaccccggcgaatacttacagcactatggaatttcttggcaagacggaatgttgacattgccccgggcaacaaacatttgcggaacaatgatggaaagctcttttcccgatacgcccataaaaaacagcgaaatcctgattggtcttatacaggaagaaaggagtaatccgacctattttgccttttatgacagctgtgaaaaagggcgaaaatattctcagtgccaaattgacgcttacaccggaaaagtgataaagctcttaaactgtaatgaaaatgaagaaaaagaaaatataccacttacggcagaaaatgaggagagagcaataaaggccgcaaccgaaaaactgtcggaactgggctacggcgattttaaaaagtacagtacaaacggttattacgcacctacgggaatagattgggttgacgaaatggcagataatacatcaatattaaagggcgttatggttttgtccgggcaagatgtattttggataggcatacgcaatgaaaaagacagcttatatattgagcatatcgaaaaatatcttgacggtgcagataaagaagatgccataaactatttaaacactgccggcaaggatattccacaataaatttttaaaccgatccccaaaaagtcagaccaaaaatctgaggatagggggtcggtttttaatggtaaaggtagttataaatatcaatcctcgcccagtccggctacaaagtacataagggccgcttgggtgtacacagagtaaaaattgccgtatgggtcacggccggttttaaggatttcttttgcctgttcttttgtaagcagaacaaagccgtcaaatttttcactgccccttgcgccggcttgggttaaatttgataaattatcaacattcagttttatgtaaacaagggcattgctctcatcggtcataccgggggttgagtacaaaaacggatttattattttaacggtgtcatttgggttgactttcagcccggtttcttcctgtaattctcttacagccgttttgattattgcatcatctttgcatatgtcctctttgtcaattaacccccgtggcacagacaaaagatattgccctgccgggtagcgaaattccattgaaaacaatattttctccggctgatttttttcttttattacaacaacgcaacttaccgcatcaggcagcattgccttaacttcccggtcggtttttatggcggttaagtcttgcaaatctcgccttgtggcgtcataatagtgtttcccaggggcgtactgtaagtcatatacttttataaatttcgtttccaaaaggggaacaacctgttctttttttattctgaatttgtcactcataaattttgcttatcctcctgtaacaatttttccgatttgtgtttaaatgcctttgcaccccggttaatgagtaatctgaattttatagaaacatctctttttatgattatacaactatttattattcatttcaactgtaacaaattattcaaaaatttattgagctaaaatgaaatttctgtatgtattttcgctatatctacttagctaaaacaaaaagtatataagtttttactttttattattcatttcaactgtaacaaattattcaaaaatctatttagctaaaatgaaatttgtgtatgtattttcactatatctacttagctaaaataagatttatataaacatttctacttcttaatttcgttaaagttttatttagcgaaatagtattttaaaaaacacttccccatttatatctctgtttttatctctatttctatccctatttctatctctaaacttcaaatttatcggcatagataatgtcctttaaattgaatgaaatcaaatgagaaatttttcaggttttttaaaattgcacctgataatttctgacgagtatctgtaaaagacaaatcactttaataagtttaatataacaacacacaaaaaagagcacaaaatcatgtgctcttttccgtattgtatttttgatatattattcgtttgtatagttatcaaagtaaccctggatatacacaataggtgtgcctttatccccggagccggaggttaagtcgcagagagaaccgataaggtcggtaagctgtctcggtgttgtgccctcggaaaccatattgcccacaaggctgtcacctgttttggctttaattcttccggagattgcctctttcaattcgtcacctgacaaatcaccaaagtcgttatctgcaaggtatttgagtttaagttcgttaggcgtacctacaagaccttttgtataacccggagaaacaaccgggtctgcaagttcccaaattttacctaccgggtctttaaaagcaccgtcgccgtaaaccatggcttcaatttgcttgccggatttttcacacaaaattctgctcaattcttcggcaactgcatcgcaatttcttgggaacagcttaactgtgtcctctgttgccttgttagagcccagcaaaccgtacttttcgttgtagccggagccgtcaacaggctgtgtcataatgtcatcaagacccaaaacaacctttgcccctgcttgacggagaagttttttacttctgtttcttgtatgaatatcacaggtaataactgtatctgtatattttaaaacatcttggattctattgccgaagtaaacttcaacttccgcaccggcctcacggataagatcggaatagaaatctatgtagtcaacgccggtaaaggggtgaagaatgtgaccgaattttgctctgaaatcttccaaagtcaaaacatctgtaaatgggtcaacccctgcttcgtccaaaagatcccagtcaacaaggccgttaccaacctcatccgatgggtatgaaaggaacaaaacaacctttttgcaacctgccgccatacctttaagcaacagtgaaaaacggttacggcttaaaatcggaaaagcaacggcaactgtttcgccgcctgttttggcttttacatcttttgcaatttgttcaacacttgcgtagttgccctgggctcttgcaacaacagattctgttaccgcaactacatctttgtcctttggctcgataccggcctcttcccatgcgtcaataacagccttagctgcgatagccgcaatgttgtctccttggcgaatgataggcgctcttataccgcgcgcaaccgttccgacagttctcatgataaatccctcgatttttatttaaaattgtttgtatggcgccggtattttataaaatatatccggcttgccaaaatgtgtattgcacaatgtgcaatactattttacactataaatctcatatatgcaaataaaatttacatttttctttaaaaaactcatttttttcaccgatttggcacagatttgagaaaatattaagctgtgaaaacaccacagcccttattatacattattacatataataaatcacgcccctatcgtgaaaggggcgtgataatgctgaatttaatttttgatttgccggcttttgcctgttttgaaagaaagccctttaaaccggattagccgtgatttttaagccactggatagcggcattggcataaacagccgcacctgttgaaaatacgctttcgtcaaagagaacaaatggtgaatgccgtgggaataccttttcgtcgtccttaactcttgcacccaatgagaagaacattgacggcacagcctgtgaaacccatgagaagtcctcgctgcccattgatgatggaacaagatccaccttgtcttcgcccaaaagatcacctgctattttaacaagctctgtctgcaattccgggttgttttcgtttggaacacagccgaaaggccattccacaactgccgtacatctgaacgcctgtgcgattgcggtgctgatttcttcaattctcttcttcataaattcacgaactgaatttgagtatgtgcggattgtgccctccatccaagctgtatccgggataatgttttctttgtcaccggcctccaagtgacctatggtgagtattgccatatctctgccggaaatttctcttgcgtttatttcctgcaaagaaataagaatgtgtgcggcggtgtttaccgggtcaaagctttcttccggagaagcaccgtggccgcccttacctttgattttgataacaaacttgtcggcagaggcattagaaaatctgtcggagtatgcaagatgtccctttggaacggttgaggaaatgtggattgccattgcggcgtcaacatgaggattttccaaaagaccgtggtcaagcatctcttttgcacctgcaagaatttcttcaccgggctggaacataagtttaactgtaccgtttaatttatcctcgttttctttcaaaagttttgcggcgcccaacaacattgcagtgtgggtatcgtggccgcagctgtgcatccaatcatttgtagatttaaattcaaggtcggtacattctttcataggcaaagcgtccatatcgcctctgatcataaaggttttgcccggcttacctattgttgcaactacgccgcttttgccgcagtcctccggtgtgtagcccatttcaataagcttttcttttacaaatgcaactgtttttggcaaatccaaacccaattccgggtttttgtggattgttctgcggtttgcaacgatttcttcctgaatggcctgtgcctgttctaaaatagacataattttttcctccgtgtctgtgccctgtccgccgggcaaatatttaataaattgttttttgacggttttgtttcccacagccgtgaaccggggcgctttttaaaaaagcattttaaaaacaaaaacagcagtgaatgcactgctgtttacccgtctaatcttctttaagaactattgtaagtttacggtaaatcatggcagcacatataagccttggcgtaataataataaccaaagccgtaataatatgaaactgtcatgtttgcgtttctcataagtcaatagccttcctttgtttcacattctatcactctttaagctgattgtaaacaatttttctgttgaattttaaaattttgtgcaaaaagtcaaatggcacctttaaaaacatctgttcattatcattttgcataaagcacagatgtccgcttgtaaaaaacacatttatatattatactgtttacatacttatgacggaggtaatttactgtggaggaaagattacaaaaacaacttgattttgcccttgaaattgacaaagagaaaaatattttaaggcaaactcacctttccggcaacggcagacgagaaaatgacgcagagcacgcctggcacatggcggttatggcttacattttaaaagaatattccaaccgggaaattgacattgccaaagtgatgataatgtgccttatacacgatgtggtggaaattgatgccggcgacacctatgcctatgacgaggagaatttaaaaacccaaaagcggcgtgaggacaaagcaaaagagaggattttttctattttgccggaagatcaaaaggcggaacttatcgccctgtttgacgaatttgaggcctgccaaacacctgaggcacgatttgccaaggccatggacaatcttcaaccccttattttaaacaacagcaaccagggcggcgactggaaagatcacggtgcaaaggcctcacggatatataaaagacatcgaaaaacaaaacttggctcggagacattatacaaagtaaccgacgatataatacaaacccacataaaaaacggcaatatcaaagaggaataagttttgtaacagtatgtataaaactttatcaccgtttatacaaaaatataagctataatgcagataaatagaaaaggaggcaacctataatgaaaaaaattacacttttggctcttgcacttgttgccgtaacggcttttacggcttgttcacagagcgaaaacagttcttcaaattcttctgaaagttcatcttcacaggtggcaacttcctctcggtcctcccggataagcgaaatgccggaggaaaccccggaaattgtagataaaagttttacatttaaaaacgataagggccaggacatacctgcctatgccgtatatacaaaagagagcattacattctacaccgaggacaaagccccggatattatagcaaaactaaattatcccgaaaagaccgagggcaaacttaaaactttgacggttaccgcagataaagacggtaagaaaaacgaaattatcacaataaccgccgattttgaatttgagggtggcgaaaaagccaaatatgtttggatttccggcgatgagggctatacatacaacgaagaattttcttacaaaaagggagaaacccctgcaaaaggccaataaaacaaaaggcggagcgaaagctccgcttttctgctcttaaccgctgtttgtattgaaaagccatgtcgattatgttaaaattaaagtaatgtcggcaatttgcgccgaaaacacagaggttataaatgaaaaatttaatttttgaaaaagatgatataaaaaaaggttttgccgttgccctggctgttttagcctgccttttcaggctgtttttaagttacacccagtacgccacaatttaccctcccttggcgcccttggacgacgatttaatgtttaaagccgcccaaagtatagttcggggcaagtggcttggggattacacatggcttacaatttcaaaacacgcattttttgccgtttggcttgcgtttttgcataaatttaatatcccatttttggtgggcaatatgtctttgtggattatttcttgtatgatatttataaaagcaataaatcctgccataaaaaagaattggcttaaattattcatctttttggggctggtttacaatcctgccgcctgtgcaagttacgccacaagagtttacagggattctattttccctgccttttgtcttttgttcttccgggctgtgtgccgggtaggtttaagatataaagaaagtgtaaaaaaatggctaccctggcttttccttggtggggtttctttcggtcttgtatatctcacaagggaggacggcgtttgggttttgccctttttcgccattgcttttatcttgatttttatacttttgtttttggaaaaagacaagaaaattttattaaaacttatttccttgttgttgcccgttgccctttccggggctgtgataagcggttactgctatatgaattacagattttacggcagatttattgtaagcgattttcaaagcaaagaatttaaatctgcctacggcgcacttacaagccttgaacaggacaattggaaaccccttgttgcggtgccgaaagatgtgcgagccgatgttcggcaggttgttccctcttttgccgatgtaaatcggcttttgctggacatcgacggctgttattacagcggcaaaaccgacgattacaacagcggttctttctattgggtgttgagaaaagcccttcggcagcttggatattacaaagacgcccaaaccgcaaaagaatactatgagaatttaacggcagagatacaaaggtgtgttgacagcggagaacttaaaaccgcaaacgggaaaaacaaactccgtgtttcggttacgccgcctataaaaggagagtatgttttgcctgttttggcagaaacctttaagggcttcggcacggttataacattcggtcagtgtgacccattggctgagcatgctgtgggcaaggattacgaaataacccaggttcgggattttataaaccgggaaggtgctgtgatctgtgttgaaaatacggatataccctatcttccccccattcgccggcttactcataaatttatgagagttatgatttcaatatacaaagtatgtatgcccataatgcttttaatcacctttacatggcagattaaaaagcttatccgggacataaaggaaaagaaattcgatagagaaagtatgttgaacataatacttttaggccttataggcatggcgtttttaaggtgcgccatgatcggatttatggaagtatccagctttgccataggcacatacgtaatgtatctttcaactgttcacccccttgttatcgcctacggatttttaggctttgccaaaacctttgagcagtaataccatataaacaatttattatatttatataaaagtaaaagccgggttgccccggcttttttatttgcagacaacccggaggtgaggagttttcgggctgcccgtaaatctttatttaaccgatattatcggttattttgtaaagtattctaccgccgatttaaacagctgcatatcgtattcgccgataacattcttgtaaaggttgtcaccgattctctctgcgtgacccattttaccgaacactctgccgtcaggtgacaaaataccctcgatgccctcaacagaaccgttagggttaaacttctcgtcaaaggaaacattgccatccaaatcaacatactgggttgctatttggccgttttctgccaactgttttaccaattcgtcacttgcaaggaatctgccctcgccgtgagaaatcggcacactgtaaacccggtctgtatctacatttttaagccatggagacttatttgaggcaactcttacacgaacaatcttagactggtgtctgccgattttgttaaatgtaagtgtaggacaattttcgtctgtgtcgatgattttgccgtaaggcacaagacccaatttgataagagcctggaagccgttgcaaataccaagcataaggccgtcacggttgtccaaaaggtcgcttacccgccgtttaacttccggattgcggaagaatgcggtgataaacttagcagagccgtccggctcgtcgccccctgagaaaccgcctgggataaccacaatgttagactgtctgattttttcagccaattccttgacgctgtttgcaacatcacttgcggtaaggttgcgtattacataaatttctgcgtcggcgcctgcctttaacaaggctctctgggtgtcatactcacagtttgtacccgggaatacaggtatcaacgcctttggtttttctaccttaatcttaggcttaaccgtttgccggctgttgtatgtgtattttacaggctgtgtatcgctgttgtttttccgctttgtggggtaaacgccctccaaaacgctttcgttaatacttttaagctctttaacggttgctttttcgccgcccagagagataacagcttcggctgttgtttcgccaagttttacggcttcccgatcccctgcaacctctgctactatgtagcccggcatagacttgtaccaatcaatatccaaatccgatttaaagcctatttcgttgccgaatgacattttcataaccgcctcggcaaggccgttttcaacagcccatgcggattttaccacaccttttgccataagagcgtgaagaatttcccaagatttcttaatctcccggccgttttctccgccaaagagatatacactgttaccggcctgcttaaattccgttgtaacaatctcttttgcgtttatcggcgcaacggcaaatgaaataaccgtaggaggaacatccatatcaaggaaggtgccggacatagaatccttaccgcctattgcggcggcggaaagttccgtctgtgcctgcaaagcgcccaaaagcgcccggaaaggcttgccccatctgcccggttcttttcttaatttctcgaaaaattcctgcaaagtgagatatgcctttttatagtctgcgccggaggccacaatttttgcaaccgatgtgtaaaccgcaccgtatgccccattaaagcagtcggcggaaagccgccgagggtcacagccccaagccataaggcttgcggtgtcggtttcctgccccggcaaaacaggcataagagcagccattgcctgtgatggcgttgactgagttttaccgccgaaaggcattacaacggtgccccgtcctacggtgctgtcaaatctttcggtaagacccccgcgggatgcagactgtaaagagcctgccattgattttaagtcccgaatttgtgatttttccgccggtttggcatttttttcaacaagtacatcggcgtgttttacactgccgtttgtgtttaaaaattctctggaaaggtctgcgattgtttcccctctccatgtcataaccattctggggctttcggttacggttgcaacagggtatgcctccaagttttccttttccgcccgggcgataaatttttcccgatcttcctttgcaacaacaaccgccattctctcctgagattcgcttattgcgatttcggtgccgtcaaggccgtcgtacttctttcttacaagatcaagatttatcataagtccgtctgcaagctcacctatggcaacggaaacaccgcctgcgccgaagtcgttacatctctttatcatttttgtaacttccccgtcacggaacaaacgctgaatttttctctcctccggggcgttgcccttttgaacttcacttgccattgtggtaagtgatttcaggttgtggctctttgatgaacctgttgcgccgccgataccgtcacggcctgttctgccgcccaaaagaattacaacatcccccggctgcgggcgcttgcgaattacattttcgcttggagcagccgcaacaacggcaccgcactccaaatgttttgcgatgtagccttggtggtaaatttccgcaacatggcctgttgcaaggcctatctggttgccgtatgatgagttacctgcggcagatatctgcgccagctttctctgtggcaatttgcccggcaaagttgtggaaagttcccgtctgggatcccctgtgcctgaaattctcattgcctggtgtacgtatgcacggccggacaatgggtcacgaatacagccgccgatacatgttgcggcgccgccgaatggctcgatttcggtagggtggttgtgggtttcgtttttaaacatcaacagccagtcctgtgtttcgccgtctacatttgtaggcacgtgaattgaacaggcgttgatttcttcgctttcgtcaagttccggcaaaagacctctctttttcaaaacctttgcgccgattgtggcaatgtccataagggttttcggtcttgcggctgccttttccttgccgtaaacttcttctctcaaagcgagatagttttcataagcggattttacatcttctctttcaatatcaatattttcaagatgagttgaaaatgttgtgtggcggcagtgatccgaccaatatgtatcaacaacctttatttccgtaacggtgggctgtcttttttcggtatttttaaagtagtcctgcagacattttaaatcgtcggcgtccattgcaagacccattttttcacaaagagccgaaagttcctgccggctcatctctgtaaagccatctacctttgcaacggatttgggctcatcatgggcggaaatcaaagtttccggcttttcaaggcttacttcacagctttcaacagggttgataagatattttttaatctcccggaattccccatcggtgatactgccgtaaagggcatagacctttgcggttacaactgtggggcgctccccccggctgagcatctgaatacactgtgccgcagaatcggctctctggtcaaactgtcccggcaagggccgcaccgcaaaaacacggcttgccccctctgtgtctgcctgccggcttacattgtcgaccataggctcggaaaacacggtgttttttgcatattcaaaaagttcgccgtcaatattttcagcgtcatatctgttccaaatttttatatctgtaagaccctttacacctaaaaagtccttaaagtctgacaagagattgacattttcgtttgaaactcccggtttcttttcaacaaatacacgataaaccatttcagtcctccaatgcttttaacgccctgccgcctatgtcatggcggtaatatttattttcaaactccacttcatcgcagagttcataagcctttttaactgcctctttgagatttttacctgtggctgttacccccaaaacacggccgccgtctgtgtagagcttgccgtctttcagttttgcgccggcaacataggttgtttttaaggctctttcgccgattgttatttcaaatcccttttcgtattttacagggtatccttcggaagccaaaacaacacagcaagcgctatcttcgtaaaattccacaggggtatctgccaaagtaccctttgttgtcgcctgcataaccgtgagcaaatcgctctttaaaagtggcaaaacaacctgtgtttccgggtcgccgaaacggcagttgtactcaattacctttggcccgtcggcagtgagcataaggccgaagtacaaacagcccttaaaagttctgccctcggcattcattgcggcgatagtgggaataaaaatttcctgcatacagcgatcagctatttcctttgtataaaaggggtttggagctattgtgcccatgcccccggtgttaaggccggtgtcgttgtcgccgctgcgcttgtgatccatggaagaaaccataggcttaaccactttgccgtcggtaaaggccaaaacagaaacctccggccctgtcaaaaattcttcgattacgatttttgaaccggatgcgccgaaagccccgtcctccatcatcattttaactgcgtcctttgcctgtgcaatggtttcggcgataattacacctttgcccaatgccaaaccgtcggcctttacaacaataggggctttttggcagtccaaataggcaagagccttatccatgctgtcaaatgtttcatattttgcagtgggaatgtgatattttttcataagatttttggagaaaatcttacttgcctcgataatcgcccggtttgccctggggccgaatgccggtatgcccaccttttcaaaagcgtctacggcacctaatgccaatgggtcgtccggtgcgattacccggtagtcaatgccgtttacaatggcaaattccacctgcttttctatatccttaaccccgatttccggcacgcaaacagcgtcccgtgcaatgcccccgttgccggggattgcatatattttttccactgtggggttttcttttaattttttgattatggcgtgttctcttccgccgccgcctacaacaagaagtttcattgaatttttctccttttaatggtggaacaatctcaaacctgtaaagcacatggctataccgtatttatcccgtgtttctattacattgtcatctcttaccgagccgccaggctgaacgatatattcaacgccggattttctcgctctttccacattgtccccaaatggaaaaaatgcgtcactgcctacggtaacacctgtctgtgtggcaatccaagccttgcgctcttctcttgtcaaaacctccggcttaaccttaaaggtcttttgccatacgccctctgccaaaacgtcctcgtactcatcggaaatataaacgtcaatggcgttgtctctgtcccggcggcgaataccgtctataaatggcaggttcaaaacctttgggttctgtcttaaataccagttgtccgccttgttgcctgcaagtcttgtgcagtgaatacggctttgctggcctgcgccgataccgatagcctgtccgtttttaacatagcaaacggaatttgactgtgtgtatttaagggtgataagagaaactatcatatcaatctttgcgttatcaggcaaaatcttattttcggttacaagatttgtaaggagattttcgtcgattttgcagttgttgtgtccctggctgaatgttacgccgaacacatccttacattctgtttcggccggtgtgtaattggggtcaatttgaattacacaataaccgccctttttctttgctcttaaaatttccaatgcctcatctgtgaagcccggtgcgataataccgtcggaaacctcacctttcaaatatcttgcaacatcccggtcgcaaatatccgaaagtgccgcccagtcaccgtaagagctgagcctgtctgcccctcttgcacggatataagcacttgcaataggagaatattccttgtccaggtcggcaaaataaatcttcttttcgatttcgctgagagggtgacctactgcggcccctgccgggcttacatgcttaaagctggctgcggcacaaagacccgttgcctctttaagctccttaacaagctgccatgagttaaatgcatccaaaagattgatgtaaccggggcggccgtttaaaaccgtaaagggcaaccgggaaccgtccttcataaatacctttgccggcttttgatttgggttacagccgtatttaagctcaagttcgttcatcttttaatctcctaaatttttattgaaaattttaacttctccctttacatttgtgtaaagagaaactttattgtcactgtttaaagcatcccatacctgctccggtgtgggcatatcaatttccataggctcccctgcaaagcttggcagtgggttgccgtctccccggtaggtgcttataaaatagcccttaccccggcttacgccctcaaaacggaaaaactctctccgacatctgccgtccctgcgctttaaaatcgacatttcaaaagagccgtccttgtgaataacggcggaaattctcggtgtgtagttaggctcgtccggttcgtactctctttccataaggccttttgtaaagtcattccgctttacaatagtatctgtctggtcgccgtttgtaactactaaatcctcccccattttgcgaacagggtgatagattataaggcttgggtcctgcattttgccctcgtcaaatgcctgtgttcttatgccgtcatcggtcagggtgaaaattctgttacggctgttttcacttctgcccattataaaataatagacactgccgtcccctacaacaattcccctgccgggatatgatgtgtttttaagaaattctataaagtctgtcattttaaattttccttttcttcctgtattctacggcttacaagctccgccgcctttggcaacaaaatccattcggcctgttccataactcttctctgtaaaatttcgggggtatcgccgtcctgtacctccactgccttttgcagtaaaattttaccgccgtccggcacccgattgacaaaatgcaccgttgcacctgtaaccttgacgcctttttccaaagcggcctcatgtacttttaacccgtacatacccttgccgcaaaaggatggtataagggatgggtggacatttaaaattctgtcccgatattttgcggtaaaatcaccgcttaatatacttaaaaatcctgcaagaataatcaggtcaatatcatactctctcaagtttctttccagctgtgcctcaaatgcctcgcttgtgccggccgcctttttgtttaccacaaccgacggtatgccggccttggcggctctttccaaagcataagcccccgcttgtgaggacaccaccagctttatttttccgcttttaagaactccgtttttttcgctgtctataagagcctgtaaatttgtaccgcccccggacacgaaaaccgcaatattgacctgtttcattcctgtatttccttatataaatttaattttttcttctccggttactattttacctattatatatgggttttcaccggcggctttcaatgtatcaatagccctttgggctgttttttcacttgcgataaccgccatacccacacccatattgaatgtgttgaacatatctctttccggaatgttgcccctctgccgaataagtgtgaaaatcggcggaatttttatccgcttcttatcaatttccgcacatagaccatcgggaattgaacggggtatattttcgtagaagccgccccctgttatgtggcttatgccgtggatttcggcatttttaatcgcctgcaaaacaggttttacataaatttttgtaggggttaaaagttcgtcgcccagggttttgccaaggctttcctcataaaccgtcaaatcggccttttccacatcaaaaacctttcttaccaaagagtagccgtttgagtgaatacccgatgatggcagtgcgataataacatctcccgcctgcattttgttgttgtctatgattttttctctgtcaacaatacctacggtaaagcctgcaaggtcgtagtcctccggttccattgtgccggggtgctcggctgtttcgccgcctataagcgcacagcctgcctgaacacagccctcggcaacgccgcttacaaggcttgcaaccttttcagggtcatttttgccgattgcgatatagtcaaggaagaatatcggctttgcgccgctgcaaataatgtcgtttacacacatggcaacgcagtcgatacccaccgtatcgctcttgcccaaaagctgtgccacacgctgttttgtgcctacgccgtcagtgccggaaaccagcacaggctctttcatttcttcgtcggcaaggctgaacataccgccaaaaccgccgatatcagacataacccccgggataaccgtacgggcaatgtgttttttcataagctgaacgcctttatagccggcttcaatatttacgccggcctcggcgtaggattttgaaaaagatttttccatgtcctcttactcttattcctttcctgtccaacagtaagtgcatatttgtgatttgtctattccgattgattccaacaagccctccaaggactgataacccaaagagtcaaaaccgaatttttcgcatattcgtttaagcaggcacttgcctctctggctgttgccgtcggcatattcttcaatgtggttttgtccttcgtcaccttcaagttcctgtataattcgccttgccagcaaatccatttcgccgttgccccttgaaaagttaagatacttacaagggtacatcaaaggcgggcaagcagagcgcatatgcacttccttggcgcctgattcgtacaaaaattccaccgtttctctaagctgagtgcctcttacgattgaatcgtccacaaacagcagctttttgtcttttataagctcgtttacaggtatctgcttcatttttgcaacctggttgcgcacatcttggttttccggcataaatgaacggggccaggtaggtgtgtacttaacaaaaggtcttgcaaagggctttcccgatttattggcatatcctatggcatgtggcacaccggaatccggcatacctgccacatagtccacatccggcaacgtgccgtttttaatctcgtttgcggctaaaatttccccgtcacgatagcgcataatctcaacatttttgccctcgtaattggagttggggtagccgtaatatgtccaaaggaaagcgcagattttcaaattgccgtttgacggtgacaaaacatcaattccgtcctttttgattttaactatttccccggggccaagctcgtaccggtctttgtaacccagcttttggtatgcaaaggtttcaaaggatacgcagtagccgtcattctcggaaaatcccacatgtataggcaatcttcccaccttgtctctggctgcgatgatttcacccttgtcatttaagatgagaatagtcatagagccgtcgattatctcctgtgcgtatttaattccgctgacgaagtcctttttccggttgataatcgaggcaaccagctcggtggcattgattttaccgtcattcataggcaaaaactgatggcctgtttcggtaaaatatttggctataatatcgtcggtgttgtttacgatacccaccgtggatatggaatacatacccaggtgagagcgtataagcaagggctgcgggtcggaatccgatatacagcctatgccgcttgtgccgtgaaaatcctccagctctctttcaaattttgttctgaaaggggtgttttcaatgctgtgaattttctttttaaagccctcctgccggctgtacatcaccataccgccacggcgtgtgcccaggtgagagtgatagtcggtgccgaagaagatatttaaaaccatatcgcggtttgaaaccgccccaaaaaatccacccattattcagcctcaaagaaaagtcttgaaagtgtcatcgggtcaacatattccccgtctttgtaaacacgcatattgcctgatgcgatttcgtcaataagcattacgctgccgtccggagcatagccgtattcaaatttaatatcgtaaaggtcaaggcctctctttttcatctcgtcggaaacaatcttagtaatcttctttgtcatttccttgatatcttcatactgcttgtctgtcataacaccaaggtcaataaggccgtcttttgtaacaagagggtcccctaaccggtcgtttttaaatgtcatttcaacataggaaggaagagctgcgccaagttttacataatccttgtatctgcggtaaaagctgcccactgcacggtcacggcagataacttcaaggcctttgccgaatacctttgccggtaaaacttccatagttgtgtttgccaaatcagcacttacatagtgtgtgcgaatacctgcggcattgattttttcaaagaaataaatactcattctcaggtttacatcacctacgccgtcaatagtaagacccacggaattttcgcccgggtcaaacacgccgtctttacctgtgcaatcatctttaaatttaagaagatagttgccgttctccaaagcaaatacattttttgtcttacctgtgtaaataagttccattttttaatttcctcccaaaaatgttgaaataaataagggtttatatctgaaaattcaagtgcttatcacttaaatctttcattcaattctctgtctgcctgcaaaacggcttccttgtcacgctgtctttgagcgtccaatttgtctgcaagctccttgtctgtaactgccataatctgaacagccaaaagtgcggcattttttgccccgtccacagcaactgtggcaacaggtattccgcttggcatctgcacggtgcttaaaagagcgtccatgccgtcaaagtttgcgcttttgcatggaataccgattacaggcaaagttgtgtttgcccgcaaagcacctgcaaggtgtgccgccataccccgtgcggctattaaacaagaaaatccgccactgcgtgcagatgacgcaaattcccttgcttcatccggacaacggtgggcggatagaactctaacctctgtttcaattccatactctttaagcacacttatagctttttctactgtgggcaagtcgcttttactgcccataacgatcccgacttttctcattgcgaacctcctaaaaaataaaaagagcgcagtaaccccgttaaaaattaacagctttactgtgcccagacggtcgacaaaatttaggttaaacctaaaacaaaacttcttgctcccatgcagttgcctgctaatccgtcagttgcaaaaagctgtattcaatttcgattacaaggccattataacacggagattttacctcgtcaatcgtcaaaaattattttgttacattgcaataacaaaaatcacaaacaagtcgaattgttgtgaataattcataatttattgataaaaaggagttttttgatagataatagcctgtggggttatataatatacaggggcaaaccgcttaaaacccccagcagaaagcctgccagcacatcggagggataatggaccccgccaattacccttacagcagccaaaatcaaggcaaaaacaagaaaaacaatcccaagtgcaggcataacatacaaaaatgtcattgctattacggttatggaatatatatgtcttgatggcatactctgcccttttgtgtccttttttataatcgggtttatgttaaatttttcataggggcggctgcggttaagagctttgcggaaaaccgtaaccataataaaacctgccgccggaaccgcaacaatctttaaaagcctctcgtcaccctttacaaaaagatatgccgccattgccggataggcaaaatatgtaataagggtcagcaatttgttgacaaatttgatttccctttccctgtgggaatatttctcccttattttgttgtaaaacacatcgtagttttcttctgttctcattttctttttctcttacttgccgtggcaaatctgttttatctctctcattcataatttacacaataaacagccgatacataataaaaaggcttgcgtacataataaccaccatcgaaaaaagaagaattccgtctttttttcggcttattttgccgatttccgcctttctgtcctccgggaaaagcactctttccgccaaaatacccaaaagacgaattaaaccgaacataaaacctgccgtgacggtgcaaatcaccagagccctctctccgtaaaccgaaaaatccgtacaggtgaatattacaaatgccgccgacaaaaaacctgtcaaaaacattccgtaccctgccattgccaaaaggtttttctgtctttttgcccggctttcaagggtagcatattgcggatttttttctttttcttccattgttactcccagtcgtcctcctctttcttaaagctcaaaaagtaggcggtaaaaggtatcagtcgcttagcaagagaatactctctcaacttgtccagagtgtcaccgtttataatataattttcataccggcgcaggctgtccatatcgtttatgtccataagggctttgccgattttttctccatagcttacaagataatctttgtaaagatttttatattgccggctgcaacctaatttaaaggccatatttatgccccttaaatttttaacatactctgacacatgggaacaataccgccgatgaatattttttaccagtttatcaatattttctctctgttcgtcggttctcagtacaatttctttcaatttatcacaatctgtaaatgcagatttgtccatgccggacaggtgacaaaggaatgtgaccttttcaagatttatacagcctttaataatgccgtcgccgactttttccacgctctccgggaatgtgatttctctcagtgaaatacaactttcaaaacacattttacctatggtctttacgccgttttctatcgtcacgctgtgcaataagtcgcagccgtcaaaagcatggtcgcctacatcttccgctgttcccggaataatcactttgtcaagatttttgcaaccgccgaaagcgtttgcctttatatgctttacattggccgggatatggaaaaatcttagatttttgcacaggaaaaacgcaccctctcctatggtttcaacatcttccggcaagctccgttttaacagagaagtacaagaattaaaacagtgagcatctatttctttaacggcggcgggaatgtcaatttctgtcagtgcggcacagccgttgaacatatcccgtggcagttgtttcaacgatgcggacaaaacacacctttccaaggaggtacatcttataaatgtctccggcagaatttcttgtacactgtcggggataacaatttctttcaatttgcaacaggcaacaaaagcacacataccgatttttgttaccccgttgccgattttaattttctccaaatttgaacagcctttaaaagcactgtttcctataaatgccgccttatcgggtatatcaatttcctttaaatttaaacattcttcaaaagcactgttgcctatccctgttacaccggttgggatatttatattttcaagagccgaacatttaaaaaaagcatggtcggcgatttttattacactgtccggcaaaattatgttttttacataataggaatactgaaaagccttagagccgatttcaacaacaccatccggcaccgaaacagtagtcttgttgccagtgtagcgaatcataacgccattttcaatttcaaaatgctctttatcatcctcggaggaaaatatccgtttgttttcgtccggaaaatccaccggcacataatcctctatggtataatacataaccataaaatccacctcttaacgcttatttacaatataattataacacataatttgcactaattaaagtactgcaagccatcaaatttttataaatatcaactaaaaagtccccgcaaaaatgcggggacaattttatttaattgtatcggtttatgtctatatctgtataaattacaggatgtattctttaagacgacgagccatttcagcagctgcctctgtaggaatagccatgttcatacggattgagtttggtgcgtggaacggacgaccatcctgccagataacgccgtatttaacacccttcttctgaagttcgtcaattgtcatacccttgtcttcaaggtatttatcgaactgagcgtagatcatgaatgtgccttccggtttagcaacttcgatacccgggattgacttcaatgtgttgtaaatcaagtcagagttctctgtgatagcttcctggaatgattttacccattcatatccgtcttcacctgagtatgcaccgatcatagcgtgcatccaaagaacgttcattgagttgtagtgagtaaggcttgcttccttattccatctgtctctccagtacttgttgtagatgataccgtaagaacctacgaaaccagcaaggttgaatgtctttgaaggagcatagaatgaaatagtattgttctttgcccattcgtttgtaagttcaggtgagtggtgtttgtaaccgatgtggatacagtcagcccaaatctggtcagcgataactttaacatcgtatttttcaaaaatagcgtatgctttttcaagttcttcaactgtccatacacggccacatgggttatgaggagtacagaaaactgttacgtgaaggttgttttcaacaatcttcttttccatatctgcatagtccattctccaaacgccgttttcgtccttcttgagccatgagtgaacaatatcaaagccctggttcttcaagcagtttgtgaaaccgatgtatgtaggagcgtggagcaataccttagcgcctttttctgcaaatacgttcatagctgagagaacgccgcccagcaagccgttagcataaacgatatcttccttagtaacgtctgcgccgtagttgttcttctgccatctgatgataccttcatagtattcatctctcggtgcaaagtaaccgaatgcagggtggtctgctctctttttaatccggtctgtgatagccgggcaagttttgaatgactggtcggcaacccatgtaggaatgatataatctttccattcagggtctacttctgcgcccggaatcggaataacgtcaactgctctggcgtccataccgtgtctttcgttaataaaacttgcgtgctggaaaaggtcataaaatttgagattcttgtccataataaaaaatttctcctttttaaattgtttaaatgtttttaaacataacgattacagagttattaactctttgtggctttattataccagcctgatgtaacttttgtaaatggttgaaaatacagaaaaaacaatcattaaattgtgcaaaacaacaaatattgtggttttgtgtaagaattttacatatatattgttgaataaatatatttttacctgtttaaatataaaaatgagtatttttcgtctttttgtgaaaatattgccgaaacaatttgtgtaaaacagcgaaaatatgtattattgttgaaaagcccggttaattagattataataatcacaaataaatgtattttaggagtaaacaatggacgaaaatatagttaattttataggcggctatgccaccgcaattaaagaagaaataataaaagtttccccccatgttgtaatcggcgaaaatattttaaatgatattttggcgattatttatgttttgggggactatgccaatatgaacaacgccgacggaagaaaaaaatttgaggacacggcgaaaaaactgctccaaagcaccatggatgaggaatctttccaatacgaagccgacagaataggtttttacggctctgttttaaacaaacaaattgccgtaaggggggattcgttccaggtttcctttaaaaagaaagaacttgaagacccgatttacagattggttgttgcattttgcgactgcatctacaatttgaactgcctgtactattacccggaggcacctgaacttaaaagagaacagcgtgttgacaacaaagaaggcagtgcgattttaaagggcttaaacagattatttacattggcatacaatgacgccaaaactctttgattttctgtggcggacaaaatttaaaatttgaataaaaaagtaatatccgaaaaatgttgcgccttttggggtttgcaaaatttttcggatatttgttttatctatcttttatcagccctgtactttttctgtccaggcttttatttcctcatcggaaactctgttcagcattttttcgcctacaaattcggccttaggtgcggaaacttttaatttttctgcggttttgcccatattgctgccgccggatgtggcaaataaggcaattttcttgccggcaaaatcgtagctttccaaaaatgtatttataattgtcggcgcaatgtaccaccaaatcggaaaaccgacataaactgtgtcatagtccgccaagttttcaaggtctttcacaatagccggccttattgattggtcagtcatttctattgtacttctggaatttttgtctttccagtcaagatcccgatttgtgtaaggtgtgcacggtttaatttcgtaaagatcgccacctgcaatttttgcaaatctttctgcgacatttgcggtaacaccgcttgcgctgaaatatgctaccaaaatttttgacataaaaatcacaactcctttttatttatcgtatatacctcaaaatcgccttaattgctctgtcgaaattggcaaagcagtggcaatttatttaattactttaatttattataatcttcgtcacttacaggttcaagccattcgtttgattgtccctcgcctgcaacttcaaccgcaaggtgtgagaaccaagaatttggtgcggctccatgccagtgcttaacgccggtaggaatgttgatgcaatcgccgggcttcatttcaaccgccggtttgccccattcctgataatagcctctgccggctacacaaattaaaatctgtccgccgtctttttcggcattatgcacatgccagttgtttctgcaaccgggttcaaatgtcacatttgaaatatgaacctgctctctcgaaacaggcgcaagatagcttttacctacaaaatattttgcataggccgtgttaggctcaccgattgggaaaatcatctctgcccggtgttttgccttagcgtcgattgccttatctgcctcgtcgctaacctgccatatatccttggccattctgaaaacagcccaagctttcggccaacctgcatagaaagccgcatgtgtgataatacctgctatttctttctgtgtcacgccgttgttttttgcattctgcaaatggtgcatgagagatgtatccgtaatacccattgacataagtgcaacaacagttacaatggatcttgtttttacatcaatactgctgttgttccagttctcgccaaagagaacatcgtcattaaaatgagcaaattccggtgcaaattcacccaaagcatctctgcctgctgtctgtataattttagccatgatagtttcttcctttctaatctttcaaaattctcactgcccgattgtaaataatctcgtaagccgttatctccctgtgggtaccacctgcccgagccacggcttttttctttttttctgtagttgcggaataggggtaaacaccgaaaataaggggtaaaagcgagtaaaggcaatcgtcgatttcccggggcgtaaaattcgacttaaactttgtcaaaaatttttttaaaagagttacccggcgaacataagattttttaaaatccacaagctgttcaaaacttgtattttcctctaagtcatagcagttcattgacaaaatttttaaaagcaacggccttgcggccagtgtttcggcaataattgccgctgtcttttctgtggttaaattggcatatttttcattattttccaaaaaccgatctcccaaaaggtcatattctcttttcaaaagagctaaaaaaatttcctcttttgttgaaaaataattgtaaatagaagatcttccgcaggtgatttccccgcttacatcttttagggttatctctttaaaacttttttcgctgtacaatttttcacaggcgtttaaaatttcttccctgcgggcgttcgccctttccgctgaatatgacggcattatttactcctttttatttattttcgggcaaaaatacacagtgtgtcaagcctattacaagccgaaacagtgtgaattttccattccggcacggcgtattctgacactgtgtcactttctgtttttattatattcctgtactgacactgtgtcaatatgttttttaaaatttttacatactggacaatttgtctaaatatgttataataaaaccaaaaacaccctcacataggaggcttatatgtttaacagaaaagacgatttaacaaaggaacttgaacaatattacgccgacagagaggatcattcttctcattcggttttgcaggaaattcaggaggcagaaagctacaaaaaccgcagttacagccgcaactacgatatttccccgaaaaatagcggcaaaggcaagtcggtagcggtaacggctttggtggtgtctgttatcgtgataattgccacatttgcgatagtgat

SEQ ID NO: 4011 - DNA, 4929 bp, Unknown
  16S sequences of unknown bacteria
tgctggccagcagcttcagctgggcgatggggaactgccgttcctccagcaccttcatcatttcccggccgaccgcgccggtcgcgcccaggatggctacattatatcgtttcactcttgttctcctttccgacaaacccttcatagatcacagagatcgtcttttcaaaatccttgttttccacgccgacgatgatgttgatctcatcgctgccttgcgcgatcatgcgaatgttgatgccgctgctgcccagcgccgcaaacagccttccgctgatgccgggacgagagctcatgttgcggcccacggtggagatcagggcgatctcatcgatgacgcggatattgtccggatgtacttcccggcggatgtcattgatgatgtcatagatgatgtctttgacatcgcggctggcgacgacgatactgaaggtgtcgatgccgctggggatgtgttcgacggacactcggtaacgctcgaagacagaaagcgtcttgcgcacgatgcccacttcatcggacatgtgattcttatacagcgcgatggcggtaaaatctttcttgccggcgatgccggtgatgatatcgctgtcttcatcctctgcctgcagctcgttcacgatgatcgtgcccggggaatccggctgattggtattcaggatgttgatggggatgttcgcctcccgcaccgggaagatggcttcctcatgcaggacgctggcgcccatgtaagacagctcgcgcagctcgctgtaagtgatcgtgcggatgcgcttgggattgcgcacgatgcgcggatccgccatcaggaagccggatacatcggtccagttttcatacatgtccgcatgcaggcatttggcgaggatgctgccggtgacgtcgcttccgcctctggtcatgatgcggatcctgccatccggcgtgctgccgtaaaagcccgggatgacaaagggctgattgttgcgggccagccgctgcaggcttttttcgcagaactcaaaatcaaaggtgccgtcataacggaaacggatgacgtctttggcatcgatgaacgcatacccgaggtattcggccatgagccgggccgtcaggtattcgccgcggctgacgagctcatcgagcgtgatcgatgtcttcatctggttccagatggcgtccagctcccgttcgatcgggcagcgcagcccgagctcatcccggatccgcacatagcgtgccttgatcatgtcgaataccggggagcagtccacatgatattccatgtgcgcatggcacaggtagagcaggtcggtcactttgttgtcggtcttggacgcgcgccccaccgcgctgacgacgacgaagcggcgcgaggggtcgctttctataatatgtttgactttgcgaaactgtgcggcatttgccacagaagatccgccgaatttggtgatcttgatcatggcgcgccctcttacagcagccgcacgaggaaggcgtcgggatcctcctgcagcgtcaggcggtactgctcatgcatctgcacaggatccatatcgtggaattcgccgatctccccgtttgcacgcaggatatagtctccgcgaagcagcgaaggatcgaactgcttttcgctcatcgctggaacatcgaaaggttcctggcggcagatggcgatcagatcgctcacgatggcattgcccgtgggcaggctgccagcgccccggccatagaatttcagctcgccgatcgtatcgccgatgagcgtggtcaggttgaagttgtccggcacgttggcctcgagagaatggacggacagcgccatcggttctacgacgcagcagtagcggtcgtcctgcgcggtggaaagcatcatcaggcggatgctctgtccccgttcgcggaaccagtccagatcgctcttcttcaggttgcggatgccgctcatcgggaagtcgcggcggcagtaggtctcaaaggccagcgaggaagagatgactgccttgttggccgtatcgatgccgtcgatgtcggcgctggggtcagcttcggcatagccggcttcctgggctgctttcagcgtgacgtcaaaatccaggtccttcttcatcatctggtccaggatatagttgctcgtgccgttgaagatgccgctgatgcgggagatcggatcgatgcgcttggcctgcatcagcccgtggatccatgggatgcctccgccgcagctcgcctcaaagcggaactgcacatcgttttcgcgcgcggtctcgatgaactcttccatatgcgccgccacgaccgccttgttggccgtcacgacgttgcggccggagcgcagcgcctttaagatataggtatgcgcaggttcgatcccgccgatgacttccaccacggtcgtgcacgcgggatccttcaggatctcttcatagtcataggtcatgatgtccatcgtcttttcatcatgtccttcatagatcaggatgtgagatacctcgatcgcagcggtatcgctgctcgctttacggcggatgatctcatagacaccctttccgacagttccaaatccaagtaacgcaatgttcatatcgttctaaccctccatcaataaaaacggtgtttttgaataaaaaacacttgtttttaaattgcgtacattgtatcataggtgataacaaattgcaatgacaaaaacggaaggagaatcgagatggaaaacagatattatcacagcacgagaggaaacgggaagctctcgccgaaagaggctgtcctgcggggcatcgccgatgatggaggactttatgtctgggacgggctggaggatgtccgactggatctggacgccctgctgaagctggattatcaggagatggcgaagcggctgttcgcggaagtgctctgggattacagcgaggaagagctggcgcgctgcgtggatcttgcctatacgggcaagtttgacagcgagcagatcacgccgctggtcatggcaggggatctgccggtgctggagctgtttcacgggccgaccagcgccttcaaggacgtggcgctgtgcatgcttccgcagctcatgtccacggcgctgaacgggcgcaaggaaaaggtcatgatcgtgaccgcgacgagcggcgacaccggaaaggcggcgctcagcggctttcaggacgcggagaacatcggcatcacggtcttttatccgtatggcaaggtcagcgacatccagcgtctgcagatggtgtgccagcagggagaaaatgtgcgggtatgcgcgatcagaggaaacttcgatgatgcgcagtccggggtgaagcggctgtttcacagcgcgcaggccaaggctgcgctcgatgaggatcacatcgtgctctccagcgccaactccatcaacatcggccgtctggtgccgcagatcgtctattactttgcggcgtatcgccagctgctggaagcaggcgcggtccagatgggagaagaagtgaacttctgcgtgccgacgggcaacttcggcaatgtgctcgccgggtattatgcgaagctcatgggcctgccggtgcaccggctgatcgtggccgccaacgagaacaatgtgctcgaggatttcctgaacaccggcgtctatgaccgcaaccgccctttccatcagacgatctctccaagcatggatatcctgatctcttctaatctggagcgcatgctgtattatctcagcggaaaggacagcgtgaaggtcgctggctggatgaaggatctggctgaacagggacgttacgaagtagatgcgcagacgaaggagaagatcgcttcgctcttcctcagcgcgtcttgtgacaatgcgcagacatcggcgcagatccgttccgtatatgcgcgctgcggctatgtgatggatccgcatacggcggtgggcgcccatgtgctggaacagatgaaggaacggctggacggcaaggtcacggtgctgctctctaccgcttctccgtataagtttacccgcgatgtgctcaaggcgctgggcgaagcgcaggaaggtctggatgactttgcctgcatgcggaagctggagcagctcagcaaacagcagatcccggctgggctgtatgcgctcaaggatatgccggagcgctttgcggatgtgatctcctgcgaggagatggaggagtatgtcatcgcgggcgccagggagatcctgaaatgatccgggtcaaggtgccggcgacgagcgccaacctgggcgtcgggttcgactgcatgggtctggcgctggattggcagggtgtcttcacgttttgctttgacgggcctgaattcatgatcagcggctgtccgaaggcatatcaaaacaaggacaacctggtctatcacgcgtttgcgcgcacgctgatgacgctgggcaaacgcgtgcctgtcgtgcagatccacatcgatacgccgatcccggtggcgcgggggctgggcagcagcgcatcctgcatcgtggccggggtgctgggggccgtggcgtacagcgggcagaagcttccgctgcaggagctgctgcgtctggccacgctgctcgaacatcatcccgacaacgtggctccggcgctgtatggcagcctgtgcgcatcgttcatggaaaacggcctgccatataccgcacagtttgctgtccatgagaaattccgcttcgtgaccatcatcccggattatgaagtgcgcacggaggatgcccgccgtatcctgccttcggacatgagctatgcggacgccatctatcagatgggacgctgcgctacattgggcaaggcgctggagagcggagatgaggaaatggtccgccatgcctgcatcgatcggatgcaggagccttaccgcagccggctcatcccggaatatgatgaggtgaagcggctgtgcatggatctgggtgcgctcgctttcgtgatcagcggcagcggctccaccatg

SEQ ID NO: 4012 - DNA, 32759 bp, Unknown
  16S sequences of unknown bacteria
cgaatcctgcctccgccgtcatctcatcgatcttcagaatcaggaccggcagatacaccgcatcccgaatcatctccatcgtaaaggagtccgttccacaggaaaaagacgacagacacacgacgccgtcgatcatgttctgctgctgcaaatacagcgccgcaccgtacaatgccgtaaaattatgccagaacggtttttttatcagatcctttatgaattcttctttatacacgcgatccacagcgccttctgtaacaatcccgatgttccggcgattcagcttttttatcagactcatattgacaaaggaatcccggatgttgtaggtatgcccggcaagaaaaattctgtgcgggaactccgtctgacacagatccgcatctctgtccctccaggcatcgagtcccgcctgaaacgcccgcaggatgtccttccgcttcatccccagctgacggcagggccggtacagggaccgaagcagtgcatctttattcttcatatcgatgcgatcagtaaaaatcagatcctcaccgccgatgagctccggcagcccgttgagtttcggacacagcgattctccgtattcgcaggacataatcctgggtacgacaatacgatcgcatttttctctcagtgattccacatgtccggcatagacttttaccggcaggcaggcgtcgtcgatgcaggctgccgttccccggtctaaaatatcgcggtccgtctcttctgagatgataatttccgccggaagttccgacagaaaagcttccataaaaggcccgtaagaatgatacagcaatcctctgggcaatccgattttcataataaaaaaacccccttcaatgtcactcatttttgacatgaaaggggtttttcattcagattaatttaaaatcagagcagaactctgacaatcccgcccgatcagagcgcatgacgatctccgcacagtgcggagacacactgcttgtctgtcctcagaaaagacagacaacggcactatgttatgatctcatacatggacgacgccagatctttgttcgtgtgctcggagagaagaagcacccgcgctttgatctctccgttgccgaagcggatcagaatgacatctccgacctttacgtcagatccggccttcgccggtttatcatttatgaagacacgatcctgatcgcaggcgtcttttgccagtgtcctccgcttgatgagccgggaattttttaaaaatttgtcgattctcattgattccttatttgtttacagaatccttcagcgccttacctgccttaaatacaggagcttttgatgctgcgatctcgatggtttcgccaggctttctcggatttctgccctgtctcgcctttctttctctcgtttcaaatgtaccgaatccgatcagctgcaccttttctccctgtacgagagcttcctctacgcatgctgtaaacgcgttgactgcagcctcggaatctttcttcgtaaatcctgtcttttccgatacacttgcgattaattctgccttattcattacctaacctccttgtctttttcctttcctttgaaaaccacactttttcttccgaaagcatatgagtttctgcagacgaaaaataacaaaatatcgcttcccatgatgaaagcaattttacttattccgctgaatcagatccggcgggtcagtatgcgtacccgtatcccgctgataattttaaaaaccacttttgtctccaaaaactcacagttatttttacacgataactctcatttgtcaatgttttcatcctccctgcccgggattcagctattttcttccgtccagacgcagcatcgcaacgatttttgcccccttcggcagcattttgatctcgtccggcgtgattcccttaaaccgaagaatacagaaaccgtagacgaccacgccgcagaacacagaaaccatcgtcgccacagtattgcctgtgagaagagacagaccgctgtagatcgcccatacaatcgctcccatgatagctgcgctgagcatcggccggccgaaagtcagagaaaaattcggtctgcttcccgtatatttccgcacagcgcggtagttgagcagagctgcggtaatgtaagccgcggccgttcccgctgccgctcccttgacgttgacagaggggattccggtcagcacgtatgtgatgataacctttatccccgcgccgatcgccagatttatcaccggaatcagctgcctctttacgccctgaaggatgccggtgagagtctgaaccagagacaggaaaatagctccaaaagccaggatgaagaggctttcggccgcattaaccgcgcttgcctgctgcgccggatacagcagcagcatgataggcttcgacagcaccataagtccgacggaacacggcatgccgataatcatcgccgtgcggattccgaaggctgtattataccgaagaaattcctgatccttcgcgctgaaggccgacgccaccgccggcaccaagctcatagcgatggcctgagtcaacacctgaggcagattgatcagcggagtggcaaaacctgaaagctgaccgtagagactattagcttccgcactggaataaccgctctgtaccagtcttctcacgacgatagccagatcgatattcgtcataatcggcatgatcgccgcacctatggtaaccggtacagcgatgacaacgatcttccagagaatactctttgcagcttccgactctccgtctggagaattcctgcagttctcccggatcacactccgcctccgcatatagatggcgaagataccgataagcccgaagaatccgccggcagcggctcctgccgatgctcccgccgctgcgaacttcaagcctgcgggaagaagtatcaccgccatagacagcccgaagacaacacggaacgcctgctcgatcacctgagaagacgctgtcggcgtcatatcctgctgtccctgaaagtacccgcgaaaagccgccatgatcgggacaaataaaagtgcgggagcaatcgaacgcatagaataaatcgcttccggctcgcctttcatatactgcacgatatatggagctcccaagaacagaagcagactggtcacaatccccatcgcgagaagaagccggaaagataccgtaaaaatacgatatgcctctttatggtttccttctgtcgtacgctccgataccagccgcgcgatagcggtaggaatccctgcggtagacaacgtcagcagcaggacatagacgggataagcagtctgataataccccatacccgtgtcgccgatgatatttgccagcggaattcggaaaaatgcgccgaatactttgacgatgattccggcgattcccagaatcaccgcacctttaaaaaatgatttctttgccatatttcatacctatccggatctctctttaaagctgacgaagaatatctctgcaggctctctctgtctctgccgccgccttctccacatcgatcgtgaaaaaatcgccgtcgcggtacaatactctgccgtctgccatggttaagaccacatcgctgccggaagcagaatatacgatattgttcgccagattatggaccggccgcatatgcggctgaccgatatcgagaaccgtaagatcggcttttctgcctaccgcgagaacgccgcagtcttctcttccctgagaaagggctcccgctctcgctgccgccctcagcgtctctttcggagtaatcagcgtcggatcatttctcctctccttgttgagcagtgcgaagaacttcatctcttcgataaaattcagactgttgttgctggccacgctgtccgtgccgacagcgacattgacgcctttcttcatcaaagccggcacattgcacacgccgctggccagtttcagattgctgacagggcaggtagccactgtcactcctttttccgaaaaaatttcgatatcctcttcctccgcccagacacagtgagctgcagtcgtccgcgtgtcgaaagctcccagatcacacagcagctgcgccggagttctgcccccatgacgagctttacactcttcgtgctcctgctttgtctcagagacatgcacatgcatgttgacaccgtatttcttcgccagatcagccacctcggttatactcgtcacggtattcgtgtattcggcgtgaatacttgcatctatgaggattctgccctccgctgcgccgtgataatcgcggatcagcgcctccgcctccctgtagctgtcattattctttaccgaaccctctgcaaaagaggtaatgcttcgggaaatattagcttttgctccgctctcttctacagcgcgcaccatatcgtcgcagaaataatacatatcgctggaagaaacgatcccgaagcgcagggattctgccatcgccaaaagagtagcataatataccgcctctgatgtcagcttgtcctcaaaaggaaaaattctcgtattgagccagtcctgaagagtaagattttctccgtaccctctcatcagcatcatgggactgtgcgcatgggcgttaaaaaacgccggcatcaaaagtttattctttccatcatacacttctccgaaatccgtttccggcgtctcagttccgatatacgcgatcttatctttttccgtaccgacgtatctgttttctttgatctcataattctcatcgagaattgcaatatttttaaataacataatttttccgctccttttcacgtaattttaccacacatgacttaaattgcaagaaaagcggttcaatacgcatagattccatgaaacggtaaataatatcaccacagacatatcactttaattttgcttatacaggaggaaatatactatgaaagcaacgggaatcgtcagacgaatcgatgatttgggcagggttgtcatcccgaaggaaatccgccgcaccctgcgcctcagggacggagatcccatggaaatttttacggacagagaagggacagtcattttaaagaagtactctcccatcggagatatggctgattttgcagaagaattcgcggaatcagccggcaaaattctcggaaacaccgcggtgatcaccgacagagatcaggtcatcgccgtctccggcagctccgtccgggatctgctggaaaaacagatcagtgaccgtcttgcggatcttctcgaagagaaaaacagtattctgatcacagacagcagcaacgcctgctatatcacgaatgacgaccggcattccgacagctatcgttctcaggtagtcgtaccgatcgtatcccaaggggatctcatcggttcgatcatattagtatccacagacggcataatgggcgataccgaactgaagacggcggaagtaggcgccgctttcatcgcgaaacagatggagctcaattagaagcatcggaacagcttctcatatactccacagcgaatcgtccgcacagcgagagtcatgttattttgccggcacaaaaaatctgcagaatataaaaagaatcgaaaaagaagcgcttctcagacaaagcgcttcttcttattttttgaatcaacttacgccagtattctcctgttgcgctcctgcagtctccttttttcctcccattgatcacgctaaatgaagatctgcttttccccgatgcagagacggctcagtgacgtctccaggtgcggggcatcagcagtataatcagagggaagatctccaaacgtccggcgatcatatcaaaacacattaccagtttcgacagagacgaaaaaatggaaaaattcccggaagatcccactccctgaaatccgattccgatattattcatggtcgccgccacagcagagccggtagtggtaatactctggccgtcaagcgacacgagtatgacagagacgatcataatgagaatataaatcgtcacgaaagcattgacatcggcaatcgtctccgattcgattctctttccatccatcttgatacttttgatgcttctcggactgaccagacggcgcagattagcgtaagacgcttttatcagaataatcacgcgggaaattttcatacttccgcaggtggaaccggcgcaggcgccgatgatcatcagcagcgtcagtatgaccttgggatagagaggccacacatcaaaatccgtaagcgcgaatcccgtagacgtcataaacgcgcccacggtaaacgctgtattgacgacacagtcctttatattatcgtaatactccctcacaaagaaacctatcgtcagtatcgaaatgaaaatcagcagaaaatagacctttatttcactttttttcagaatctcttttggttttcccgccaggagcagaaaatagacgttgaaattcaaaccgaaaagaaacataaagaccgtcactacgatattgataaaatcactgttatagaccccgatcccctcgttatatacgccgaatcccccggtagcagcagtagacatcgcatagttcagactgtcaaacagcgtcattccgcccagcttcaggagaaccgcctccagcgcagtcagaccaatatagataagataaagaatcgacgccgaggtctgcactttcggcataattttcgagacggaaggaccggaactctccgcacgcagcagatgtaccgtgttcccgcctttcagaggcagaatcgccagcataaagacgagaacccccatccctccgatccagtgcatcaggctgcgccagaaaagaacacaccggctgagtttttccacatccggcacaaccgtggcgccggtagtcgtaaagccggaaacactctcaaacagcgcatctgcaatccccggaatttcaccggtgagcagaaaaggtaccgcccctgtcagactcatgataatccacgacagccctacgatgacgaatccctctctggctctgagccgatcgggatttgaattcagatgagtcagcagcataccggtaaaaaaagtccccgccgctgtcacagcaaaagcaaaccccgccgtctcacggtaaaggacggcgaccagcaccggaagcagcagaaaaagactttcgatgatgagaatattgcctaaattatgaaatacagtacgataattcatagattcgttacctcaggatatcttccagcgcattcagccctttgatcgtcgtaacgacgatcaccgtatctcctggctgtatcacatcggatccgcctggaatgataatcctgccgccccgattgatcgttccgaccaatacattttctttcagttccatatccatcagcggaatatcgatgagcggcgaatttcgatttacataaaactccagagcttccgctttgtcatcgatgatcctgcagagcgtctcgacgtttgatccgtaggaattctgcatcgcccggacgtaacgtatgatatgttccgcggcgatgagcaccggaaaaaaaacactccccgcattgagctgtgcgataactttcgtaaaaggaattctcgtcacctttgtgatgcgcttcgctttcgacatgcttcccacatagagactcatcatgatattttcttcatcgaaaccggtcagagatgcgaaggaatccgcactttccacaccgatctcgatcagaacctgctgatcggtaccgtccccgtgaatgatgtccgcttcaggaagcagttcggctaactgatggcagcggttcaaatcgtgttctaccagtgtcacgtccacatcggattcgatcatctgcttcgccagatagtaaccgattcttccgcctccgacgatgataatattatgaattttatcctccatcatccctatctgggaaagaaacctgggaatatgcgaggtatcgcctacgatactcacatgatctccggccctcagctgaaaatcgcccgacggaatataaatttcgctgtcgtttcgttccaccgcgcagaccagaatccgttttttaaacctggaaacatcgcgcagcttcatgcctgccagaggagaatcttccgtaatttcaaactgcaggatttccactctgcccttagcaaaggtgtccaccgtaatcatcgacggaaatttcaggactcgcgacatctccacagcgcatgccagttccggattgatggacagactgagtccgagatcctgctttaccagagacatgacatcgatatattcgggattccgcacccgggcaatggtattgcgcgcgcctacacgtttggcgataaggcaggccagcagattcagctcgtcctccgccgtagcggcgatcaccagatcagcatcatccacccccgcctcccggagaaccggaatcgtcgctccgtttccatgaatccccaagatatccaggcgatttacgacatactgaagcttcgacgcgttttcatccaccatggtgatatcgtggtcttcctgtatcagctgctctgccagggtccttcccagctttccgctgccgataatgacaatcttcattcaaatttcctctttcgtttcacgcttccttttcctgagcattccccgctccggcagaatttcattcctgtcctctgatttccagaagcttttttttcagctcgtcttcgattttaaccagttcggcttcagccgcccgcctcttgtcggcgccttccgcctgaattttccgcacttcgtccagcgtctcgatcagcgaccggtttgtcgcctgcagtgtttcgatatctatgatcccccgttcggattccttcgccgtctcgatagtgctcattttgagcttttctgcgtttttacgtagcagttcatttgtcgcatcgctcaccgcgcgctgtgcctgcatcgcctgttcggagtgggcgagaccgagggcgagcaccatctggctcttccagagcggaatagtattgaccagagtcgtctgaatccgctctgccatcgtggtgttattattctgcaccagacggatctgcggcgccatctgcatggaaacagtacgggtcagctccagatcgtaaattttcttctcaaaccgattgcacgcctccgcataatccttcgccttctgcgtgtcctccggaagcccggaaacttgcgctctggacaccaaagcgggcagctcaccgcttctcgcttcctccagcttctgctttcctgcggcgatatacatggaaagctgacgaaagtgtcccagattcatctgatacatctgatccagcatcgccacgtctttcgtcagaataatctgatgatcttccagcatctgcgcgatcttatccacattgacttccgctttgtcataccgggttttcagcatctcaattttattttttgattttttaaaaaaaccgagaaatcccttcggttcttcgtccgcgtcaaaactcttcagctcgatcacgagatctccgatcatatcgcccacttctcccagatcttttgtccggactttacccagagccatctcggaaaaggacgcgatcttctgctgagcgtccacgccataacggagaatctgattggtgttagtaatatcgatctttttcttgaattcctcgatcgctttctgctcctccggcgtaaaccgcatctcgacgacgggctccgctgtctttttcgccggctctgccgccggcagttcttcggaaacggggtccagcgtaagcgccggaatctcctccggatgatacgcctccagatcccctgtaaaatctatatcgttcgtattcttaaaatcgctcatatccctgacctccaaattcagcggctctgcacggcgcgcctctcgccgcaatttatctgattttaatattttatcataacccatacatctcataaagagaaacatccacaccgccgctgtcacatatcgtccgccgcatgcatatgataaatcggaaagtacagagaggagatgacgcatgccttatgatacccgagagcttcttgcccgtctgttgcagtgcgaggcgggaggcgaaggaataaacggaatgatggctgtggcaacagtaattatgaacagagccaacgctctcacaggagaatttgcccgggtcagcaacggcggagatgtgcggaatatcatactgcagcccagtcagtttacttgcctgctggaattcgtcgacggcgtatataatccgcagaatatctataatatgaatccccaggaagaacatttcgccatcgccgactgggctctccagggcggacgctttccggatataggagaatccctgttcttttacagtcccaaaggcggttcctgccgcaactattttccgacgaatgtcggtgtgatctataaccgtatcggcgaccactgcttttacacgccgacgattttctatcatgaaacgtgagaaaggataaaactatggctgataacgaacgctataccacagtgccgcaatttacagaatcagaggtggctcaatccaccataccggcggacaatatactcagtctcaattctctgggacccagcgccggacaatttcaaaatgacaatcccaatacctgggtcgtccaggtcccgcagaaccgccttctgcctgaaggctacaccgaagtgctcgatgtctataatatccaatacctcaacggatatctcagaacgcagatcggcaactattgctctgtccagctgctcttaggcatcagcggcatcgaaacccgggaaggaatcttagtcggcgtgggagtcaactatatcatcctcaaaataccggatacggaagataccctggtcctggatttctattccatcaaagccatcacagtctacgcataagatccgctgtaaaatatcccgtttcacagaaaaaatcacataaccggccgtaatccgaaaactgcctttatgttatatacatcgtcgtctgtataaacacaattataaatcaaatatataaaaaaatactctcacacgagaagacagggagcggttttttccgctccctgtcttctcttttctccgaatcctgtccgccgttttccactcttaaaatctcagaactgttccgacaaagatcaaaacagacgagagtatggacagacccccgaccgccgccatgacagcggtaaaatacagcggaacctttttcactgtgaaaactgagaacagaatcagagctgctcccaaaagcacgccgataacacatgcgatcgttataactgctgacattgaaaaacatcctttcacgccgcgcgtctgccgtccccctgcggcaggcggccgctgccggtattattcgaggttcagcttgtttttcataaaatagttcgttataaagaataatataacacatttcgccagacaatagagcgccgtaacggtaatgccgatatttaacgcgctgcctgcagccatcgatcccaccaggatattcacactgctgtccatgagagccgatccggaaaccgacatgagaatcacagatatgatctggaaaacgacgctgatagcgatatacgctgcaaaactgcagaccaccttatagcggttctgcgtctgaccgatagacatcgccgcatacagctgcagaaccgaggctacggtagacgccacgaccatcaccagagtcataaagagaatatacgctccgctgacccccatctgagagaaaccgtacttcacgttgttccatgcgtctcccaaaacagagaaagtaatactgctgaagtccaccgccagagtagacaatatgagcactgatacgatgacgaccagtacgcttacgaaactccagactacagctgcgatcagctttgccgtaatatgctgccagctctttaccggcagcatattcatcaggtatccttcgttttgcagcagatttttataaaagcggagtaaaatcacgatgaaggtgatgacgactaccgcgcagagaaacatcgcgtagagaaatacgatcaacgcgctgataatccctacgaaaggaaaggcgctgccgcccataccgtcattgaaattattcagccctaaaataaggcggctgacgcaggcgatgatgatcagggccgcgtagagcagacccagcgttctccccgtagctttaaattcgtattttatgagattttttaacatctgaagacctccctgaaatattcatctaccgattttccttcattttcgcggatatcatccacagacctgcacagagcgatctgcccgttctgaatgaaaattacatcatcgagaacctgttccacatcagcgatcagatgagtagagatgatgacagaagcgtcttcattgtaatttgtaataatcgttctcagaatatagtctctcgccgccggatccacgccgccgataggctcatccagcagataaagctgcgcttgcctgctcatggccagaatcagctgtactttttccttcgttcccttggacagcgtcttcagacgaagcttcgggttgatattgagtatctttaacatatcttccgccttgcccggattaaaatcctcaaagaaatcacagaaaaacttcagaagattttctacggtcatataatccggaagatattccgtcgccggcagaaacgagacaatcttcttcgtctccggtcccggatggtatcccccgatgataatctcgccctccgacgggacgagaagcccgttggccagcttcataaatgtagtctttccgcttccgtttggtcccagaagaccgataatcctgcctctcggaatatccatattgacaccggacagagcggaatgatagccgaaattcttactgaggttccggcatgaaagaatgctgtcattcatcataaattttctcctctaatcaagtacctttctcaaataaactgtcatttcctctgaaccggtcagcccctcttttccagcggaggaaagatcccctgaaccgccggtatccgaccatcccccgtcagataccggcacgtgtaataaatcgccgcgtctcagacttccgcccccttttcggaaatccgctctgaatcttttctcacggctgttttccgccttttcagtcaccggttctcgcctggcggatcaattcgataacctcctgtttcccgattctcaggtcccccatctgcctgagaaattcttcaatccgctgacctgccagacggctgcgttccgacgcgatttttgattcatcttccgtgataaaccgaccgctggtacgtacagcataaatcaatcccgatccctctaattctgtgagtgctttctgcatcgtattcggattgacggaagcctcccccgccagttcccgcacagacggcagacggctgcccggctcgtatctccccgtgatgatgcgcaggcgtatcacatctacaatctgtgcgtaaatgggcttctgattgtcaaatttccactccattttaccccctgttccttttctgtaaatacagatctttctgtcttccttcgacccgaaacgcaatctgtattactgtattattgtactgcgtttctaatacaataatacatataggacatccttctgtcaatagaaaatttctgaaaataaaaaacgctctccgcttcagaattccgcggagagcgcccttatctgcaaaataatttacgattcgtccagaataaaaatactgtcgcatgttacacatgcggctaaatccgctataaaacacgccttttaccgcgtatatacgcgaagcattgagtttcagcaaatcggagatttgagaaactctcgcatgagacctgctaacgatttactttgcaaatcaggtcgggacttcagggggatcagtctgtgtattcgtaacgaatccacaatctttaaaaacacttcctattgtaatgactcatgcctcttgtcagaatttatccggcgattttttcgcagaaattcttcagaatctgcgcagcttccgctctggatgccgtccctttcggatccagcgtaccgtcgtctctcccgctgatcaggccgctgcccacagcccacttcacagcgtccgccgcgtaagagctgacctcatgaccgtcagaataacccgaggattccgatataaggtcgactccttgtcccgcagaagtcacatccatccccgcgtcttttgcataacggtaaaaaattaccgccatctgttccctggtgatatcatctgacggtccgaaagactcttcatcgtatcctgttacaatctcccggctgctcgcccaggataccgcgtcttcataccaggaaccgtcttccacgtctgaaaagcggttcggcgtttcggctgacggtgttcccgccaggcgatgaagaatcgtaacggtcatgccgcggttcagcttctgcgccggcgaaaaaagatcatcagaaataccgttcatcaatccctctgaaacgacataagaaacggcgtcataataccagctgtccgccgccacatcggaaaacataccttccgtctgcgttccgtcgtccggttcttcctttccatcctccggatcggttcccggccggccgtcatcctccgatgcatccgctccgtagtaatccgccaaaaaagacgggatctgcacatcatccttcatcatgcggtaacggaaatgaatctctccgccgataccgccgatctttcgattcagatccatctggcgtttcagctccgctgtgccgttccatacgctggagggatctcctgacgcttccgcggatttgtagtccgccagacctatgtaaagctccgtatcggtatcggaaagtatatcgctccaccactgcaccagaacctgataatccgcgatactatacccgatattccagtagatctgcggagcaaggtaatccacgatgccttccctcgcccagaagacggtatccgcataataatcactgtacgactcggtgcctttcgtatcgcttccctccgaaagagtggatttattggcccagatgccgaaagggctgacaccgaaggaaatctcactgtccgcttcgtgcagttcttcatctaaagttcggatcaattgattgacattatctcttcgaaaatcgccgatatcgtcaaaaccgccgccgtatttttcataggaggcctgatcgtcgaaatcctggcccggataaaaataatcgtccaggtggatgccgtccacatcgtagtttttcacgatctccagcgccccgtctgtcaccagtcttcgcacctgaggcagggcaggatcgaagtagtaattccccccgtactgaacgagccattccggatgctgttttgccggattttcggaggacatagcctggtattccccttcgccgcttcgtgtcacccgataggggttgatccaggcgtggagctccatgcctctctcatgcgcggcttccacccagtattccagagggtcaaaaccgttttccggcgcttttccctgtgttccggtaagatacctgctccacggataatattccgattcgtagagagcatccgccgacggacgcacctgcaaaaagacagcgttcattcccatagctttggaatcgtccagtatttcatcggcctgctgacggagagcctcctcatctgcggtcaccgcttccggatagtccagagaatacacggtggatacccagacgcccctcatttcgccgtccccctccggggtgctgtctttggcatagacagcggaaagaagcgatcccagaatcgtataaccgataaagatcaccaaaaccacgacagccgttatggtaatcaatctctttcgtttctgctgatatgttttgtcgctttgtttttctgccatattcccttcccttctgaaccattgcgtcgttctcatactctgcaagcgcacctgccagagtttttcttcgaattgaatttcccttttgtattttcgtgtatggctgacggctcctcttgggtgaatctgtggaaaaccgcatcggcctctgaccgatcgcgctccgccggcactccgcctgccccttccggtccgtcctgattttcttatttttacatttcctcaaagacggcgtctttgagaatttctctgccgttggcatcgataaaatctatcgtttcctgtccgcagatctctgtcagagtctttaccgcgctgcccaagtcaggcggtctccactcgcagctgtgacagtcagaacccagcagatgaatttttttcgtctcaaacagcggcgtataatacgggatatttttcggactgttgaggtaaatcgcattcatctgaattttaaccggcatttcataatagtgttcgatatattctgtcttcgtaaaagtgtgaaaataccggtcgatatgaggaagaatcggtgtcagtcccgagtgcagggcgatatcatcaatggtccgcaccacggattcagaccacggaataaacggcatctcggtcatgatatgcttcgtgccgttgatacagagttccggaagataatcccaggtattcatccccggaatatattccacttccgcccccagcacgactttcggaatcatcttccggtcctcgtcggtgagggcctcccggatctcattcagacgctctctccgctctctgagaaacgtattgatcttatgttctcccaatcggaagtgaggtgtgaataccatggtatcgatcccctggctgtaactcattttcatcatcgtgatagactcttctacgctgtgagatccgtcgtcgatatcgtgtatcacatgggaatgaaaatcgatcataggaacccccttaaactttcaaacagaaacccgtccctttccggacggcagaaccggcgctgtccatgccgatcagtccaaatcagacaggacgatgagaagcgttccctgcgccgctgtcacgacagcagatgaactgacaaattcattgctgacgcctatcggataggtattcgtcagaaccgcctcctgcagaggatacttgaggcctctcagcgagacgccccgcacctcgctgcccgcagcgaagacagaaagccacttccaatatcctttttttaccataatggaatcattatgaatcgcaaagatctgatgatgttcgtcgatcagatgacagactgcgccgtgctgcgctgcaaaagccgtcagcgaaatattggccagcgtatgatcgattctgccccccagacctccgataatcataatgtcatcgtaacctctgcgcatggcttctttcagggcaagaagcgtatcggtatcatctttttccggtaccgcccggagaatctccatggaaggatttaccgcaccgttgaaagaatcgaaatcactgaccagcagatccggcacgattcccgctttcatcgcgtgaatatatcctccgtcacaggcgatgacaaaatccgactgcttaaaattagagggaaaaaagcaattcggcgcccccgaaataatcagacatctgtttgtcattttttgctctctttcgcagcgcgcagaagcgctgacttttcattctcaagctctccgccggctgcggccgccagcagacggtcccttatccgccagagatccaattcatctgaaattcccgtctccgataactcccgcaggccaatcttcagccgcttcggagaaaaataatcgccgctctcgatgatgcgctccgcacatgcctgaagccgggcgtttttctcctccgcctccgacagatatctgctgtactttccggaagcgtccgcatgtctgaccagaagaagctcctcaaatccttcccgcccgaaaactgcgaggacctttcggacgtcttccgtctccggccggattttcacatcgtgataccgcaccagacgaacaattttttcgattttatctttcggtacctccatgcggcggagaatccggtatgccatctccgcacccttttcagggtgccccacaaaacggcctctgccgttgtcgtctaagagaaaaaccaccggcttagcgatatcgtgaaggagcatcgtcatgcgaagctcaaagaccggaggaatatccgccactccggccagagtatgatgccacacgtctctgttgtgatacgggctgtgctgatccagatcaaacatcggcgccagctccggtataacacaggcgaaaacatccctgtagcggtccaaaacggaatccgcacaggctccacagatcagcggcgacaattcgtccagaacgtcctttccggataacctcacaatgttgtgaaaacattgaaacaccgcccgttccacatcttcccggagaacgttgcctgatttggctgcgatcttcagcgcagcgagaagattcttcggattttcttcaaaaaaagaaaccgcaggctcctcacagtgcagaattccgtccggtgaaacccgaaaacctgtttcttctgtgtttttccatatttttttccgcacttctcctcgtcttttttctggcatgagcacccctcgcgctgatttcctcttactgtatttattttatcactccgccggttcgctgaaaacgatatttccaaagatatccgccgcgaaaataaaaagttttcttttttcgtctctcttcacacatctccgatcttcctccgcggacggtactgtaacctctgaaatgatatccagatgcagctctctgttcagactgccgtcttttttccggaaagaaacggctttcggaaaaaattctccttttttcgtcagcgttcccacaccccagtaatcgatgagagacagaggatctttcttcacgatttttctccagttttttctgtcattttcctctttgatacggagtgcaggattctgaaaattcggaatatagttttgcagttcgaaggtcccgtctctactcaccgcctcgatgcggttttctctttttttgcttcctcgcaccgcagcatcggaagcgcggaaaacgccgccagcggcagccgatgaaacagaatccagggcagccggtctgtcacaaatttctggagaagacgacaacagagaaaggcagacaggatatcccgcctgaagaggccgcttcagcgcatttgccaccgcaagactgctgatatcggtacatacgaaacgccggttcttctgcgccgccacagccgccagcgtacccgaaccgcagaaaaaatccgccgtcagatctccctcatccgtcaccgcatctataatgcgggccagaagagcctcaggcttctgcgtcgcataactgagccgctctcctgagctcctgcccaccatatcgatgttccacacatctttctgattcaccatggtataccagccgatatcatcctggaattcttccacgcctttaaaacgatatggtctcagacccctgttatatgatttttccttctgcagacggaatttatactgtcttgtcctggaataaaacagtatcgtgtcgtgcttgcgggaataatgccggctggcggaccccccggatttataagtccatatgatttcatttataaaattctgttccccgaagatttcatccatgatgagcttcaccgcatgaacggcatgccagtccagatggacaaaaatgctgccggtaggtttcagcgtctctttcatcagcatcagccggacagcgatcatctccagataagaactcctgtcgttttcccagatatcactgtaagcggaaagccttccgaccaccttcgtatcgcatatcggcgatttaatttctattcgcactccctgctctgtctgcgaataaaaaggcggatcgatatagatgagatctacggcctgtaccagagaaccgtccgcgattttctccgcgagaaaccgcgcgttgtcgcacagaaaaaaacatcccgaacaatcttccgattcatcagagacaggaaaagaccgcgaaccttcctccggctcatcaaaagaagaaacagtccctgttccggcggccgcctccgcaaaaaaagatacttccgtcttttttttcttcgcaatttcttcctctgcacaccgcaacagtctgtcacactcctcccccgctcttttcacgatttgtggaagttcatggagtatactcatctttttctgccctttccttctccggcgccggcggactggttcccgtttctgcccgccttggggattccgccgtcttttcctgccgcctttcctgctgaaacgcttcttttcctgctctttttctttgtaccgcgggaggtgaacgactgctctgcccccgaactgccgcgctttccagcctgtccgcggcttttccggtctgttgctcccctgttatcgcggaggccgggatccgttctaacgccttttctgttcttttcggattccggacgaaccaaggcttccggtccgtaaccgatgagatccgttcttcccagcagacggagcgcttttcgaactaagtccgcgttttccggcttgttgaaatggagcatcgctctctgcagacgcttttcctccggatcggaaggaacataaacccgctcttttgcagaagggtcgatccccgtataaaacatacaggtagacagcgttcccggagtaggataaaaatcctgaacctgatcgggaacaaatccgttcttcttaaggaagacagacagctcgcaggcatcttccaaagttgcgccgggatgagacgaaatgaaatacggaatcatatattgttttttgcctatgcgtttattttccgcctcgtattttctgcagaatctctcaaagacgctgcggtccggtttatgcatccgcttcagcacgttatccgaaatgtgttccggcgccaccttcagcgtaccgctgatatgatgttcgcacaattccctcagaaaaccgccgctctgatccgctaacatataatcaaaacggatgcccgaccggataaagaccttttttacccccggcagactgcgcagggcccggagaatatcgatatactcgctgtgatccacctttatattcaggcagaccgtcggataaagacagtccctgtgagtgcagacgccgtgccggagctgtttttcacaggacggacggcggaaattggcggtaggtccccctacatcgtgtatgtaacctttaaattcagaatcttcgatgaggagccgcgcttctctcagcagagaatctttgctccggctctgtatcctccgtccctgatgaaaggtgagagcacagaagctgcagcccccgaaacagccccgcacggaagtgaggctgaatttaacctctctcagtgcggggacaccgccctcttcttcataagaaggatgacacgccctctgatacggcagttcatacacatcgtccagctctacccgggtcagcggctctgccggaggattctgaaccacatatatattttttccgtaatactcggccaaacgcttggccgatacggaatccgtattgcggtactgtatcagaaagctctgtgcgtacagttctttcgatctgcagatatccgcaaaagaaggcagcagttccagttcttcatcccaggagttctctttttcaaaatccggatttgtctccttatataccgttccgcgaatccatgtgatatctttcacttcgatcccggaacggagcgcttctgcgatctccgccaccgggtgttcgcccattccgtagatcagaagatccgcctgcgaatccagaagtatcgaatttctcacccggtcgtcccaataatcgtaatgaccgagacggcgcaggctcgcttcgatgccgccgataatcaccggaacccgggaaccgtatgcctccctgattttattacagtatacgatcacggcacggtcgggacgcctgccgctctttcctcccggagaatactgatccgtctttcttctgtgccgaaagacagaatagtgattcaccatggaatccacatttccggaatttacgagaaaccccagcctcggacgcccaaagcgctgaaaatcctctgtactgcgccagtccggctgtgccagaatcgccactcggtacccccggctttccagaagccgactgataatcgcatgaccgaaggatggatgatccacatacgcatcgcctgtcaccagtacgaaatcaggggcatcccagcccagccgctccatttcttctcttgtcacaggtaaaaaagccattccgccgtgaacctcatctttccaatcactttgttagaataaaaacttaccttttagtataccatgtcgactacggctcagtcttcgtctttttgcttctgccggactcgcctgtcgccgggaatcaaaaaaagcgcactataccgtcggctggtgaggcagcaccacgagcccctgccgtatctccctgacctgatcggtatcgatctgcgcaatgataatttcttccccgtctccggcctccgcgatgatctttccccagggatccgagacacaggaacccccgtgcccggcgaaaggagccgcttcattcttagcgatatccgcaccggcgacaaaaacctgggcatccagcgcccgcgcccgattgagaagtctccagtggtccggaccggtacgggcggaaaaagctgccggaacgacaatcagatccgctccgtctctggccatatcgataaaaatctgcgggaaacgaatatcaaaacagatggccacaccgaacttgacaaacccggtatctatgatcaacgaacgatctcccggcgtaaacacgacggattcgcaggagcgcaccttccccggaatatcgacatcgaatagaaaacgtttccgataactcccctgcagcgcgccatccggcgaaaaaacaggacaggtattgtataaaacggcggcatcagaggaagaaacagacgaaacaccatcctccggcgcagatccgtacgggatttccggttccggaccccacgcctgctcattttcacctccgctttcgggaaaagaacctcccaccagccagatatgattttcctccgctatttttgacagagctttcacgacatccccggaaagcgtctgcgcaaagaaacgcatctgtgccggtacaaaatgacagataaacatctccgggagcactgcgatatccgctccccgccgcgccgcttttctcacagattccgcggctgtccgcagattttccgacacagaatcccgaacatcgtgctgacacagtgcgattttaaatttcgccatattcagcctccttctcattatctgaaataaaaatgataccttattatatatcagccggtgcagaaaagaaaagaccgccgcagaattcctctgcagcggtcctccctatcagaacaagattctacctcggatttacatgtacggaacagtgcttaatcctgccgggaaacagttcctctacctgccggtgtacgcgctctgcgattcgatgcgcatcgtagagagactgtgttccatcacaggcgatttcgatatccacataaaccttcgacccgaacagccgcgtctttatttcatccagcgcgatcaccccctcctgcgccacgatcgtcgcctttatcttttccgcagtttcgtcatcgcaggccttatcgatgagtttattcatcgtctcccggtagatatcgattcccaccttgaaaatgagcacagcgatcaaaacacagactgccggttgcagtacgggaaaacccagcatcgctccgaaaattccgataaagctgcccacagaggaaatagcatcggagcggtgatgccaagcctccgccatcagtgaaacagagtcgattttctttgccgccgcccgcgtataccagtacagaacctctttcgatgcgacagacaccactgccgcgatcagcgcaagcatcccaggcatcgcagcgctctgcggatcaatcattccgcggatgccttcgataccgatccctgccgccaccaaaagcagaacattcgctaaaatcagggatatcacacactccaggcgttcgtgaccatactgatgttccctgtcagactctttgcttgacaaatgcgcacccaggataaccagcccggaaccggctacatccgataatgagtggacagcatcagcgatcatagccccggaatgtcccacgacgccggcgaacaacttgaatgcagacaaaaaaacattcgccgccacactgacctttgacactcttatcataatagacttatccgtatcgcatctctccgccatttttccgtcctccctgtatgcacgattcttttatttttcccagaatatgcagaaaacctgcgaaaattgaacatttccgcagattttcctcacgtacgattttatgttatccactatatcccagactattttagttagtcaatgcttttaattgtatattttttctcgcagaatattccgattttctgcagattctcagcagcagacgggctctgatctgcggatatcttttagagtattcggtatattgaatacctaatgattcctttcccctgccgatctctcccatccggcctgtctgccgccgtcccctgtctgcctatcctttgaaaatctgaacccagcaggctcttccgctgtcatccaccgcatatcccacgccgatggacgtgtacgatgaactcaggatattctctctatgtccctgagaattcatccaggaatccatcacggctaccggcgtcttctgtcctcttgcgatattctcgcctgcgctgcggtaagatacacccgccgattgcatcatatcaaaagcggaaccataggtaggagactgatgagaaaaataattgttctcagccatatcttcagccttcagctgcgccagtttcgtcagttccgaatcataagagagcggcgataacccctgagcggaacgctgctgattcaccagatcggtcacttcagatccgtaggaagaactctggtttcccgaagtacctcctccggagatatttccgtctccgctgcccggtttgccgccgggctgaatcacttcgctgtcatcgcttcccggcgtatttccttcatcgtctcccggagtgccgtcgggtctgttttccccctcgccgccgtttccgcagcccggcgtatccgtctcatccccacagtccggcttaaaacaaattccgccgtctccgttttctccatcggaattacagccccagaacagatagcggaatccgcacctctcagaatctccgttattcatccaaccgtcggaagtgagacaaaaactgcttccgccgcagctccgatttttgccgaaatcagagcaaacgctgccttcatctgacagacacgccgccagatacgccggctgtctgatctccccggcattctgcgtctgtacgcaggctgccgatacggcctgaggaacaacggtcatagccaatacgcccgcagtgatgacaatcctgccgcggattttcttgaaattcatctgaacctccttattcattttcctttttttgtttcaacttacgggtctggccagacctgaaaaaatatgcctcagcacgtatctatattacacctaagaaaccatttgcgtcatcaatcaaaatatggtatcatcggaaatcctcctctattttagtaaaaatacttcagaatttccggacggtggagaaaatggattcctgtgcagaaaaagggaagaggaaggcatcaacgccttcctcttccctttttctgcacaagaccgcggatctgctctggcgatccgcaactgtctgcccggcgatttaaaagtaaaaatatgccgctgccgatgcaatcgctatattgaaaagaagggccgcaggcagcccgattttaaatttcgtcttccgtgtcttatggtgaaacacgtgagaaccgaggaggcttcccaccgcccccatcagaaatgcgcagcagagtagcgtgcgctcaggaatccgccacagatctctcttcgcccgccttttgtcaacccccatgagaacgaaattaaaaaggttccatacgagatagactgccgtcgcgatctctggccggctcacagcggcttcacacaatatttttcgagatagatttccattttatccctcacctgatcatcgatcacaatctttccgtcgatttccacattataaagagtatcgatgatttctcttaccgttacgatcggataggtacggattccgaaatcttcgtacagctcctggatagcggtcttttctccgtttcctctctccattcggtctacagacaccacgagaccttccacatgcacgccttccgtttccagaagcagcggaagagtttcacgaactgctgtccctgcggtgataacgtcttcagtgataagaacgcggtcgcccgcctgcagtttatgccccaccatattgccgccttcgccgtgatctttcctttccttgcggttaaaacagtaattaaattctctccggtattctgcggagagcacgatcgaagtggaaaccgccagagggatgcctttatacgccggcccgaaaaggacattcgccgcttccgatataccgccttcgcccatattgtctacgatgcacgaagcgtaatactggcccagtttctgcgcctgcgcgccggttctgtaatttcccgtattgataaaatacggcgtatttctgccgctctttgtgacgaaatccccaaaagtaaggacaccggcctgtaccatgaattttataaaattttccttataactcattttttactcctgattccacattttctaaaacgagacagccttccaatctgatatcagagatagctcgccgcgcactgactccattaaatttatactattttccgccgtaggaaaagttattttattataaagaactcttttccgcacagaatcgcgttccctgcggaacaaaccgcgctttgcggacctcgcggcgcagctatatatcaaaggcacgttttaattccgagatattctcgaaaccgttttcccgcataaattccagcaattctgctttaatgcgcaccggagccgaaggatcggacagagcagccgtacctatggaaaccgcacaggcgcctgcggccagaaactccgcagcgtcggtaccggtggagatcccccccattcccagcactggaatatttacggcatttgccgtctgccacaccatccgcagggccacaggcttgaccgcagggccggaaaatccgcctaccttgcgggcaagaacggctctgcgttttttcagatcgatgcgcattcccaaaagcgtatttatcagggataccgcatccgctccgccggcttccgccgcccgggcgatttccgtgatgtccgtcacattcggcgtgagcttgatcatcacgggtttcttcgaaacctttttcacctccgcagtcactttctccgccatcgccggatccgttccgaaagcaattccgccctcgctgacgtttggacaggaaatattgacctcaaacatggcgatttccggacagccgttgagcatctgaaccgcttcgcagtactcgtcaatactgtgacctgcgatgtttgtgataattttcgtgtcaaactgacggagaaacggcagttcctcctccatatatacctgcgctccgggattctgaagaccgacggaattcagcattcctccgtaagtttcagcgatcctcggcgtctcatttcccatccagggttctgccgccactcccttagtcacagccgcgcccagttcgctgatatcgtaaaactgtccgctttctctggcggaaaatgttccggaagcagtgcagatcggattcttcagacaaattcccgccagatctgccgacagatcaataccgtattccgacgctctcttatcgatctctgtcatcaccagatcacctcgcttcccagaaatacggggccgtccttacagactttcttccgcaccgcggtttcttttccctgtgcgtcttttacttttatatcacagacacagcctacgcacgcgccgtatccgcatcccatgcgctcctccagggaaacctgaacatcttctccccgtcttttcaggtaggaacagactgctgagagcatcgctctgggaccgcaggaaaaataaagatccccgcggatctcattgatctccatacagtccaccacagtgcccaaaaatgcgttttctgtcggcatgtccgtagtgactaccacccgtgctccggcgtcttttaattcttcgatgagaaaaggttctttccgaaagccggctaccgccgtaacggaaacccccagcgatctcagttcctttgccgcaaacagcatcggagcgcagcccacgccgccgccgatgagaacggcgttgagggaacctaacgccggtacgctctccgcgcctgccggggacggcagaagaaagccggtgcccagcggcgatgagacacgcacggtgtcgccgctctcatatcccgcaaattctgccgttcccgcgccgacgacggcatacacaaacgtcagtgtgccgtcgtccccatccgcatcgcagatgctgatggggcgcggcaggatcagactgtcggcagccggatacagatttgcgaactgaccgggacgagcctcgcctgcggcctccggcgccgacagcttcattttcataatgccgtcggcaatctcctgattgctgacgacgattcctttataaatctttttttccggcatcgctacctccctgtatctctgctcttcatttcgtccggcaatctgcattaagttataaaacccttctcagatcgtctctcatgcggatcgccgcggcgcgggccgctttagcgtactcccggtcggagaaagacgcgtcctttttatatgccgccgtaattccccgggaagaattgacgacagcgccgaccccgtttttgtcgaaaaatccgacgatatcctccgccgtaccgccctgagctccataaccaggtaccagaaaaaaagtatgaggcatctgtgatctcagacgggtaccttcttctttgtgagtcgctcccacgacagcccccacgttgctgtagcttccggaacccatggcttccgcaccccaggtctccaccagctgacccgcagcttcgtaaactctgcgcccatccgccaggagcagatcctgcatctcactgctgctgggattgctcgtttttaccagaaggaagatccccttgtctcccccggcgcagatatcgagaaacggccgaatgccgtctgaccccatatagggattcagtgtcaccgcatcctctatccaggtctcttctatatgctctccgatctgagctccgcccaggtgagcggcataggctgatgctgtagaggagatatctccccgcttgatatcgccgatgacgagaagtcccttcgaacgcgcatatctgcaggtttcgttatatgctttcaggccctcgattccaaatttctcatacatggcgatctgaggtttcaccgccggcacgatatcgaaaatctcgtcgatgatctctttattgaatctttcgaagagcctgcctgccgcctccggcgtcattccgtattctccgaaatattcctccttcagatattccggaatcatgtccagcgtcggatccagtccggctaccgtcggatttttctttgtccgaatcccatcgatcagtctgtcaatcatctctcgacctcttttcttactctcaacactctttttccatctttgttttcttccctccgcggcggcatctgccgccgtcaataccgaggtatcagcacaatatcgtttatcaccaatttacattttattttatcgtataacaagtacgtccggctttcttccgaagattgtctctttttcgccgggccccggtctatctccgatatatgacggctccgtctgcgatcgtcatctccactcgtccggtgactttcattccttcaaacggagtattttccgccttggacgcaaaaggaccccgcaccgtccactgcgccgccggatcggcgatcaccacgtctgcgggtcgccccggctgaagcgttcctccgccgtatccgagaatccgcgccgggttcgtactcaggagctctacgagacgcagcggtgtaatcagtcccggaagaatcaactgcgtgcagcttacagcgaaactcgtctccagcccgatgacgccgaacggtgcgctgtccagactcctcgctttttcttctctggcatgaggagcgtgatccgtagcgatagcgtcgatggttccgtccatcagcgctctgattacggcgattcggtcactttccgatctcagcggcggattcattttcctgtgtgtatctgcacggcggccgctaactgtttcgctgatatgataactctccgttgcatcatccgcggccacatccgcgtcggtgagcgtaaaataatgaggggcggtttccgctgtcacaggaattccccagctcttcgcggtgcggatcagatccagacacgctcccgtgctgatatgggacagatgcagacggcaccccgtctccttcgccaaaagaatatcccggatagtcatcatctcctccgcctccggcgggattcccaacaccccgagaagttcggaatatcttccccggtgcatacatccaccgtcggagatctcatgctgctgtgtatgatcgaaaatcggcatatccagagattttgccatcatcatcgcttctctcatcttcaggagattggagaccgaccggccgtcctcgctgaatccgcagacccccgcagctttcagcgccgccatatccgtcagttcttctcctttttccccgacggtgatcgccgcagagggaagaaccttgacaccattggcattctcagcctttttcctgatgtactgcaccacgtcgacacaatctgtcatcggatctgtgttaggcatcgggcagacagctgtaaaacccccggctgcagcggcccggcatccggaagcgatatcttccttatattccatccccggttctctcaggtgaacgtgcacatcgataaaccccggcagcgtccatttcccctcggcgtcgataatttccgcctccggctccggtacgaccgcgccgcagtcataaatcccctcaattacgccgtcgccgattaccaagtccgctttccggtccagctgtaccgaaggatcgatgactcttccgttttgtatgtaaatttttttcatatctttgccctcatcttacagtgcggataccgccctgtgtctcttctttaccgccccgtccgggcggcctccggtgatttttctatgcctcgtcgtctttttctgcgtcgggcgctttctcttctctctgcctgtcaaaatggattaccatctgcggatacggtatttcgattccatattcatcaaatttgagctttacctcctcctgcagatgatatttcgccgtatagtaatcctccgttctgcaccaggccagtacttcaatttccaccgcattttccctgtgagaagccacgccgatagtgggcgcaggatcgtcgaaaaacagcttggactttcgtataatctcctcgattacatccttagccagcttaatattatccgaatatccgatattaaaccgggaatccacccggcgccggtctgcccttgaaaaattcaccactacatcggaggaaagtttgccgtttggaatggaaatcactttgttatccagcgtcaccagcgtagaatagagaagatcgattttatccacttttcccccgatcccgcaggactcgatgtaatcccctttcacgaaaggtttgttcacgatgatgagaatccctcctgcaaagttggacaaactgtccttcaatgccagtgcgacagccgctccgcaggcacccagcactgtcagaaaagcggtggtgctgacgcccagatggctgagaatcgtcactgttagaagaatccacagcagcacctttgcggtattgagaataaaaatatgcagtgctccgtccaactttgacgctttcagcgcttttctcagaaaatgaaccgcaatcttcatgatgatcagaccgatcagcagtatcagcagcgaactgaagatacttgatacgattttgctgttcgtcaacctttccagttctgtaaaaatatccatatttttccttctttctctgccgctcggcattctgcggcgcgtatgtgagctttatccttttcgcatattttgagagaccgcggaacacagaggattttttctgtatttctccatccggattttcaattgaaacaaaattctgacgggtttctccgatcagaacgcgcgtccgatttgaacaaaacgctccgaatcatccgcctccccggctttctatccagagacctccccttcctccgaagatccggaaagaaaagccgcctgccgcctctgtggaaaacaacagcgctttgttatataagtatacaacaaatcatcctttcagaaaatcaaaatctcctgacaggaaaagggatatcagcacgatattatatctctgcgccgctcactccgaaagctgcttctgcatattctgtagataaaagatattccatttttttcggaaaggagcacttatggcaagtattttcctcagtccctccgttcaggagtacaacaaatatctcacaggcggcgacgaagagcagtacatgaatctgatcgcagacgcgatgatgccctatctggaggccagcggcatttacgtcacgagaaacgatcctgacgaacctctgtccgcagccatcgccgcttccaatgcgggagtttacgatctgcacctggcgctgcactccaacgcatctccagaatctctttccggccagttacaggggcccgacgtatactattaccgcgacagcatccgcggacaggaagcggcgacagtcttcgccaataatctgaaatggctgtatcc

SEQ ID NO: 4013 - DNA, 32759 bp, Unknown
  16S sequences of unknown bacteria
ttgtcgctttagcggaggttccgagcacagagtgcgaggaacaataatccaccggatatgccggtgcgcttaagttgctttagctttaagcaaaaaacctcctatgttacaataaatgtggttccccaaccgcattatgtaataaggaggtagtctatgaaagacactgatagtttagcacatacaacttggaattgtaaataccacatagtttttgcaccgaaatatcgcagaaaagtaatttacggaaagataagggtagacattggaaagataatgagaatgttatgcgcgagaaagggcatagaaatcattgaagcggagtgctgcccggatcatatccatatgcttgtaaaaattccacccaaatatagcattgcagagattgttggatatctcaaagggaaaagcgcccttatgatttttgacaggcatgcaaatctgaaatacagatatggaaacaggcatttctggtgccgaggttattatgttgatactgtaggcaaaaatgaaaaaaagatagctgaatatgttagagaacagcttcaggatgatatagcaaacgaccagatcagcctgaaagaatatattgatccgttcagcggaaagaaagttaaaaagtaagagcgggtaagaagtgaacctttaggttcacccgagaagtttgtgcggttggtggaactttcagtgcgtcttaagacgcttgcaggtaagggccccttataggggcatagacaaactaccggctgagccggtagtcatgattttatgggaggaaagcctgtaaacgtgtaaattcaaggcatacggagtattgtgataaacgcatacaaagctatacagacggcatactaacctatatgttttgaggaaaaatgtgaggaaaacaggctgaaatatgaggagatggctcttttcatatataaaaaacaaggcatatttgacgtattgtaatatatgtgttttataaaaatacaggtaaacataatgcggcagaaaaggaatagtagcatagtattagacaagtcatagcagtgatgttatggattttttcggcagttcaagcaacattagcccatgaaaatgtaattattgagaaatattcgctcataaaaatgtaaaaaggggctgtattttctctggatttgtgtaataaaaggaaactctgctttagagcaggatttattcgtgagaaaaaccgacaccttattactgttcgttcctgttaaaatgatatttgcattgttaaggaaataaactaaaatttgctttaactgttttgagtattatatattatttttgacaaacgtattattataatgagaattattttagtttctcaaaaaacgatgcaaacaactcaaactaaatttgagtttatattgatataacttaaatttatttgaattactgttgacataactcaaaatatgtgttgatattttaataaataggacggtgattttgttggcagatatcatatattatatagttccggacaatcatatacatatttcagaggcagagagaaagttgctgggaataggtgataaaaactggacagaagtggtcgttactgactccagggatatctatagcgggaaaatggtttttcaaaaattaatgctagaatttttctcggataatatagaaaaactggtgctgcttttgtgggctttaaaagataaagaggaaacactttttgtagaagcagggttagacgacggatatgaacctgttgaagtgtgcgatatagaagaactatcagaagccgtatgtaaagtatacgaaaagaacaaatgctacagcgttatatacaaagacgcttctgctatgaaaaagcgaataattaataacagagatgaaatgttttatctgtatgttaaaaacgatgaaattgaaataattgaagaagttctgaataaatgggcaaaaaaagagaattttgcaaagtatgaactgggagaagagtagcggtaatgaagaaaaaatatgttaaagcttttattgataaagtattagatgaagaatactgccttacagctaaagattttgaaactgcaagaaaactttcggtaagcaaagatgaattagtgagaacagacatagcatgtctgctggctttgtatgaaaatgatatttccgaaagcatactatacgatatgacatttgacaaaagttctcttgtaagagttaatgcggtaggctctattggtcttggtaaacggaaggacacctttgacagagtatatcgtcttatgcagtatgatagagttccgcttgtaaggagttatgcagttttgtcgcagtacgatgtatttgaaaaattagcggacaagccgttttcaaaggaaagctatataggagaactgattaattgcttaaacagagaaacccgcagagaggtcaggatttcatattacgaagtattatgctgtgccggcgaaaaaagcttctttgacgatataataagctgtattcaaaaggaggctgaaacaggacattttgttttactgtggagtttgctgcattctattgaaagattgcttgagaaaggaagtgttgaaaagtcaatggtgaaagagaaactggagcctttaattcagactttcccaaagcagcagaaattgtttgcattggagttgtttcaattaatagatgaaatatgaggaggttattatgcacaaaaaagccttgtacttattaattttaatactggcgatttttattgctgcagggtgcggcagtaataactcggaaatgcagtttgagcttacgcctgagccggcgacaagtgaacaagattgcacaaacatagaggataaggtgtattttgcaatagatgcgggtgactatgaagaagcgaaaaaactgcttgcatctgatgaaaatatacctgttgataacagcagagcggcaaaggatttgagcggtgaccccagaattcttttttcagtatatccggagcatgaagaactaagtagacttctaattgactatggtgccgaccttaatgaccttggatctaagggatgttcatatcttcatttatctgttgcatatagtgaagaggattacgacggagaaattatagacattacagaatatatacttaaaaaaggcgcagaccctgatgtaaacggcagcggtgatttcaaagggactcctgttgattatcttatgacaaaatcacctgtatttatatataactttgacagactttataatatgtttgtcaaatatgatgcagatattaccataaatacattagaaaatgcccttaacagtgacagtggctttacatatgcaaaagatatagttaagcggcttaaagaaaataatattgaaaccggcctcggagatgcgcttgaagctatactgcttgataaaaacaaagatgaaataataaggcttattaaaaacggcagttacaggcataaagataaaaaatatatggtatggtatgcagcggccaattgcaatattgaggtgctgcagtgccttaaaaatacgcattttaatatgaaatgtagaaacagtgaggatatgtcgctgcttgatattgccgcggcatataatgagccggaagtcgtagagtatctgatcggacagggctttgatattaatgataaaataaatctcacagaacaaaatgatacaggccgggcttttgagcagagctgtgatctcaaaaaatatacgcctttgtcatttgcactggtgcacggtaaaattgagaatgcgcagagactgattgacgcaggtgcagaatttcagagaaattcatggattaatgcagtattttcacaaaacaaagaagctgtcgatattctgatgagcaacagctttgaacaggaggaaaccttcttggcgtactgttatatatttgccagtgatgagatggcaaagtatctgatgtataaaggagtttcctgcgatctttcctatgagggcgaaaacattatatctttcttgagaaaagcaggaatgaatgacagagcagaccttattttaaaatataaaaataagataaacggtatataactgtgatgtttgatgcaaagaatacagctgagggtaaaataacaggagaagtttgatgaaaagattaatatatatcattgttacagtgacaatagtcataacactgattggctgtgggacagatgatgatatttcttatgaaatatataatgcgatagtaaatggtgagtatcagactgtagaagaactgttaaaaaataatgatattgatcttgaaaactacagggctgtatatgaggcaacaggcgactccagagtccttgcggcatctgttacacagcagccggaggacacagaaatgtgcagactccttgtagaatgcggagctgatattaacagcagaagtccttatggcgctacgtatcttcacgaaattatagattgttcagaggctgtgccgtctgcagattatacggagattatgaaacttctactgaaatcaggggaagatgtaaatgcaaagggcagaaaatcatatacagaaacacctttggattatcttatgacaaaatcttcgataataacgataggctacgatgaaatgtttaatattctgctggataacggcacggaagtaacaaaaaacactatggaatgctgcatcggctgtcgcagctatgagaaagtctgtcctcagacaatcagaatttctgaggaacttaaaaagtttgcagaaaaaatgggaagataaaaaagcaatatattaaaacttccgaaggtctgttacccttcggaagccttgttttctgaaacaggtattaccatattttcgatagcttttctgagctttgagtggcgtattacaaaatgtatcgcagggtgcctgttctttgatatgagaacccatttgccctcatttataactatctgtatatttctgaaggcgtgagcttcagacagaacgggatttaaattctcgtgaatttcggcaaaattttcagtttcctcaatatgtcttttgtactgctcataagtgcagtatacgtccttttcgtaaaacatctccgatagtgaaagaccgataggatacttctcgaattcttcttgtgtgagtacgggaagctcagttttaattgtaccgctttttaatatattttcgacatctgtaagctttttgctgcggtagtcataaatcttttttgcatctttatcagcgatatcatttgatttcagaatttcctcaagcagattttccgaaattgtgtatacaggaagcgatgagaaaatactgcgcaggttagagcttgcatttacctcttttgcgataaacagtctgaatgccgtttcattttccttgcggtatatatccataagaggatatgcttttttcagcagcatatctgctcttttgcggtaataggcaacttctgatctgttgttggtaagataatagctgccgtcactgtgatatccggatatacattcacccgagagcgccgcagtatcggaaacgtaatcaagatgacagtacacgctgttttgaagacctttcagataatatggtgaaatctgtcctgtcatatacataggtatccagctttcaagtcccagcatcagctctataaacggtctgtcaaggttatgtattatatcaagatgcagaccttttttgagcatcagcgcaagtccgaacatccacttcttagagaaattcatatcctcagacatatcctccataggcatatcactgcacataaacactctttcgccgcctctggcaagaactgtggatttgaagaaatcaagttcacccttgcgcatttcaacaataccgtaatagtttctggataccggaagcttgagcggcatagacggaactttaaggctgtcaaagttaatggctctgatgtaatcgtcaagattgaattcgtcaagcttcttgagaaagctatcgacattgctgcctttggaagaggcgtcctccgagcacagccacaggcgcagcgcatcagaaaactgagcgtcagactgagcagcagtcttatcaagaccgagggctgatgtaactatctgtctgtcttttgtggtattgcagcttcctgccagaaataagcatacaccgctgataaagccctcggggtcagagggttttctctgtcccgaacgtattcgtgaaagcgaggatacatcgtaattaagaaatcttgcaagttctgaaatattaatatcaacagaggatatcagtgtattcaggttgtcgcgcatggtttcatagttaaatgtgctgtcctgaagcgaggcttccagctgctctgatatttcggactgattcatatcaagccctttgctctttgcaagcgaggcaataccgcctgcaagccctgtaatctgcacactgcctgctgcgggctttctggcgccgtttcggtatctgcttattacggcaggggaaatacctgatgcctcagaaagctctctggcactgcagcccagcatatctatatatttgttaagcgtgtctttaaagtccataacatactccgtttctcgataaccctattatattaccccgggactcaaaaagcaattaccggaattgtcattgactatagtggtaacattattcagcagtaagggaaaatataatataatttaaatatatttaatttacagacgaaagagaaaggaaaaggattatgaagagaataacagcaatattattatcacttatagttgcggttgcatttatgccgacggcagcatttgcagcaaacgaaagcgtgcagtttgaattaagctgtacggagggaggcggaatatacagctacagtatgtatatgtataatcttcagaaatacaaactggaaggtactgccggaattgtgaaggggaatgattttgaatccacattatatgcaattcctgacagcagtgattatgtgttcaaaggattttattcaggcagcactaaaatcaaaactacaggcaaaggcgcatacggctatactttgaaatatgacaggaatctcaaggacaagcaggtaaccgctaaatttgtcaaggctacaaaagcgcagaaatccgtagcgaaactgaaagccaagaatttcaaaagcaagaaagtaaaaggcattaatactctttcgtggactataggttccaaggttgacggatacacaatcacaataatcaacacaactgataatcagccggcagtcgcaggggatgccaaggttgcaaagaacggcaaggatgccaagttcaaattcaaatatgctgttaaaggcaagaaatacaaggcagagatcgtaggttacaagaccgtaaaaggtgtgaaggttcctactgcggctaaggttgtaacatttacaggtaaataagacggaatatgaagaaaatattatcatcagtaattattatatcaatgtgccttgctcttgtttcctgcagcggaagcaccggaaacagcagcggagaggctatagagatagcaaagccggactgcgctgatatatcgacggaaacctatgaggataatgcccttacaatgacagttccgtcaggctggactgtggaaacatacggctctatgggcgaatacagcataagatgttttgatcctgcagacaaatcaaggcagatcttctgctacggctgcctgtcgccgattctcaaaagcaaagaggcaaaagaatggtacagacagtattcgcaggcaacaggcgggggatacggttccgatctgtttgcgcctgctgtggttttaagttcaggcagagcgacagatatatttaagaaattcgataagctcacagagtatgtgaatacaataggcagtcagtattcaaattttaaataccctgtgatggacagctttaaagttatagaggagataccatactcaacacctatggcatcatacgcaaaagacgagggctgtatcagagccacctttgattctgaagagggtactttttcggagggactctttgcggcaacccttgttgatgccgggtcgtatgaatacttcggagcagacacaatgcctcttgcagtatattgtgcaacaggcgtatctgcttcggcagaggatttcctgattatgcaggacatgctgcttgaatgtgtcaactccatttcatttaaagactcattcatacagcaggcaaatgcatacagtaattcggttacggcagcttcgttaaactatgccgcgcaggttaattccgcaatagacagttatatgcagtcgtgggaaaaccgtcagattacaaatgacagaatagcagagaagcaaagcgatgcgattttaggctacgacagactgtatgacagcagtacaggcgaaacctacagggcggaaaccgggtggtatgaaatgtatgatgcagacagaggcagccactccaataccgatatctatatggtagaagacgatgcattgtatgacaaagcctattcgggcacgataatgtacaaatagacataaaattaacataaacaagcataaaaacctgcttttccggttgtggagaagcaggttttaaaagcctataatttaatatattcatctctgcctgcgcctacggaaacgtaggtgattttgcaggctacagctttttcgatatatgcgatatagtcttttgccgcctgaggaagctcctcataagtgcggcattttgaaacatcgccgaaacccggcagatattcaattacaggctttgcacgaagcaggcgctgacctgtaggaaaagctgtggttttgattccgtcaatctcatatgcggtgcatacggggattttatccatatatgataatacgtcaagttttgtcagtgcgatttctgttgcgccctgaactctgacaccgtattttgatgcaggtatatcaaaagctccgactctgcgcggtctgcccgtagccgcgccgtattcgcccccggcttttctgagagcttcggcctcatcgcctgacatttcaactgtaaacggcccctcacctacacaggttgaatatgctttcataatacccagcgtgcctgtcagtgtaagtcccggaactccggccccgataggagcaaatgaggcgagagttgttgatgaggaagtgtacggatatataccgaaatcaatatcccttaaagctccaagctgagcctcaaacattatattcctgccctccgctgccgcctgatagagatattcggatacatctgtgatgtacggagcaacttctgagccgtattttttgagccagtccataatctcatcggcatctacaggctcgtgaccgtagcctttgactgtgatgtttttccattccacgatatccttaaccttttcgtaaaggctgtccatatcaagcagatcctccatgcgcagagcttttttcatatacttgtctgcatagacaggagctatgcctctgcgggtagagccgaatttcttgtctgccagtctgtcctcttccataatatccataagtctatgataaggcagacatatgattgccttgtcgcttatcttgagattgtcgggagttattttaatgccctgctctctcagcttgccggcctcgtttacaaggtgttcgatatctattaccataccgtttcccattatattcacagtggtttctctgagaattcctgacggaagcaggttgagaataaatttacctctgtcatttacaacggtatgtcctgcgttgttgccgccctggtaacggcatattatgtcgtagtctgaggaaagcagatccaccatacggccttttccctcatctccccagttgataccaacgattgctgtaagcatacaatcagctcctttcctgtctatacattaattgatacgtctatatttttgtcgagaaactcgcggtttgctgcaagcaccgctctgacttctctgagataatcctctgtctgctgtgtggctatgcctgtgaagcagctttcggaaattattttatctatatcagcccttgtaagcccgaattcagggtcatttgcaattctgtcaagcaaatcattgcttttgccctcctgcttgactgcaaggcctgccgccacagagtgacttctgatggcctcgtgaagaagctgtctgtcacctccgtttttgacgcagtgcatcagaatgttttcggttgccataaacggcagttcctcgtttaaattcttctttataacctcaggatagactctgagacccgaaacaatatttatataaagctgaagtattccgtctgtcgcaaggaaagcctcaggtattgatatacgtctgttggcagagtcatcaaggcttctttcgagccactgtgtgcctgcggtcatggcagggttaatacattctgcaataacaaagcgtgaaagcgatgaaatccgctcgcttcgcataggattcctcttgtaggccatggcggaggagcctacctgacctgcttcaaaaggctcatcaaactctttgagatgtgaaagaagccttatatcgcctgagaacttctgcgcgctctgggctattcccgacagaacggaaagtatgaaatagtctgccttgcgggaataggtctgaccgcttaccgaataggtcttttcaaaacccatcttgtcgcagattagcttttccagtctgcggaccttgtccgcatcgccgtcaaacagctccagaaagcttgcgccggtgcctgtggtgcctctgcagcccagcagcttcatattggaaaccgcaaaatcaagctgctccagatccatcattaaatcctgcatccacagcgccgcgcgcttgcctgcggttgtaggctgcgcagcctgaaaatgcgtatatgctaaagtaggcaggtccttgtatttgtctgcgaaatctgcaagctctgcgattgccgtaagcagcagctttctgatgcgcataagagcgcttctctgaagtatcacatctgtgttgtcgcccacatagcagctggttgctcccagatgaattattggtcttgctttagggcaggcaagtccgtaggtgtatatgtgagccataacatcgtgtcttacttccttttcacgctgtcttgcagtgtcgtagtctatgtcgcagatatgctctttcatttcggctatctgctcgtcagtaatatttatcccaagctcctgctctgcttctgcaagagcaatccacagcctgcgccatgttgagaatttactgtccggcgaaaaaatatgcttcatttcatcgcttgcatatctggttgtcagagggttgatatatacatcgttcataataaatcctttcggcgctacagcaggtgaatgccggctgcctcgcatttgcttatcatttcatcgggccagactgaagcctgaacctcgcctatatgagccttgcgcaggaagtacatgcacagacggctttgtcctatgcctccgccgatgctgtaaggaagctctctgtttaatattgccttgtggaaaggcagatcctttcgctcctctgcgcctgcaagagcaagctgccttgccattgcctcctcgtctactctgatacccattgaggaaatctcaaaggctctgtccaaaacctcattccataatatgatgtcgccgttaagctcccagtcatcatagtcaggcgctctgccgtcgtgcttatctccggattttaaagctccgccgattttcataatgaatacggctccatgctctcttgttatggcatcttctctctgcttaggagtaaggtcaggatacatatcctcaagctcctgtgttgtgatgaaatatatttcattcggaagctctgtctgaatatctctgtagagcctgttgacatagtcgccaaggtttttgagcgcgttgtagattatcgtaactgtttctttgagatattcttcggttctctgctctttagttataaccttttcccagtcccactggtccacataaatggaatggagattgtcaagctcctcgtcacgtctgatggcgttcatatcggtgtagatgccgtttcctgcggcaatgccgtatctgcctagagccatacgcttccatttggcaagggactgtactatttcaacagtctgttcgttcatatccttgattgtaaactgtacggttctctcaactccgttgaggtcatcgttaagtccgctttcgggagttacaaacagcggtgctgaaacacgtctgagtgaaagtccgtaggccagttcctgctggaaatagtcctttatttttttgattgcacgctggctttccataagatccagcgctgatgtgtatttatcaggtagaataagtggtaacatatctggttcctctttctattatactatttatttcttgtttatgaaagactgagatgcttttacaaagccgtaaaacagaggatgagctctgtcaggtcttgatttgaattcaggatgatactgaacgcccacataaaagtctctgtctgaaagctccacagcctctacaagtcttttgtccggagacattcccgaaagggtaagcccattgtctgtgagaagctgcctgtagtcgttgttgaattcatagcggtgcctgtggcgctctgatatttcaggcttgccgtagcatttcatcattgtagtgcccggctctattctgcaagggaatgcgcccagcctgagagtgccgcccttgtcgatatcatcattttgtccaggcatgaaatctatgaccttgcaggagcatatttcgttaaactctccggagtctgcttctttaagtcctgcaacatttcttgcaaactcgattaccgcaatctgcatacccaggcatatgccaagataagggacaacgttttctcttgcaaagcgcgcggcaagtatcatgccctcgatacctctatcgccgaagccgccgggaacgagaattccgtcaagatccgcaagggcgctttcgtatgtgtcaggggtcagggtttccgagtctatccagcggatatctatgcctgtgcccaaggcgcagcctgcatggcgcagagcctctgcaaccgaaagataggcgtcgtgaagctgtatgtatttgcctacaagcccgatggttacgctgtcctctgtgttttttatggcgtttaccatagcctcccactccgcgaggtctgcggcaggggctgataggctcagctctctcaaaacgacagacgagaaattgtgagactcaagcatcagaggagcctcgtacagacaaggcagcgttatattctcgataacgcagtcacgtctgacattgcagaacattgatattttgtcgaagatggcaggctcgatatgcctgtcgcatctcagaacaataatatcaggtctgatacccattccctgcagctccttgacagagtgctgggtaggctttgatttgtgttcatcggaaccgctgagaaacggtaccagtgtcacatggataaaaaggctgttttcctgtccaacctctattgcaatctgtcttactgcctctaaaaacggctgagactctatatcgccgatagtgccgcctatttctgtgatgacaatgtcggcgtcggtctgtctgcctactctgtagacaaattctttgatttcattggttatatgcgggataacctgcacggttgagccaaggtattcgccgcgtcgttctttgttgaggacattccagtaaaccttgccggttgtaagattggaatatctgtttaaatcctcgtcaataaaacgctcgtaatgcccgaggtcaagatccgtttcggctccgtcctctgtaacgtatacctctccgtgctggaaaggactcatggttcccggatccacattgatgtacggatccagcttctgagatgccactttaaatccgcgctgcttgagcagacggcccagtgaagcggctgtaatccctttgccaagacccgatactacacctccggttacaaatatatattttgtcacgttttcacctcccgccaaaaaaagtgtaaggcattcattcaagcaagggtgataccctttgaaagaatgaacgcctttgctttattacaaaagtatttaaaaaacaataataacctgttttttgtgatttgtcaataatctgtggcaaaaatatttgttgtgaaaacacactttggtgcaaaataggcggagatttaaaaaaatatattataaaagtgaaatttactgccggagaggatataaaaggggagtgaataaatatatcggaggggtgtttatgaaaattgcggtgataacaggcgcttcgtcagggataggggcggaatttacgacctgtcttgataaggacgagcagtttgatgaaatatgggttatagcaaggagaaagcagagacttgagagtatacaggcaagggctaaagtgagagttcttcctatggatttaaacgacagggctcttgtcgccatgacatatatcactcttgaatatatggagcggggcggcaggatatataatatggggtctatgtctgcaattcagcctgtcccgtatataaatgtgtacggagcaaccaaggcatttgttctaagcttttcaagagcgcttaatgtcgagcttaagggcaggggaattcaagtgatggcggtctgtccgtactgggtgaaaacagagtttttcgatactgccgttaaagatgatacggtatcagatttcaacaaattctatacgccgcagcaggtggttgcaagggcgatagaggatatgaaaaagggcagagatgtgtcgttttgcggattcggaactaaaatgcagagaattgcagtcaagctgctgcctcacaggctcataatgaagatgtggtgcagacagcagggaataaaatgataatatacagagccgggagcaattcccggctcagattattttttggagtctgtttttgcgctttgagatatgttgtaggccaccagccggtttgcaaggtcgtgctttgtctctcttaattcctgctgtattttgaggactctgtagtaatactcgttctgtgcctctgtcttagcctgcataagctggttttcttctctggtcttgaaaaatacgttgatgaagaatacgaggagtgatattgccataagtgtcagcagtattccatagcatacaacgagaaagcctgagagcatctgggaggcatcgggattgactatatgccttatcaccataaatataaatacaggtaaagctgtacccataaacagcggcagctttaatttcatattcatatttactatcagaggtatgcatctgaggcagagtatcagcgcaatgacaaagcacaccgcaacggctgcgcagcgcattatgtagtcggctgcggttgaagttgattgtgaaaaccaggtattcatatcggcgcccgttactgcaccatatatggctgttagcactgttactatcgcagttccgaggatgttgtaaaaaaactgatagaaacagtcgagtatgagcatgtctatgagcctgtcaaagcgtataagcattacagttgcagctatcgacagcagatatatgaataacagagcaggggcgttgtcacacaaaggtgaaaacggcagatatgccagttccattgcagagcttgtcaccgcagtaattattacagttacagggacattaaaccgcagcatatttttgtacagtaaagggaatttgataatcgttcctgcagtcataagcagcgcgtagatgatatggtaagtaatcatatgcaaaacctttcgtattgtatgtgcagtattaagtttaaggcacattcgggtaaaagcaggtaagacagaaagcagtatcgataaactgacaatggatattaccctgattagattatttcccgcctgccagaaaccttgcaaatgccagctggctttcgcttctgtggctgcggcttatggttacagccctgccgtcacgaagtatgaagcagccgttttccagagcctttaccatgtgcaggttcagaaatatactgttgtggcagcggtgaaagcttgcaggaagcaaactctctatatcctcgaatttgccgtaaaaagaacagagcagcgtgccgtcacgacctattatgtttatctttcttttatcgcgttcaaaagaggatatgtctttgtaggaaattatatgtttgccgcttttggtttcagcaatgaagaactcctcatgtcctgagttcagcttttgagttgcctttgaaacagctttgcaaagaatttcactgcataccggcttcttcataaaatatatatggtttacatcgtagacagcttcataatagtcatcatatcctgacatgaatataatctggcagtcagggcgtatatccagtatcttttcggcaattgcaatgccgctgcagcagccaagatcaatatccagaatgaaaatatctgcatcaaaaatgccgtcttcaagatcctcaagcattgatttgccgtttgaaaaagcaataatcttaccgatgtcaggtaaatctgtatcagcaagtctgtcttttatatatgctatgctttcgggctgatcatcacaaatcgctatgttccacatttactatacctcactgctgcagtctgataccggtattactgatataacttcaaaataatccccataatccgtataatcaagtgcgcccttgtgtttctttactatccttttgactattttactcccaagaccatgatcacgactgttatttttggtggttgccatattgttttcgagaggtgcctcgtttgcaggcttgctgtttctgacagtgagtatccactggcctccggttatggtgctgctgagacttacctgagggttttcggttctttgcgctgcttcaatggcattgtcaagaaggttgccgaaaatgcctatatattcctcgtcagtaagagcagtacattttaaagtgcctgctgatatttcgagagccacttctgaatcctcacatagcttttgcttgcaggcaagaagcgcatcaactataggattaccgctgtagcgctgccccgcatatttctcgcagtcagaaaccagttcctgaagaaactcgctgttttgttttttgctgtttatttcatcaagaagcatgctgatttctctctcatactgttcgatttctttgagctgggaagcctgaagctcctgttttttctcaaggaattcttttttgtattttgatttggttattatgtatataacggcggctatgacaattaacgctgccgtacttgaaataattataaggtatctgatagcttctgctgtcataacttgtagatctccaatttatatattgccgccataagtaaaactgcaggttcctaagccggcaggcagctgataacaggcaatccgtttatattctctgtgtattaagtagtttagtatattttgccgtaaaagtcaaatatacagctaaaagttacaattaaagagccaaaagtgacattttcgaaaaaacagagcagaatttttgtataataatgaagaatgatgatgaagtgtcatcgtctgttaacagtttctctggagaaactgatgccctgcggtgaattatagttttggcctgaagcattgagtgaagagtaataaagagggtagaagtcagacagatatattccacagtatatgtgtctgatatatatgagcatttcctggacgaacaagaggaactgctcgatattcttacatagaatgtatccgggaacgtataatcaggcagctgggaaactgttgacagacaatattctgttaaatgctaaacggcaaagagaaattgtataactaagcttatatagtttctttttgtttgcaatagagtatttacattcggcggatatattatataatagataggaatgactcaggcatagagtcagttctgtcttccaagataagagattgagctttaaaaggagggattttcaaatgaagagaagcagaatagcaagtgtggtacttgcgattgcagttgttatgagtatgacctttacatcgggaattggcgcgtttgcaggtactgttacaaacggtacgtctgctgcggggacaatagcagctcaggatatgaacagcactgatgacagcagctatatttcatatactgcaaaagcaattaaaaattcaagcgccgtagtccctgttacagttaagtcggcaggtacaataatagtgcctctgcagggaatagcggtaggcaaaaatctgacggtttcaatgcacacagatacagctgcaacagatgcaaacaagattggctatgctaaatatctcagcagttcaactgttaatgatgtactgacagcggatgtggccaaggcaggtacatattatcttaagtttgatacatgggcaaatgtagagcagtcagctgattttcaggttaaatttgcaccggcagagggcatactgacaagcggcagggtgttttacggatcgtctgcggataacagcttttcatattacaaaattacagttccgggcaacggatatctcaaggttacagtgcctgagaaggacgagtcatcatcatatcactactattatatcaagttgacaaattcaggcaaaaagaacctgctggcaggagacaagtcattgtatgcatcaaataactatacgagctgttttggagttaaaaaaggcacatactatgtcgcagtaaagaacagtgataagtactacggactgaaggttacattcagcaacgttaaggaaaacagcgggacttcaaagagcaaggcaaaactgatcagcaagggcagcactaaaaaaggcgttataactgcaaaccagaaagcaggaaccggtgaatggtataaattcgtagtaaaaaagacacagaaggtaacgcttaaaataagcacaaagctgggtggatattccggaggcatcaagtttgcagtatacaaaaaaggtgacagatatcctttcggctcaagaaacgcatatgatacagcaagcggtgagatacagccgtatactttcggcaaaggcgaaaagcttgcagcaggcacttactatataaaggttgaaaaatacagtgacggcaacggatactactcgattaaatggaaatagaatacacatatggagtctgtgatagtgcaggctctgttttttaggttttgccaaatataagagagcttataaataactaaataactaataaagcttagaatttaaaagcaggttatgcaatccaaaagcatagcttgcttatttcatatcaggtttttaaatcaggtccttaagcatatccgcatcaagtctgccgtagccttgcgagtttctgtcctcctgttcaaaaggaattgttgcagacataagtatccttttgacctgatatgcggtaagctgcggatatgcgctgtaaagacatgcggccgcgccagatacaacaggggcggacattgatgtgccgctttgagtggctgtggcggttttgccgggagccagagagcatatatcctcaccgtaagcaaccagatcgggcttcatatatgtaccggcaggacctctgctggaaaactccgagactccggatgtaccgcagcagcctgcggttattacatacggtgaatttccgggacttgatattgtctttgcggcaggaccgctgttaccgcctgcggcaaccactgtaataccgcttttataaagagcccccacgccaaggtgaagagggtctatgcggacgctgtaatcatatgtcataccaagggacagatttaccacccgtatattgtatttcctgtgattgtcacatatccactgcattgcggcaagtatacccgaaacattgccgctcccgtctgaatccagtactttcagagatactatggaagcttcaggcgcaatgccctttggagcgccagaaaaaccgtttcctgcggctatgcccgatacgtgagttccgtgaccgtcatcgtcatagggcacagttctgctgtttacaaaatccttaaaaaccagcagcctgttatatggttttatgaggtcgtaatgagggtgggtgccggtatcaagtacagcaatagatacgcccttgccgagggagcctgcatcagcatttcccatgcatgacttactactctcctgcgcttcaaattttgtaaccttcatatcctcggtggcagccgtaataccccgcagcttaagcaccgcagcagtgttttcttcgggaacatccacacacagagcccctataaacggcagctcgtatctgatgtgcccatatgatttttccacacactccctcataagctctcctgaatttctgcagcatattatatatgatttcattaatacccctcccggcaagatactccataatatgcataaacccgcggcggtgttaatatatttatccaaaggagatggtacgatggaaaaccacagcatatttatagaagaaagaaaaagaatgacggttacgggggtcaccgatgttgacggatttaacgaggaacttgttaaaatcactctgaaagaaaaaaggcttatggtaagaggcaaaaatctgcatatagaaaatctcgatatagcaggcgaaaagcttacggttacaggcgaaatatcctctctcgaatatgcaaacgctgcaggcgaaaagagtttaatcaggaaaatactgaaatgagcagtctgatacaatcacagatttttcacataatcattatgtgctgctcaggaatactgtttatgataatatgggaaacagcctcatggtgtggacatattatgaaaaccggcagaatttccagagctttctttgaaatcatattatggatattccaaggcttcattgcagttgcattcctttattactgcgcctacggcagggtcagcgttcacagcttttgcggttttgtggcaggggctgtattgtggaaaatatctttttgtggtacaatatatgatgcactaaatcgggtaaaacaaatactgagaggataacatgggaaaaagcagaagcagaagccgggattttcaccgcaacaatgaagtcattgatttcgatcgggccagagaaaaacgcaggagagccagagccgaaaaagcagagagagtttaccaggcgcgcaaggaagcgccgtcgcagcgcaaggcggcaaagaagaaaagacgcctgctgatttacgctgcggtaatagttcttgtggttgcagcaatatctgtttcggcggttgagattatttccctcgaaaaagagaaagctcagcttgcgacagagcaggcagagttaaaaaaggaactggaggcggccaaggacgagcttgcaaacacggacgatcccgattacatagagcagcaggtaagagagaaactcaatatggtatatccgggagaaataatatatgtatcacctgatgaggaaaacaaaatagatgataaagataaatgaagtaattgtagttgagggcagagatgacacctgtgcggttaaaagggcggttgacgccgaaaccattgaaacccacggatacggcattactgcggcaacatggaagcttatagacaaggcttacagcacctgcgggattatagtgtttacggatcccgacagcgcaggtgaaagaataagaaaaagaattattgagaaataccccgatgcaaaggaggcttttcttacacgaaaggaagccgcaaaggacggggacataggcatagaaaacgcaaaacctgaggatatcgaggcggcgctttgcagggtatgctgcgcggcggagaccaaaggcagcggcgatacttttgatatgtcagatatgatagaaaacggtcttacgggcgaaggctccaaagaaaaaagacaggccttaggcagaatacttggcatcggctacggcaacacaggaacttttctgcgcaagctgaaccgttacggaattacaagggagcagtttttcagaggattaagcgatgaaactatattcggcacagacaataaacgaaataaaggacaggcataattttaagctgtcaaaatcactgggacagaatttccttacggacaagaatataattgatgaaataatcgaaagctccggcatatcctcaaatgaccttgtcatagagatagggccggggataggtgtgcttaccaagaaggcccttgaagcagccggcagggttatagcaatcgaaatagatcagagactgattccgatacttgaggaaacactgtctgaatacgataactttgaagtaataaatgcggacatactcaaaacagacctcaaagctataatagaggcaaacaaagggtatgacgcggtcagaataataggcaatctgccgtactatatcaccactccgataattatgaagatattagaggatggcgttccggcggattccataaccataatgatgcaaaaggaggttgcagacaggataaaagcgcctgtaggcagcaaaaacgcgggagcgattactgctgccgtgcagttttactgcaatgtcacacagattgcatctgtacccaaagaggtgtttataccgaggccgaaaatcgattcggcagtactgcggcttgatgtgctcagctcgcccgcagtagaggtaaaggataagagcatcttttttgagtgcatcaaaaaaggcttcggacagagaagaaaaacaatattaaactctcttaacggagtcggaggtataggcaaggaagaacttgcaaaggtatttgagataaacgatatagatccgcagcgcagagcagagactctgtcacttgaagagtttggaaagattgcggacactatttcagggggcagataaaatgaacagaataaaggacatatatcgcaggctggcacagaagaaatacgtcaacagcctgacagtcacagcagtaatagcgcttctcataaacttgataatagaaacagcggcaagacattctctggtacaggcgtttgtatttgcatttacaagtccgctggtatttttaatcaatgcctgcataatatttgcgacactcagcattgcatgtcttttcaaaagaagagcatttgtattatcgttcatatcttttgtatggttgcttctgggtattgcaaacggtgtgatacttctaaagagaatgactccgtttacaataaacgacctgacaatgctggaggacgggttttcaatcctgcctacatatcttacaaactttgagattgtattgcttgccatagcggcagttgcagtaatagcaggatttgtactgctgtttatcaagggacctaaaaaaagagaaaaaatcaaatacaagagaaatatagcggcggtaattgtcataatgctgggaaccgtaggagttttcaatctgggtattgcaaccggggttgtagatactttcttcggaaatcttgcaatgggctacagggacaacggcgttccatacagcttcattagcacatggcttgatacaggcatagacaagcctaagaattactcgaaagacgagatactcggaatatacaagcacggcgagcttgaaaatatggacaaggctgtagagcaggcaaagacggaggatactccgaatataatattcctgcagcttgagtcgtttatagacccgcagctggtaaattccatagagtgctcggaggaccctattcctaatttcagaaaccttatgaagaactattcttccggctactttacagtgccggcagtaggcgcaggcactgccaatacggaatttgagtcaattacaggtatgagtgcaaagttcttcggaccgggagaatatccgtacaagtcggtacttctggacaagacctttgagagcattccttatgatctcaaggagattggctacagtacccatgtcatacataaccacagaggagttttctataacagaaatcaggtgttcaaaaatctcggatttgacgatttcacatctatagagtatatgaacgatatcgaaaaaactcctaagaactgggctaaagacagcatacttacagaccagataatgacggctctgaacattaccgacagcaaggactatatctacactatttcggtagagggtcacggtaaataccctacagagcaggttattcaaaatcctgaaatagaggtaaccaaggctccaagcgaagaaaagaaatggcagtatgaatactatgtgaatatgatccacagtatggataagttcatcaaagagcttacagacagcctctcgcagtttgatgaggatgtggtgcttgtaatgtacggagatcatctgccggcgcttgatatgacagaggatgaaatggaaagcggttcgctttacaatacccagtatgtaatctggtcgaacttcggaatgacaaaggaggacaaggatctatacgcttaccagataggcgcagaggtgcttgacagactgggaatacacgagggtacgcttgtgacgtatcatcagaattattcggacagcaaatcctacaaaaagaacctcagagctctaggctatgatatgctttacggcaaacagtatgtatatcagggcaaggtatggcagcctacggatatgcagatgggcatgaagaaaatcagcatagacaagatagttcagattggcgaaaagcgatatatcaaaggacataatttcacacagtacagctatgtgacactggacggcgtgaagcttgataccacatacttaagtcctacgcttctggctcttgaagaggatgtggatcctgaggcttccgacagactcaaggtaagccagattgaaaaatatgatgaaattctgtccacaacagaatagagattacaaaacgggggccaaggtctccgtttcaagctatatataactaatcagactgattggggtttgcagaggagaataggtatgggttttactatgtatctggcagcagtatatttgcttctgtttgttatcgacatagctgcatttttaaagggcaggaaaaataaaaaatggctgccgtttataataattactgcaataatggcggcggggataatagccttagtgtgcttatggattgcctcgccaatgtagaatatagcggctcagaaaatcaaaggatgtggaggcattgtaaatgagctgtccgtattgtggtaaagaaatgactttaggatatatacagtgcagagatggtgtctagtggactttgaagaagcagtttgttgctttactatcttttaataaagtgattgttgattattcgggagaaaaataacttccggctcggatgaccgggtaaactcaatacaaatatattatatcaggaggaaaaagaatatgtacagatgcacagactgcagcaggcttgcctgctttggtggagatgcaggcagcgctcccgaaaactgccctatgagggacattgcagcatcagatgaaataagagaagaatatatgagcagtgaaaacaatagattttttgtagaggctgccaaaatagaaaaagagggctacggccagtggaacagagtcagagaaaccatagaattctgcaaaagaatggggtataaagaaatcgggctggcattctgtctgggtctgataaaagaagcaaagaccgtgcagagaatattcgagtcacagggcctcaatgttcactccgtaatatgcaaaaccggaggaaatgacaaggggacctttggcataccggagaatatgaaactcaaagaggggcagtttgaagctgcctgcaatcctataggacaggcaagatttcttgcagatgaaaaagtagacttcatagttgtcctgggcctttgtgtaggccacgactccctgttctataaatatgcggcaaaatatacagatgcctttgtaacaactcttgtatcaaaggacagagccacaggcaacaatccatgcgccgccatatactgcgcgggaggatatttcaaggataaattcggagaaaaataatgaaccttttaagaaatactgcaaaatttgcaatgagcattactgccgattatataaacaaaggcgataccgtagtagatgccaccgtaggcaacggcaatgatgcgctggcgctttcaaggcttgtgggcgaaacaggcaaggtatacggatttgacattcagccccttgcgcttatgagagcttcagagtttctgatgcagaatgaggccccctcggaaatagaacttgtatataacggacacgaggaaatggacaggcatatttcagaggaagtttctgcaatagttttcaatctgggttatctgccgtcaggggaaaagcagattacgaccacagcggacacaactataactgctcttaataaagctatagatatgattaaagcagacggcatagttactgttgtaatgtatccggggcatcccgcagggaagattgagaaagacaaggtgttgggatggggaaacagccttgataaaggtatatatcactgcgcatacatctctatgataaatcagcctgaaaacgcgccctgtataatgcttgtgacaaagaaaaaataggtaaagtataatgaaacatatcagaaggagtattaaatggaggagagaattttagtagttgacgatgaaagggaaatagccgatttgcttgaactgtatttaaaaaatgacggctatactgtctgtaaatttcataatggagcagatgctcttgagtgcattgagaatacggatattgctttggcgatacttgatgtaatgttgcctgacattgacggatttcagatatgccgtaaaatcagagaaaaatattattttccggtgattatgcttacggcgaaaattgaaagcggagataaaataatggggcttacactgggggcagatgattacatcaccaagccttttaattcgctggaggttgtggcaagagtaaaaacacagcttcggcgctaccgaaaatacaatcagccggcaaacagcgcagaagagcaaaacgaatatgatatcagaggactggtaatcaataacgacagtcacaaatgcacgcttttcggcaaagagctgcagcttacacctattgaattttcaatactgtggtacctgtgtgaaaacagaggcagggttgtttcttcggaggaactgtttgaagctgtctggaaagaaaaatattttaacagcaacaataccgttatggcgcatatcggcagactcagagaaaaaatgcacgagcctgccagaaatccgaagttcattaagactgtgtggggtgtgggctatgaaattgaataacagaaaggaagcttcagggctttccagaagcatcataaacagatttttcgtatacctgcttattttatttgccgtaatgagcggaggatattttgtttcatggattgttcttacaaggactattgtgtggagcagtttctctccggtttatgagttcttcaaaacccttcaggctcttgcaccatatattataatagttgctctggtggcaggaggcatcatatttatgcttaaagcaatcagaaaatccacagggtatatggatgaggttgttggagccgccaaagctctgtctaatcctgatgcgccgcctgttgagttatcgaatgagcttttagacatacaaaacgagcttaatcttgcaagggcaaggtcgcaggaaaacatacggcttcgtgaagaggcggagcagcgcaaagcagatatgattatgtatctggcgcatgacctgaaaacaccgctttcctcagtgctgggatatctgagcctgctgcatgatgaaaaggaaatctcgccggaacttaaggagaaatatctgtccatagctctgggcaaagcagagcggcttgaggatttaattaatgaattttttgagattacacgatttaacctttctgaaacggtgctgcagtacagcagggttaatcttacaaggctcctggagcagcttgtatttgaattcggccctatgctgaaagaaaaaagtctgacctgcagccttaaagcagaggaggatataatgctttactgcgatgcggacaaaatccagagggtgtttgacaatcttctgcgcaatgcagtaatatacagctttgacggaagcgagataaatattgaagcggaagtcgcagaaaaaaacgctgtgatacatttcagaaaccgcggcaacaccattccaaaggaaaagctggctcggatattcgagcagttttatcgcattgatgcctcaagaagcagccgcggcggcgcgggactgggacttgctgttgcaagacagataacagagcttcaccatggcaccataagcgcggcaagcgaaaacgaaacaatagattttacagtcagtctcccgctttcgtaagaaaatcgtaagaatttaaacagaaaaacataagaaatgtgtaggcacaaacagataaattaaactcctgtttttagtacaatagcagtacttaaacaggagtttttatatttataaagctcctaaggaaaatcagcctgcgcacatgatgcagcagaaagagaaggaagggattaaataatgaaaaagaaaaagcttgcggtaattttcggagggcgctctgcagaatacgaggtgtctctgcagtcggcatactcggttatatcaaatattgatgcagaaaaatttgatgttataatgcttggaattacccaaaacggtgaatggtatcactatacgggaagtgcggaaaacatagccgataactcgtggtccttggatgccgggaatatgtatgaaatatgcttttcacaaagcaccgaaacaggcggctttatagagtttgcagacggcagttatactactgtaaaaattgatatggcatttcccgtgcttcacggaaaaaacggtgaggacggcacagtacaggggcttttagaacttgccggagtgcagcttgtgggctgtgatactctttcctccgcgctgtgtatggataaggacagggcgcataagcttgtaagccttgcgggaatttcagtgcccgaatcgattaccttcaaaagagcggatatggaagcagcgcttgagaaaattaacagagagctttcctatcccgtttttgtcaagcctgttcgcgcagggtcctcctttggcatcacaagggtagtgtgcagtgatgagcttgaagaggcggtgttcaaagcatttcagtatgactgtgaagtcatagcggaggaagctgtagagggctttgaaacaggctgcgcagttatgggcatcgacaagctgatgacaggcagggtggatgaaattgagctttcgggaggcttctttgactataccgaaaaatatcagttggtaacttcaaaaattcatatgcctgcaaggatagacgcggaaacagaaaaaagaattcagcaggctgcggtgactatatataaggcgctgggctgttcaggctttgcaagagtcgatatgtttctgactcctgcgggtgaaatagtgtttaatgaagtaaatactattccgggatttacctctcacagccgttttccgaatatgatgaaaggagcaggactgtcgttttcgcagatgctggacagactgctggggctgtacagatgattatgaaaactgtaactcttgacagagaaaaaatatatgaaggaaatcttattttggtaaatgagaaaaatcctataagaaaagcagcagatatacagcttgtgcctgctgatgagaagcggcatgatatcctgcttgaagcaaaggctgcagaggctctgaaaatcctgctgaatgaaatatcggcaggggagtctatagtttgcgtaagcggataccgttctctagcagagcagacggaaatatatgaggactcgctgagagaaaacggcgatgtgtttacacgaaagtttgttgccctgccgggcagaagcgagcaccagagcggtcttgccattgatttagggttaaatgcagacagcgttgattttatctgtcccgactttccacacagcgggatatgtcagcgtttcagagaaaaggcagccaagttcggatttatacaaagatacgaaaaaggcaaggagaaggttactggtatttcctgtgagccgtggcatttcagatatacaggacttccgcactccgaggttataaagcagagggagcttgctttggaggaatacattgacttcataaagaactgcagcagcgaatacccacttgaatttcagaacacctgcatttattatgtgcctgcttcggaagggcttacagagataaatctgccggaggataaagcatatcagatttcaggaaataacaaagacggatttattgtaactgtgcggaggtagagctatgactgaaaacagatattatacagggatagataaaatgcgctttgcggcggcgcttctggttatagccatacatacatctccgcttgattcctttagtgaaacgggaaatttcattctgacgcgtatctttgggcgtgttgcggtaccgtttttctttatgacatcgggctttttcgtgctttcaaaataccgctatgacggcagcaggctgtataaattccttaaaaaaacagggattgtttatgcggcggcagttattttgtatctgccggtcaatatatacagcggggctttttcacagtctgaacttctgccaaatattataaaagatattatctttgacggcgcactttatcatctgtggtatctgcctgcatctatggcaggcatagtgattgcagatctgcttatacgaaagctgggatatggcaggggctttgcggcagcagcagttttgtacacgataggactgttcggtgacagctactatggcattgccgaaaaaataccggctgtcgaaggcttctacaatcttatctttcaggtgtccgactatacacgaaacggcatctttatggcgcctgtgtttatgataatgggcggatttatttccgatatgagaggcagggtttcatttccgaaagcctgcacaggtatgattctgagccttgtgctgatgttcggggaggctatggtacttcaccaaaacggtctgcagaggcacgacagtatgtatatatttctgctgccgtgtatgtactttctgttcagtgcggcgttgcatttcagaggcaggcagaaaaaagcccttcgcagtgtgccgctgattgtctatatcatacaccctatggtgataatagctgtaaggggtgttgccgggctgcttcatatgcaggattttttagttcataacagtctggtgaattatgttgtagtctgtaccatatctgcagcggcagcctgcatgcttgcggtattatgggagagaaacggcagaaaacagaagcataatataaaaacggagcgcgcatatattgagataaacctgggcaatctcatatacaatgcccggacattaaaaaaagcaatgccaaaggactgctcgcttatggctgtagtaaaggcggaggcctatggtcacagtgcctatgagattgctgtctgtcttgaaaaaaataatataaagagctttgctgtcgcaacaattgacgagggtatcaggctgagaaaatacggcataagcggggatattctgatacttggttataccgatgtgcatagagccggagaacttaaaaaatacaggctgacccagactctgatagattatgaatatgcagggaagctcaacaggcagggagtttgcataaaagctcatataaagatagacagcggtatgcacaggctgggctttgcctgtgatgatattaatagtattaagaatgccttcaaaatgaaatatctcaaaatcgaaggggcgtttacacatctgagcagctgtgacagtcttaaaagagatgatattgattttacccaaagacagatacagagattttatcaggcaataaacctgctggaggactgcggtatttcagtgcctgagctgcatattcagagcagctacgggctgttgaattattccgggctgaaatgcgattatgtgagagtcggcatagctttgtacggagtcttaagtacaccttgggataaaaccgccttacagcctgagctgcggccggtaatgtcgctcaaggcaaaaatcgcgatgacaagagaggtggcagagggagaatatgtaggctacggcagagcctttagagctgtgtgtgacagtaaaatagcagtgcttccaataggctatgcagacggctttccgagaactctctcctgcggcaatgcaggtgttctcataggcggtaggattgcgcctgttatcgggcggatatgtatggatcagcttatggttgatataacaggtattgaaggggtaagggcaggcgatacggcagtgctcataggaagcagtgcagacagtttcatttctgcgcctgatattgcagaaagctacggcagtatcagcaatgagctgcttgcccgtatgggagcaaggcttcctgtggtagtaaaaaatgtgaaatgaaatacagcacctgttaaagatgaccacgttatgatataatggaggcaattcatatgaagggagttccatataatatgtatataatgtgtggtgatatccgaactgttgaatttaattcagagtttgaatatgagatattaaatgaaaagcttgcacctctatatatacttaacagaggaaacatcaggagatggattgaagaaagagcggcagacggagccagagcaaatacaagggcagtcaagggatatcagagaatatcaaagaccgcaggtgattatcagacggctatgaaagtaaacgctgctgtgattacagataacttctgggtcagcgactgtgacagcctcgcctatgaagatgtggtttttcgcaaaaatgaatactggcgtcttgcactt

SEQ ID NO: 4014 - DNA, 24846 bp, Unknown
  16S sequences of unknown bacteria
aaagcggaaccgcacaaattcccggtcgccgttttccagtgtaccgctgagcagctcgatggtgtaatccccatccggcgtatacagggtcatcgtgggatgctcctcatagtacgcctgctccttgtagcccatcagtgatccgaacatggcatcatttttcatgttgtacctatagatcacggtgttggggtcggtgaacagcctggtgttgcggcagtccgcaaacagcgccccgtaccggttctcctccccgctgtataggtgggagagataatactcattgttatctgtatgcacgaccggataatcgatgggagtatcctctccggtgatccaggccactgtgtcggggcttccggcttggaggctggaaaaatccttttggaaggcacagtttccgcccatattctccccggagccggcagaggctgtgtcccggctttcggtgcgcagattccgatagagctgttccgactgccggtaccggctccactgaaggccgagtgccgtcccgctgaccacaaacatcagcagcgagagcagtatcccggctctgagccagtgctgtgcccgttttccccgccgcccccggtgtctgccgggccggacaggattccgattctcagtgttccagttcatcaatgtaatagtagggagcggcagcactccttactgtcgccccttgattgcctaccagcaaaggcgagcaggactgtcaacgacggcgcgtatgcgccgttcatcttgaccgttgactggctcgactggctttgctatgacaatatagttatttccaatgctttaactgcgaaaggtacaaatcaaactgattacgtctggtttcttcatctgcgttatcgggatttggcatattcgcaaccagataatctaacaaagattccttggattgatacgcaaattccccattagcatagcaccatttacaatagtcctcgttatagcttccgtctggttctcggctaatcagaccatcttcattcaatggcattccgcaacactgacaaacaagttgccgtggagaacccaaaagcgtattgattgacacatcgaaaactcgtgataatagttttaaggtatctgtatttggctgtgtttcgcctgtttcccagcgactaaccgcctgtcgggtaacttgcacacgttcagccagttgttcttgcgtaaggttgtttttctcgcgtaaatttttaagaataccttgtatttccatgcccgtccctcctaaagattgtttttactcattataacttcaaaacggggttttaacaagcaactcgctgttgctacggaatagtgggttgttgtctatcaaattcttgtgtgttactttatggcacataagcattccttcagataacgaatcaccgtttcctcttcccgcacggtatccgccatcagccggacagaactggtatcggtcagctccacattgctgtggttgacaaaataggtggttccatcggcagacagagcggtgattcccacgggagcaaccgcatcggcagtttccgccagcgcaaaggtggtccggtcggtgaagctgtgcaccaccaggaagccgtcagcgatctctaccgggcaggtgtagctcttgtccccgattgtcagtctggcggatacatacccggcattcaggccatccgggtagatcattcggcagttctgatactcccggtggctatggggagtaaaattgtcactcagcatggatacatgggtatccgcatcgaccaccaggacccggaccggtgcctgctgttcgccgctcggctgcatcttatagacataccgggccggattctgtgcccctgtacgggagtcggtactgttctgtccggtgccatagagcaccagatcccactgccgggtggtaccggcgtggtcatcgtagaggaaggtgagctttccgctgagattgggtgtcccgccctcactgctgagcagccggttcagactgtccgggagagtgatatagtatcccggctggggaatgcccttctcctggcccgcggcatttccggaatactccaccagtccctggtagcctgcgccgcccgaatacacggtgagacccgccggtgtcactacaaccggctcggtcttgaccaggccatgtgccgctttcagtcccagcgttgtggtataatccgctgtggaaaccatcccgctcacgggcgtattcatcctgctgatggactcatccgcgcccggacacttccagcgattgtcgcggttatccaggtaccactgatctgccggatgtccgcagtccttgagccgatttcccccgaatccggcgggaagcaccaggctcgttaccccaaaggaattttcaatggcacagaggtcatctccggcgacagacgctgtattgccgcagacaactgctgcgctcagatcattctgtccgccgtacagggcgattcctccgccataaccggactggttatcccggaattccgccttgccgaaccggatgcctttcctgctcatcagacagagaccgccgccgctgttccgtgctgtgttgccggtgaagacagtgccatctccgatctcggcattttccaccgccagaaaagcaccgccgccatacgccgccttgcagccggaaattgtcacgccggagagattgatcctggcactgctgctgttgacatacagatagatgcctccgccgctggcgttttccagggcggtacaatctgtgatctttccgccggtgatgtccacctgcaccgcactggctgtataggccagaagcgcgccgccgccccggatgcggctggaacagttccggatctcgcctccggacatccggaaccggcagttcccggtattatcccctcccatggcgccggagggattgagcacaaccgcgtcgccggtataaccggtgcagttttcgatgacgccgtcctccatctcgaacgaggcattgcctgcaagctgcacaccgcctgaaaccgacgcccagttttcgcagtcacgaatctgtccgccgtgcatgatgaaggaagcatcgctgtccagatacacacctgccggctgtccgcccgccttggaagggccgagcgtcacgccgtcatgcatctccagctttgcatgaccggtcatatagacgatgcagttggagtcgtcctgcgaagtgatggtcaggctctctcggtatccaggctggcccagatggagtctcccggtttcacgcagggtcagagaaccccgctccagacagagggtgtgtccctcgccctggatcgtcacttccttgtcctggatcagcagggcgacattgtcattatgattgactgtcacatcccgcagcagcttgatggtgccgccgtccatcacctgattgactgcctcggtgacagaaccggtcacccacatgccatcggctgtctgatagacggcatcagcttcctctgccggaagcaccgtgtcactcagaacgccaatgggggcctctgccggctcggtgtctgatgcgggtgtttcttccgcctcttcctccaccggggcctccttgtcctcctccggggcggggagcgtttcttcttcgctctccggctggctgcctgcgccaaagccctccaccgcaatgtcccccatttccccctcggtcaccgagaccatctcattgccgggaggcggctgatcctccggggcttctgccagcgcaaccacgggcaggctctctgtgatcagcagagccgccgcaagcagcagcgcaaggcatctggctcccttttgcttattgagtttcatttgtgtttcacctcatttgactttcccttttaccgcacccgggacaatagacagatgcttcctgcatccgggcagcagtgatgctttcattccgggacccgaatcccacagaccggagcggctgttcccttggaaccagctcccgccgcaggccatctttgaactgcaaggcaccctgtgccctctcactctcctgcggcgctgttctgtcctctgatccggagcccgactgacctgccaacaaagtccccctgtgcagcaccggaaagcctccttgggtgtcccgctgcaggctccagtatgcaatatccggaaattctggaataatctgacctcattctcaggtttctgccattctaccatttgaggtgttcatttcgcccttccgcagcgttccatatccgttccattgcagaaaaaattactgattttcagccggataaaataaaaaagtgtcccctggttaaaccaagggacacttttcaggcagttcatcgctgctctcagttctgtattggatttatgccgcttccgacgaggagagaccaggcacaacatccggcggtgtggtggtatccacaggtgcttcacccgggtccttgatgccgacgatgtagtattcgccgtcctccttcttcatgcggtagatcatgtacttatccggggtgggggtgtagctgtcgccgtcctcggtggtggtccagctggcgccgggcgctacatagcccacggtcacctcatagacatcgccgttcttctgcatatccacaaccatcggcgtatagtaaccgccctgggccatcatgggcacccggtagacattgttctccgcgtcgtaggtgtaggagatgccgtcctcatccagcgaggtatgggtgagcttgacctccgggccatacagcttgacagccgctacctccacatccgataccggaatcaggatcatgccgttgtcatcataggtgtagcttccgcgcttgtcgctgtacatgcaggaccagatcgaggtcttgaccagcaccttgttgtccacgtcctggatattgtcgaagggaaccgggtcgaacatcatcaccggctggatctgccgctcgatctgccgcagcagcttggaattatcggtgagctttccatagagctgtaccgcaccatagatcaccgcgatcacgccgatcagggccagcaggatgtaggcgccgcccaccggtgctgcatagcgatgcttgccgcgcttcttccggggcttcttctgagccggttcctctgccttttctgcggaagctgcggcctctgccggaacttcctcggcaggctgttctgcgggggctgcggcctctgccggaacttcctcggcgggctgctctgcgggagctgcggcctctgccggggcttcctcggcctgtttcttcttggttctggaagcagtgctgccggttcctgtcttgcggcggcgggtagtccgcttgggggccggctgttcagcagcttcttccgctgtcttttcggcgtcttctgccggcgcagtctgatccataatcagctgggtctgctccgccggttctgtcttttcagctgctggattgcgtctgcggcgtgtggtgcgcttgggcgccgcagcaggcacctgcgcagtctgttctgcgggctccgatgcggtctgctcctttactgcggcttcttcctgctcaagccgctccttctgatcatccatctatggtcctcctgtatttccaaagccgtcagacggctgggatcattcatgatgcacccgggattttcccggtcaatcatagatattatagcatactcccatctgatttgcacgggcgaatttggacagcctgtgagcattctgtaaatcctgcaccgaaaaaagcctgccggccttccctcctggggaaagcggcaggctttggtgattccggtatggatcagtcgtcgttgtccttggcttccatggaggaacggctccggtcgaaggtcacacgcagacgtgtgacacgctgttcgtccacttccagcacctgtacggtaaagccatcgtattcgaacacctcgccgggctcgggcagatgttccagcatttccatggcccagccgcccacagtggaggattccgactcaaagtgacggttatagtagccaaagtcctcgaacaggtcgtcgatatccatatcaccgctgacctcatagctgccgtccgggagctgctggaacgggagttcctcctcctcgtcctcgtcccagatgtcgccgacgatctcctccagcagatcctccatggttacgatacccatggtgccgccgtaatcatcggtgacaatggcaatgtgtgccttccggcgcttgaattccgccagcatgctggcagcggtcttggtcttatgcacaaagagcggttcggtgagcatggagcgcaggtcgatctcgccgccccgtaccagggcttccaggaagtcccggctctggaggataccgatgacatggtcgatattgccgtcatagaccgggatacgggtaaaacgctcctccagcactacctgacggatggagtccagggaatcatgaatatccacagccaccagatccacccggtgggtgagcagtttctgaaccggcacatcattgaaatccagagccgactgcaccagctgggcttcgtcctcctgcatgacaccctcttcctcgatggtgtccagaatatatttgagctcttcttcggtcacggacgggctcttgtctcccttagaacagagccgtaccatggcccattgaagcaaccggaagatgcttacaaccggagtgagcagaacgatcagaaaatgcatcgatccagcaatggtcaacgccagcttttcgctgttttccttaccataggttttgggcaggatctcaccgaagacgagcaccagcacagtggtgactgcggtggcaatcacagcgcccgacgcgccgaacagggccgtggtcaccgtggtcatcagggcggcggaagcggtgttcaccacattattccccaccaggatggtggaaatggtgcggtcatagttctctgcgatatccagggcgatcttggccttcttgctgccgttatccgcataacttttcaggcggatcttgttgacggtggaaagggctgtttccgatgcggaaaaatacgctgaaaatgccagcagtaccgcaagcaatatacagtccgatgtgttcaaatttgttcaactccaattttataatcaatatagaatttcagccagaggccggacagcttcttataaactatcattactattttatcaaaataaaaaccgcttcacaaccgaagttttcgcttgtttccagcgtttttcaccggtatggccccaattttccccaaaaataaaaaacaagggacgatttttcagtcgtcccttgcccaaatgcaggttattacttcttttttgcttccatagcttccagcgcatcccgacgggacagattgatccggccctgggagtcgatctcggtcaccttgacaatgatctcatcgcccaccgataccacatcttccacgcgttctacccgcttggtatccagcttggagatatgtaccagaccttccttgccgggagcgatctccacaaaggcgccgaagttcatcagacgggtaacacggcccttgtagaaggcacccacttcggggtccttggcaatggtctcgatgatctgtaccgcacggcggcagccttccatatccacgccggatacaaagacatgaccatcgtcctcgatgtcgatcttgacgccgcagtcagcggagatcttctggatcaccttgccgcccgaaccgattacttcacggatcttctcggtgtcgatcatcagggtgagcatcttgggagcatacttgctcagctccggacgcacttccggaatggccttgagcatgatctcatccaggatgtagcagcgggccttgtaggtcttgtccagggcgctgcggatcacatcatagctgatgccatgcaccttcatatccacctggatggcagtgatgcccttgtgggtaccgccgaccttgaagtccatatcgccgaagaagtcctccaggccctggatatccaccatggtgctccagccgtcgccctcggagatcaggccgcaggagataccggctaccggagccttgatgggcacaccagcgtccatcagggccagagtggagccgcagatggaagcctgggaggtggaaccgttggaggagagcacttccgataccagacgcagggtataggggaactcctcaaccgacgggatcaccggacgcagggccttctcagccagagcgccgtgaccgatctcccgacggcccgggccacgggaaggacgggtctcacccaccgagtaggaggggaagttgtagtgatggatgtagcgcttttcggtctcctcatcgatgccgtccagcagctggagatcccggatggaacccagggtggcaatggtcagcacctgggtctggccacgggtgaacatacccgaaccatgtacccggggaatcaggccgacttccgcagccagaggacgcatctcgtccatgccgcggccgtccacacgcttgccctcatcgagcagccagcggcgtaccacaaacttctgcagcttgtagaggcactcgtcgatctgcatctcctgctcggggtagatgggatcaaagtgggcgtgtacttcctcataaacgggacgcagacgctcttcccggatattcttgtcatcggtatccagggcatacttcacacggtcgatggcatattccttcacagcctcgaacatatcgtgatccagttccttggattcaaagctgaacttgggcttgccgatctcagcctgtacctccgcgatgaagcggcacatcttctgtacttcctgatggcccttgatgatggcttccatcatggtgtcgttgtccacttcattggcgccgcactccagcatacacaccttctcctcggtaccgcagacggtgaggttcaggtcgctcttgtggcgctgttccgcattggggttgaggatcagttcgccatccaccatgccgacgctgatgccggcaatggggcctgcccacggaatatccgaaatggacagggcaaaggatgtacccacaatgccgcatacctcaggggagcagtcggggtccaccgagaggacagtcatgaccacagccacatcattgcgcatatccgacgggaacagcggacggatggagcggtctaccacacgggaggacagcacagccttttcactgggacggccctcccggcgcaggaaggagccgggaatgcggcctaccgagtagagcttctcttcgaagtccaccgacagcgggaagaagtcgatgccgtcacggggcttctgggaagcagtgacattgaccaggacggtggtctcaccgtaacgcaccagacaggagccgttggaaagtccgcacattttgcctacttcaaagctcatttcccgtccggcgaattcggttttgaatacgcgaaaattctcgaacatcaattttacctccttagttggagccggaccgatccgcagcctgatctttttagcaatggacccgccgctccatccgggagggatcgggcggtcggtctactgctaaaagagtacaggacagccggtctgtccggcatcccatataagcgcaaaaggcaggtgaatggaccacctgccttcttaagccgtaaaaaactattacttgcgcagacccagcttggcaacgatggcgcggtagcgctcgatatccttcttctggagatagttgagcagatttcttctcttaccaaccatcttcagcagaccgcggcgggagtgatggtccttctgatgaaccttcacatgctcggtcagatcgttgatccgcttggtcaggattgcgatctgtacctcagcagaaccggtatcggtctcgtgggctctgttttcggcaataatagcctgcttttcttccttgagcatcatagtacattcacctcatacaaatttttgtacagccatgaactaagcctgaggcctggtgaacagccgcggtaatccagcggcaaacccctcaagctgagtacaggtcagttaccaatagattgtagcacagcttcgtctgtttgtaaagggatttcccggtatttttcgcagagttccaccgatttccgcgtactgtcctcaatggcagcccgcagctcctccagagagccgaatttcttctccccacggacaaaatgatagaattccacaatgagattcttcccatacagatcgcctttataatccaccagaaaggtctcgctgaggacggtctgcccgcccacggtgggtttcttccccacattggtggaacccacataccgttttccatcacagaccgctatggtggcatagaccccgttctggggaatgatctgctcatccgggaaatactggttggcggtgggatagttccactgccggcccagtcccctgccgtgcaccaccggcgcaatgagcgtatagggatgccccagcagacggttggcagtttcgatctcaccatcccgcagagccttgcggatcagagtggagctgataacctccccattctcccgctccagcggcacaacgatgacttcgatgccatactcctgcccgagctgacagagcagctcggcattgccggcagcattcttgccgaagtggaagttctccccgcaggccacaacccgggcctggaagcgttccgccagcaccttccggacaaactcctccggcgtcaggtcccggaactcctcaaagggcggacggaagatctgccgcacccccatgcgctccaggatatactgcttgacctcatcggtctggatcagttctcccaccggcttggggccgccctttcccggcggggaaaaggtgaatacacaggggatcagtccctgctggcgtgccgcctgcaccgctgcggagatcaccttggtatgtccgcgatggatgccgtcaaagaagcccagcgccactgcggtgggacgctccggcagatgtgcggacagagtatctgagaggatcaaatgcagtccttcctttcgcttaaaaatcacaggagtttgaagagcttgtgggtcaccagccgcccggtctcctgatcgggggcggcaatgcccaggaactcccctgcctcggaccagactgccagctcctccccttccgggagggtgaactgggtcagggagagaggcgctccgttgagaaacagccgggtgagcttgggagtgagggtgagccggggcagacagtcaaaaatccgctccaccgggatcaccgcctcctctgccctgccctctgccgccagggcggtgagctgttccagggtcaggcagtccgcttcggtaaagccggctgccatggtgcggcgcagctgggtgagcatggcgccgcagcccagcttttcaccgatgtcatggcagagagtgcggatataactgcccttggagcagtgcacatcgatctctgcccaatcctccccgagatccaggatctcgatggagtagaaggtcaccgggcggggcgtacgctccacggtgccgccctcccgggcgatgtcatagagccggcgaccgcccacctgtattgccgaatacatgggcggcagctgcatctgctccccttcaaaggagcggatggcggcgatgagttcctcccggctcacccggacttcccggcgttccagcacggtgccggtacagtcctgggtatcggtggtgacgcccagctggaaccgggcccggtagcgcttatcctgcaccggcaggatatcacaggccttggtggcccgccccagaaagaccggaagcaccccggtggtcatggggtcaagggtaccggcatggcccacctttttcatgtgcaggatgccccgcacccgggcgatcacatcaaaggaggtgtgctcggcgggtttgtcgatgcagatgattccatctctcatgcgccggtcagttcctttctcacggcttccagcagcagttccttggcatgttccagcggaccgggcacattgcagcccgccgcccggacatgtccgccgccgccgaagttctcgcagatggcagaggcgttggccttttcgccggtccgcaccgagatcttgtaggtgcccgagggattctcccggaaggccaccgccacatccacgccctcaatgcgccggggaatggacacgatgccttccagatcttccaccttggcgcccagctcatcgagcagggcccgggacatgacaatggtggcacaccggtcatcaaagtgatactccagggtatccatgatgcggttctccagggtcatgcgcttgcgggaaacggtttcaaagagatcgttggtgatacgggcgctgtcagcaccggcatcgatgagatccgcggcggtgcgcagggtgttcgctgtggtattggagtaccggaaacagccggtatcggtggcacagccggtgaacagggcatctgccatgggcttggtcagcggcacgcccagatgccggatcaccgaggtcatcacctcacaggccgccgcagcctgggcgtccagcagggtgagcccggcataatcggaattgctcacatggtggtcaatgcagagatccacccggtccgcatactgttccagcgccgggcccagcaggcccggaccggcaatatccaccgcaatgatcagctggggttcaaactcaggcatttcaatgccgccatggatataggcgaacttctccggcagcggatcagaacaccgcaccgctgcccggcggcccagctgggtcagggcatgatagagcccgtatgccgcgccgatggtatccccgtccggggacttgtggcagaggatcagaatgtcatctgccgttcccagcagcatgcagcagttgtgaatatcggtaaacataggccgctccttttatttatccaggtcgtagagaatccgggcgatgtccgcactgtattcgatggaatcatcgctgatgaagtggaattccggggtccggcgcatcttgagccggctgccgatctcccggcggataaatccagcggcactcttcaggccttccacagcacggttggcagcttccaggccgtccagcgagctgatatagaccttgcagtaggactgatccccggacagatccaccttgacaatgctgatcatgccggtgatgcgggggtccttgagcatacggaaaatatcggtgagttcccgacggatatcctccgtcaggcggtcatgtctgtgagaagccatctcgcagcctcctttttaagacggcgaagcggggcggatcagttgtccgctccgcctgccggtttgtgtattccagttaaaatcagtcgcggtattcttcggtgatataggcctcgaagatatcgccttccttgatgtccgcaaacttctccagggtaacgccgcactcatagcccttggctacttccttggcatcgtccttgaagcgcttgaggctggacatctcgtcctcagccactacaatgccgtcacgcacaacacggatcttggcattccgggccagcttgccgtccagcacatagcagcccgctacggtaccgacgctggagatcttgtaaacctgacgcacttcggcacggcccagatccacatcccggtacttgggagccagcatgcccttcatggcatcagtgatctcgttgatggcatcatagatgatgcggtacagacggatctccacatcttcccgctctgccatctccttggcaacggggtcgggacggacattgaagccaacgatgatggcattggaagcgttcgccagcataacatccgactcgcttaccgcaccaacagcgccatggattaccttgacccggacttcctcgttggagatcttctccagcgactgcttcacagcttccaccgagccctgtacgtctgccttgacgatgatgggcagttccttcatctcgccctcggagatctgggagaacaggttatccagggttaccttgcggtaagcgctgaactgctcctccttggcctcctgcttacgctgctctaccagttccttggcaaggcgctcgtcctcgactgcgtggaaggtatcgcccgcggcgggaacctcggccaggccggtgatctccaccggcatggacggaccggcagcctggatgcggttgccccggtcatcgagcatcacacgcacacggcccagggcagcaccggcgatgatgacatcaccggtatgcagggtaccattctgtaccagcatggtggcaacgggaccacggcccttgtccagacgggcctcgatgacagtaccggtagccatacggttggggttggccttgagttcctgcacctctgccaccaggttgatcatctccagcagggtgtcgatgttctcaccggtcttggcggaaacgggaacacagatcacatcgccgccccactcttcgggaaccagaccgtactcggtgagctcctgctttaccttgtcggggttggcggtgggcttatcgatcttgttgatggctacaatgatggatacattggcagccttggcatggttgatggcttcaacggtctggggcatgatgccgtcgtccgcagccacaaccagtacggcaatatcggtgacctgggcgccgcgggcacgcatggcggtgaatgcctcatgtccgggggtatccaggaaggtgatggcctcgccgttgatgcgtacctgataggcgccgatgtgctgggtgatgccgccggcctcaccggtggtgacattggtcttgcggatggcatccagcagggaggtcttaccatggtcaacgtgacccattacaaccacgatggggcttctcttgaccagatcctcgtccttgtcctcctcgggctcgaacagacgctcctcgatggtgacaaagacttccttctcaaccttggcgccgatttccatggcaaccagggcagcggtatcgtagtcgatgacatccgagatggaagccataacgccgacgctcatcagacgcttgatgatctcagcggcctgtaccttcaggcgggaagccagttcgccgacggtgatctcatcggggatcttgatctccagacgctgacggcgctgacgctccatctccagacggcgcatctgctcagcttcctgctccttgcggctcttgaccggcttgccccggcgctgggacttctggttgagcttctgcttcttgacaaagttatccttctgggagctggcaggggcaatgcgctcataccgctcgttgtacttatccagctctacattggcagcacgggtgtccacatgggtcacattctggcgcacctcgaccttttcggtcttttccgcaccccgggtatccagagtagtagtggcctgacgggcagctgccggcttcttctgatgcttctggttctgctgggccggacgcttctcctcctgcttctgggcaggcttttctgccggcttctgtgcctcagccttcttgggctcaggcttcttctcggtgtgagcctgcttctcagccggcttctcctgaggcttcttctgctctgcgggcttgggagccagacgctcggcacgcttcttttcgccgtcagcaaaatactgatcgaagctcttgacctcgcccttcttggagtagtactccactacatagttgagttcctgatccaccagtacggcagtggccttcttctgctcgccgaaacgggcttcgatcaggtcgatgagttctttattggaaacaccaagatctttggcaagatcgttgagtttgcacttttctgtcatattgtctggtcctccttctcatgtgcgggcagatgcttgagaaacatcctgacaaagccctcgtcgctgacagccagtattcctgcacgcttatgcagcagtctgtcgatgtcccccatctggaacggtgcgtcaaaccagcgaatctcatattgctgcgctatccgcacgatttccttccggcttttgggtgacaggtcttcggacagcagcaccagggccgctgtgccgtttttgcaggctgtgctgaccgcgtcaaatcccaatatcagtttgcccgctttccgggccagtccaatggatggaagcaagctgtcattcatgcgattccagctccttcccgatccgttcatatacctcagcggggatctcacaggagaatgcccgttccagccgccgggccttctgggccttggcaaggcattccgggtccgggcagagataggcaccccgtcccggcttcttgccggtggtatccagggagatctctccttcggggctgcgcaccacccggatcagttcccgcttcgatttctgctccatgcagccgacacaccggcgcatggggatcttcttgatcatatcatgcccccctttcctgcgttttcaggctgcgaagaaattattcttcgccatagaaaccgctctcagggcggatatcgatcttccagccggtgagcttggcagccagacgggcattctgacccttgttgccgatggccagcgagagctggttatccggtacagtgaccttgcagctgcgggcttcctcgtcctcgatctccacattcagcacatcagccggagccagggccgcaccgatgaactcccggatatcctccgagtacttgactacatcgatcttctcgccgcccagctcttccacgatgcccgatacacgggtgcccttggggccgatgcaggcgcccacggcgtccacatccgggttcttggaccagactgccatcttggtacgggaaccggcttcccgagcagtggacttgatctcgatggtgccgtcatagatctccggcacttccatctcaaacaggcgctccaccagaccggcccgggtacgggagatcttcatgcgggggcccttgtcgccggcaaatacatccatgacatagacacggatgcgctgaccatcggcgaaggtctcgccgggcacctgctcgctcttgggcaggacagcctcggtcttgttcaccagttccagggtcacattgccggtcttggcatcggtgcgcagtacagtggcagtgatgatgtcattgcagtggctctgatactcctgcatgatgcgctcccgttccgcttcccggatgccctgccggatcacatgcttggcagcctgggccgcgatgcgtccgaagtccttggtctccagcgggatctcaatgatgtcgcccacagcggcagtcttgttgtacttggcagcctcggccttgagaatctcgttggcggggtcctcgatctcctctacaacggtcttgcgcaccgctacatagaagcgtccggtctcggggttgatctccactacattgtcctcagcgccgttctcgtcccgcttgatggcgatggagatggcggcttcgatcttttcgatcaggtactgcatggggatgcccttttccttttccagcatcgccagtgcttcaaaaaattccttattcatttttcccagttcctcctgctagtctgctgtatcactctgaatcctccgccagttcggcagaggcataatcgtaattgtccacaaggcgaacataggccgcttccgaccgctcaaaggtcatttcattttcctcatccagctggatggtgaccccattttcatcgctggcagtgagcacaccggtgaagtcccggacaccgtccaccggacggatcagacggacagtcacctctgagcccagatacttctggaagtgccagtcccgggtcagttcccgttccactcccggcgaaccgatctccagatagtagctctggtcgatgggatcggcttcatccagcagtttgttcatctcccgggtataggcttcgcactcgcccatggtgagtccttcatccttatcgatgaagatgcgcaggaaccaggagctgccctccttttcaaagcggacatcccagatggtgagtcccatccgttccgcaaccggggctgccagtgccgttaccactgcgacggtattgggtttcttgccttttttagcgccagacggcattctttgatacacctcattttccttgacttgctccaacataagaaaagagcgggtgttatcacccactcctttttcccataatctacaagtagaagtatatcatactttttccgggatagcaacagtttttttctgtaaaaacccgctcccgggccgcaaaaaaacggcgccgcagccatgcagcgccgttttatcgtgtcagaaacaggggttaccgcagcttggcgagctgagtggtgagcagttccacaaaagcgggacggtccacatcatgcagcaccagcacattcttctccttgtgggtgtggtcgaaccagtccacaatggtcttgcccagggtatactgaccgttgacatcaatatccacatggcagagcttgccggtgaagatctcaggcttcagcagataggccacagcacagggatcgtgcagggtgcagccgggcaggtgctctacctcatagtgatagcggctgaagtagtcgataagctccgcagccagtaccgagcagcggttgccgtttgcacggatcacctcgttctcctcccgggtgacataggccttgtgggtgacatccaggccggacatgatgatcgggatgcccgaatcgaacatgatcttggcagcctcggggtcagcgaggatattgaactcagccgcagcggtccagttgcccatatagaagccgccgcccatgatggagaactccttgatcttcttcttgagatcagggcgcacagccagcaggatgccaatgttggtcatcgggccggtgggacagatggtcaccggctcctcggcctcctccagcaccttgcagagcagctcgaaggcggtgaggttgcagggggtcaggtcgggttcaggcagcttggggccgtccagacccgattcgccatggacgatctcagtaccgcccagggccttgcgcaccatgggctgagccgcaccgcgggccaccggtacatccagaccgatgacggtcagtacccggcgggcattgtagaaggtcttatccaccgactgggcgccgcccacggtggttacagcccggagatcaaacacatcgcttgcggatgcagccagcatcagcgcaatggcgtcgtcatgtccgggatcgcagtcaataatcagcgggatctttgccatcttgtttcctccccttacttgtccagcttgctcatcgcttcgatgaacagctcggcaaacttctcacggtccacaccgtacaggacggtggcattcttttccttgccctcatagttgccgggatcgcagatagtggtgccggcagtgaggctgccctccagctcgatgtccacatggcactgcttctccacgaagatctcgggatggcagaggtaagccacagcgcaggcatcgtggatggtgcagccgggcagcttctccacctcgtagtggtaacggctgaagaagtcgatgagctcagcggcaaagacagcgatgcgtccgcccttctgacggaggatctcattctcttcccgggtgatgtaggcctgatgggtcacatccagaccagccatcacgatgggcacgccggagttgaatacaatgctggcggcctcggggtccacatagatgttgtactcggcagccggggtccagttgccggtgtaagcgccgccgcccatgagggagatgcgctcgatcttctccttgaggtcaggacgcaccaggaacagcgccgcaatgttggtcagcgggccggtgggcaccagagtgatcttctcctcgctctcctcgatggtcttgatgagcagctgcagagccgacatcttctcgggagcaaagccgggttcgggcatagccgggccgtccagaccggactgaccgtgtaccatctcggtaacgccttcctcaaagatggaaggacgcatcagcggatggtccgcacccatggcaacgggaatgttgtgtacccctgcaaaggtcagtacccgcagagcattgcgggtggtcttttccagggtctggttgccggcaacaatggtcaccgccttgatctccagcttttccggctcggaaagcgcccacagcattgccagggcgtcgtcatgtccggggtcacagtccataataatcgggattttcctcatattgatcctcctgtattgttctgccgcaatatggcagcaattcccttgatcgttctgaatcactcagagctgcaccggttccagttcggctgccattacctcatccatagtgggagccgaagcagctgctccatgacgggatacactgatacccgctgccttggaagcgatctgcatggtctcctccaccgcacggccctgtgcctggcctgccaggaagaagccggtgaatacatcgcctgccgcggtggtatccacaatggtggtattataggccgggtgacggatcacctggtcccggtcgatatacatggcgccgcggcgtcccagggtgacgaccacccggagatccgggaagcgttcccggaaccagcggacataggcctcctcggtatcctgacccgagagatccttgacctccacctcattgagcaccagccagctgagcttttccagcggcatgcgatggatggtctcatcatagggggagggattcagtgcaatcttcatgccccgcttgtaggcttcttcaataatatagtgggtagtattgatctcattctgcagcactaccatatcgccgctttcgaactgatccagtacactgtccacataggcttcatcaatgttgtagttggagccatggaagatcaggatacagttctgaccacggctgtccacctggatcatggcatgaccgcagacctcatcgccgcccttcaggaagcggacatccgcgccatgctgttccagttcccggcggaacacctcggcagattcaccggcgttgccagcgtgatagaccggaattcctgccttagccagagcaatggactggttaaagcccttgccgcccaggaatgtattgcggtccatggcgcttttggtctcgccggggcgcaaaaaattgtccactgaatagacatagtccagattcagcgaaccgaaattcaataccttcatctcagcacctctttgcagtgtgataaacaaatgaccgggtccctgcccggtacaacctgtaaaaacagcgcaaacacagtcaaaaatacgctattggtataagtatatcgggaatgtaaaaggattgtcaaccaaaagtcatctgaaatttacacaatgttttaatggaaatgctgtcgaatctatcggaaatgttggacttcctgcaaaaaaacctggtcatgaaaaaaccaggggttctgaaggatcaggagtcaaattccgggcgttcccggacaaatccagccacaacatggaaataggggatcaggctttcctcttcacagttggtcaggcggcggtagaccttgctcaccggaccgaaccggacgcccatctgatccagcactggttcgccctcgacgatcacccactgacagccgctgtcctgggggacactcagacggatgcactctcccagataggcgccgaagatcagggccacactgtacacctgatcctctgtgggctcggagtgatggatgtcctcatggtagatctgcaggatctcgtccagaaccgatacgctggcaggggtgtagtccagcaccttcccgaggctggcggcatactccaccgcagtggcggcaagattttcacagcttttggctgcagtattctgtatctccatatttcttctgtcctttccctgggcggtctgccggagtaagaaaaaagacgactacgaatgccgtaatcgtctgattttggagctgctaaccagattcgaactggtgacctcgtccttaccaaggacgtgctctgcctactgagccatagcagcatttctgatttatttttgtgggccatcgctgactgcttgtttattatatcaatccgattgccggatgtcaatactttttttgaaagtttttctgcttttttcgctgcttctgcaaaaaccgcatcactacgcgctttttcgggtggcctgtccggtatgtttttcttcatttcgggggtttcccgcggattttccaaaaataatttttcccccttcctcaaaattttcttccgtgccggatcactcccctccctctcctgcccgggatctcctccggcggtacagtccggccccggcctttccggtgcgattccccatgcctttattttttcccggcagaaaatccctcacacttttcccgccggcagaataggatggagcaaaccactgaataggaggttttgattgaatatgacatgttccaataattcctgcaattcctgctccagcatctggggctcctgcaatagatgttcgtcctgcggctgcaacagcagctgctccaactccagtggctgttccggctcctgcggatgcagcagctgctccggttcttcccgttccggttcctgcggctgttccagctgtactgcccacaccagctgctcctgcggctgcagcggcaactgcggcagctgcaataatggctgttcgggttcctgcggatgctccggctgcaataacggctgctccggctcctgtggctgcaataatggctgcagcagcggctgtaatggcagctgcaacggcaactgcacctatacacaacttcatgtaaccattcctgccagcggcgtctgcaaggtctgctgctcggggatcgctatcaactcggtcaacaccgcactgatctcgggacggtatgtcaccagtgtcagctacactgccaccatggactatatcgaccgctgcggctgccgccgtactgccaccactacacagactacccagatttatctgcctgagtcctgcatgcgcttcaccaatgtatgtgccagagtggtacgccgcaatgctgtgaacaactgctgcggcgccggaatctgtgccgtactgcaggtttgctgccggtaaccatacctttgctgtccggacgggcagcgccatggggaccaaccgcccaccccggacggttggtcccttttttctgccagaacaaaagcagccggagcattgccccggctgttttactctattcatgctggttccagcggcctccatgctgatgctgaccgcctccgcctccataggactcctcttcatcgccgtcctgacaggcgtcgatccggtcccggagctcccgcatggtcatgccggcggcctcctccggcgtaatgctcggatcaagagcatgcagctcctcataggcgtggtacttgcccaggggcagccccagggcctgggcctctgccagatcctccgagctgccggcgtagcagtgcgcgttgctctcaccggaggtacagcgctgggcacagcggaggatctcctgctgctgcacctcattgtcgccgctcaccacgatggagaggaccccatcgtccgccaggcactgctggatggcgtcactggcgatgatctgctccagggcatcatcatagctcaggaaccggacattcagctcagctgccagagcagtaccgtcatcgttgagcccttccacagtgatgacccggtcgaaccggttgatctccagctccaccgaggggttgatgtcaatgctgatggcagaagtcggggtgaagtaggcctgatagccgctcagacccaccaccagcagggctgcgcaggccagagccggtgccagacgccgaaatccttcgctgcgccgccggggttccggagctgtataattcccggttttctcccgcaggaaagcccgtgtggactccttcagcgccggatcagcgtggatgctgtcaaatgcctctttcagatttttactcaaagtcctcacctcccagcatctttcgcagttcgtcccgggcacgggtcagcagtgtatagacggtattggggtttttatgcagaatggttccgatttcgggcgccgtatagccctcataatagtgcagatagaccacgtcccggtacttgtccggcagtgccagcaccgcttccagcacttcccggtggtcctccggcacctgatccggctgttccagcagatcatccagtgaaacggtccggctccggaaaaaactccggagcagatccttgcaggcattgatagtcacccggataaaccaggctttctcgtgctcctcgctctcaaattccgtggtgccagtgacatacttcagaaaaactgtctgaaagatgtcctcggtatccgcatgattcttcagatgaatcatacagacccgccggaccagatccgcatagcggtcaatggcccggttcgcctcccattcactccgcataaaccccaaaccctctttttatatccgaatccttaccggtttctgccgcagcgccggtagccggtgccatccatggggcgtgtgccgccgccgaagtcacagacgccatctccgtcctcatctatgaagctggcaccacggccgcatccgccttcgccgtagtaatcgcaaaccccatcgccatcggcgtccgcatagccgcagccgccctgtccggcatagtcgcagacaccatcgttatccttgtccacaaagcgccagccagcgccctgaccggcataatcacagacgccgtcattgtcctcgtcggtgtaagtccagccggaggactgtgcagtatagtcacagatgccatcacggtcagcagcacggtaaccgcccggagcagccagggaagtggtgatgccagcagccaggatcatagcgaatacagaacccataagaacctttttcatagatgtttcctcctgaattataaatcaaatttcagctttttcaaccggtttcactactaatacgattgaaaacccgaaatccattcagcatccgaaaaaaattctgaggaaaatttcaacttttcatacgcaaaaaagaagcacccgaaaaacggatgcttcttagcatggctccccaagttggactcgaaccaacgaccctgcgattaacagtcgcatg

SEQ ID NO: 4015 - DNA, 13404 bp, Unknown
  16S sequences of unknown bacteria
ctcgtaaccgcgtgcgtcgagcgcctcgcccagctcctcgtaggtgagcatctcgccgctcgcgccgtcgaccacgccgttttcacgcgtgatgagcagcgggttgaagacctgcgccgatgcgggggcgagctttctgagcagggcgcgcgccgccgcgatgaccacgacggggcggccaagcgacagcaggccgatggcgcgcgtacgcgccccgacgaccgccaggtcgggctttttctcctgccagggcaaatccatgcgctcggggagcacgagcacgttcttgcgcccgatataggacgccaccgcatgcgagaagcgctcggccgcctcgtcgccgctcaccaccaccaggatggggcgcgggtgccgtgcatacagcgaggccacgacaaacggcctgaccgacgccacgacgccgagcgacacgtcgtcgccgccatcgagcttctcgagtgccgggcgcatgagctggccggcgaagaacttcttttgcagtttgtcgataagcatgtcggtgaagcaccgtactttctacttgtggtagggttcgcccctcattatcttgaacgcgcggtacgtctgctcgagcaagacgacgcgcgcgaggttgtgcggcagcgtgatcgggccaaacgacagcgtctcgtcggcgcgcgcccacacctcgtcgctcacgccggtcgagccgccgatgacaaacgcgatgctgccggcaccgtgcgtcatgagctggtcgagacgccgcgagaacgactcgctcgagcgttccgtgccgtcgatggcaagcaagatgacgtacgaggagcccaccgccttcaggatgtcggcgccttccgccttgaccaccgcggcatccccgcccgccttggcgggatcgcggtcgggtacctcgacgatctgaaggttggcataggcgcccaggcgcttggcgtattccgccacggcgtccttccagaagcgctccttgagcttcccgactgccacgaccttgagcttcatggctacttccccgcactcgggcagatgtcggcaagcgggcagctcgcgcactgggggcggcgcgcgatgcagtactgcctgcccagcctgatccactggtcgttgacgtcggtccacagctcctgcgggatgaggtcgagcaggtcttgctcggtctcggcgggagtcttcttgttggacaacttgagcttgtgggcgatgcggaacacgtgcgtgtcgaccgcgatgccctcgcatttgccaaagctcacgttcatgacgatgttggcggtcttgcgccccaccccggggagcttctgtagctcctccatggtctgggggacctcgccgccaaagtccgccatgatcatgcgcgcgcagtttatgcagttgagcgccttgttatggtgaaagccgatcgagtggatgatgctctcgacgtctgctaagtccgcctgcgccatcttctcgggcgttccgtacttggcaaacagcgtgggcgtcaccttgttgacgttggcatctgtcgtctgggcggaaagcgccacggcgatgacgcactcgaaggggctggaaaagtgcagcgccggggcaacgtcgccgtagagctcgttcatgcggcggcacacctcgatggcgcgttcgcgctttctcgcctttgactctcgtggcattgcgtcccctttctcggcatctttcacgtaacgaagtgtagcaagacgcgcgatgacgcgagctgcggcatacccgtctttggcgaaacatcatagcgcagcgctgagacacgattcttccgaaataggccccacaggcagagccgtttctttcccgttgggaccatgctcgttttatggtgtctgcagcgcgattttggcaaatccgtccgctcttgtataatggaaaaacttgtgtaaaagttcaccacggccaacagccgttgccactgcgctcacagcttttgcgcgccatttttattgtctagggatcggggaacacatgccagatacatctgttgcggcagcatcagactattctgactcaggcgccactcaacagcgcccgtcccaacaaccagtcgtgacgttcctcgtcccctgctacaattccgcagcctacatgggcacctgcatcgattcgctgctcgtcgccaaggactgctgcgagatcctcgtcgttaacgacggctccaaggacaacaccctcgaggtcgcgcgcgactacgagcgccgctaccccgacacgatcaccgtcatcgaccaggaaaacgccggctggggcggtggcgtcaacaagggcatcgcgcgcgcacgcggcgtgtacttcaaggtgatcgactccgacgactgggtagagcccgaggcgctcggcatggtgctcgacgttctcaaagagcatgcagagcccggcgcgcagctcgacctcgtcttctccaatttcgtgtacgaccacctcgtggacaacaccaagcacgcgatccgctacgacaacctcatgccgcaagaccgcgagttcacgtggagcgacctcaacaagccgcgcatcgaccagtacatcatggtccacgccacgtggtaccgcaccgaggtgctgcgccaaagcggcgtcaagctgccagaaaacgtgtgctacatggacagctacctcatgctgcacccgctcccgtacgtgaagagcatgtactacgtcaacgccgacgtgtaccagtacctgatcggccgcgaggaccagtccatcggcatcgagacggtcaagaaacgcatcgaccaacagctcatggcgacgcgcctttccatcgaagactacgacatcgacgagatggcagcggaaaacccgcagatggcagagctctactcgcgctacatctccgcgatgatgtcgacctcgaccatctatctgttcatgatcaacacaccggagtcgctgcagaaaaacgacaagctctgggattacatgaagacgaagaatcccggcctgtacaagcgcgtggcacgctcgctcgccggtctggcaaacaggaagcacgctccggtccgcaagggcgtcatcggcgcgtattggctcgccaagaagattttcaagtttgcctagcctacggcgaacctctatgaagggcaggaagttgtgaagcagccggacaccgcagacgagaaatcccctgcgactgctacaggcgcacgtgccggcaaggcaaagtcaaaaagcgccgagaagattccgctggaggagtcggtcctcgagatggaagagggcatcgagcaggacaagccgcctcacatcacgggccgtcgcctgaacgccgtgctcgtcgtcatcgcgttttccgtgctgttcggatacctgttcatcgccggcgagggcacgaagaccctcgaggcgattcagcagttcaactactggttcttgctcgccgcgctcggcggcatgatcgtgtactgggtgctcgagtcggtctgcatgcagcttttggtaaaccagctgcacaagggcttctcgtttctcaagacgaacatcgtcacgatcatcggacagtacttcaacggcatcacgccactttccagcggcggccagcccatgcaggcctactactaccggcgcctcggactgccgctttcggatgccatgaccatgctgctgtgccgcttcatcgtctaccagaccacggtcacgctgtactccgtcgtcgtcctcatcctgcgcttcgggtactttacccagcacctcgccgcgctcatggcgcttgtcatcgtgggcttcgtgggaggcgtcgggctggttgccgccctgctcgcgctcgccttcgcgcgcaagaccacgacgcgtttcgtcgtctggggcatcgggtttctagcgcgcatccacatcatcaagcaccccgagcaggtcaagctgcgcgcactgcactcgatgcgagaggcgtacgatggcgtgacgtttctgctcagctcgcccaagctcctgttccaggttgccggcgtgaccgtcgtgcagctgaccgtcttcttctcggtctcctacatcatctacctgggctttggcgagaccggcagcgatatcgtcaccgtcatctcgtgccaggcgttcgtgtacatgatttcctcgttcgtcccgctgccgggcgccatgggcgccgccgagggcagctacgtggcgttcttttcgttcgtgtactccaacagctcgctcgtcgcgctatcgacgttcgtatggcgtattttcacgttctatctgcccatcgtgctcggcatggggctgaccgttctcgtgaacaacccccacagcctgctgtcgcgctacctggcgcgcaaagacagggaatccggctacgtccccgccggagagggcgaataatcaagcgagtgaggtcccggcagcgaattgccgggcagtgggcagccgtcagatgacgagtggatgtctgccggcgcgcagctactagcttttcttgcgacgcgcgcgtaactttgcgaaaaatccgctcagcagacccgcgcactcatcttctagcacgcccggagtcacctcgaaacggtggttgaggcgctcgtcttcgttgatctggtacagcgttccgagagcacccgccttggggtctttcgcgccgtacacgcagcggtcgatgcgcgactggtacatcaggcccgcgcacatgaggcatggctcgagcgtgacgtagacggtgcagccgctcagacgccaatggccgagcttttccgatgccttcttgagagcgatgaactccgcatgccctgccgggtcctcgtcaagctcgcgccggttatagccgtaagcgatgacctcgccttcgtagacgacgaccgccccgatggggacctcgtcgtacgactcggcgattttcgcctgctcgatggcaagccgcatgaattcggcatcttgagtggattgatccatgaagccccgcggtctcaacaaaaactggcggagggactgggattcgaacccagggggcggttcaaggccgcccgacggttttcaagaccgttgcattcaaccgctctgccatccctccgcagatgcgtgcataggcattctactcgatgtgcggggcgcgggcgagcagagcgccaagaatccttggcagtgccagaactgggtggcgaaagccagaaatccctggcagtgccaatgctgagtggcgtgcgggggtccgacgccagaaaaacctggcagtgccaactctcagtggcgtgccggcgccacatgccagaaatccttggcagtgccagaactgggtggcgcgcgcagcagacgcgcgagcagcgagggcgccccgaagatgcggacacccccgcagcattgcatttacgcgaacaggtcgcccactgactccctgaggtacgccgcaatctccgggtccctcatggccagcgcgacgtttgccgtgatccacgcgggcacggtacccgtgtcgaacccgtctttggggtcaatcacgagagcgtagacatcctcgcggtcgagcagcgcgacgagcgcgtcggtgagctggatttctccacccgcaccgggcttggtctgcgcgagcaggtccatgacgaccgggctcagcaggtagcgcccgaaaatcgccaggttggaaggcgcttcttccagcgacggtttctcgaccatgttctcgaccttgtacaccccatcgcccaggtcctcgccgccgacgatgccgaagcggctgacctcctcgtccgcgaccggcacgactgcgatgacgctcgccccgccgtgcgcgttggagacctcgaccatcttcgtgcagaccccgttgtcgggcacgagcacgtcgccgagcatgaccatgaacatgtcgtcgcccgtcttctgcgccgcaacatgcaccgcatgccccaggccgagcggctcttcctggtacacgtagctcacgggcagctcgcccgcggcctcgacggcatcggcgtacttgtccttgccgacaccgcgcaggtgctcgaccagcttggcgttggggctgaactgctcttcgattgacgccttgtcgtggctgttcacgatcacgacctcgtcggcaccggagacgagcgcctcctcgacgatgtactggatagccggcttgttgacaaccggcaacatctccttgggctgtgccttggtggcgggcaagaagcggctgccaagtccagctgcggggattacggctttcatctgcactttctcctttggttcttttcttgctagatgcgctcggcgatcttcgtgcccatctcgcgcgtgccgaggatgtggtcggcaggcgtgtcgggctgcgcgatatcgtaggtgcaccagccgtcggcgagcgcctcgcgcacggcacggtcgatatccgcggccgcctcgtccatgttgaagctgtacttgagcatcatagcagcggactggatctgcgagatggggttgacgtcgtttttgcccgcatgcttgggagcagagccatgcgatggctcgtacagcgacgtgctgtcgcccagcgacgccgaagcgagcagcccaagcgagcccgcgagcatggaagcctcatcggagaggatgtcgccgaaggtgttctcgacgacgatgacgtcgaactggtcgggatggttgatgatctgcatcgccgtgttgtcgacgagcatgtcctggaactcgacctcgggatactccgcggcgaccttgtgcgcgatcttgcgccacaggcggctcgtgtcgaggacgtttgccttgtcgacgctcgtgaccttcttgcggcgcttcatggccgcctcgaaaccgcggcggatgatgcgctcgatctcgtactcgtcgtactgcatgatgtcgtaggcgtgctcgccgggcttgccgtcgccgcccgcaccctcgacgccctcctgcgtcacgtggtcgccaaagtacaggccaccggtgagctcgcgcatgatgagcaggtcaacgcccttgaccttctcggtcttgagcggggagttagcggcgatggagtcgtagatgaccacgggacgcaggtttgcgtacagaccgagctccttgcggatggccagaagcccgccttcggggcgcggcgcgccgggggtcgtcgtgtcccacttggggccgcccacggcgcccagcagcacggcgtcggactcgcgcgcgagctggagcgtctcggccggaagcggctcgcccgtcgcgtcgatggcggcaccgccgatgagcgcctccttgaagtcgaactcgacgtcgtacttcttctccaccgcgtgcaggaccttgatcgcctccgcgacgatctctgggccgatcccgtcgcctgccgtcacgcagacctgatacttctgagccattagcgctgctcctccttcattttgttcttcgtgcgggcgaccaggcctcccgcctcgatgatttccttgatgaacggcgggaacggctgcgcttgccagctctgtcccgtcgtctcgtccgtgatgatgcccgcgtccgcatcgacgctcaccgtgtcgccctcgccgatgccgtcgacggcctcggggcactcgaggatcgcgagccccgtgttgatggcgttgcggtagaagatgcgcgcgaagctcttggcgatgacgcagtcgatgcccgccgccttgatgcagatgggcgcatgctcgcgcgacgagccgcagccgaagttctcctccgccaccatgatgtcgccgggcttgacgcgctcgacgaacgtcgggtcgaggtcctgcatgcagtgcttggcgagctccttggggtcggaggtgttgagatagcgcgcggcgatgatgacgtcggtgtcgatgtcgcgcccgtacttgataacggttccgttgaatttcatgctgcccctcctagtccaggtccgcaggcgtcgcgacgtggccgagcaccgccgatgccgctgcaacggcggggttcgacaggatgacctcggacgtggggtcgcccatgcgaccgatgaagttgcggttgctcgtggagatggagcgctcgcccgccgcgaggacgcccatgtaaccgcccaggcacggaccgcaggtcggcgtgctcaccgcgcagttggcatcgaggaagatgtccatgaggccctcgtggatgcactggcggtacacgtcctgcgttgcgggaatgacgatgcagcgcacgtcggggtgcaccttgcgccccctgagcacgaccgccgcctggcgcatgtcctcgatgcgcccgttggtgcagctgccgatcacggcctggtcgatgtcgatatcgccgcattcggccgccggcttggtgttggacggcaggtgcgggagcgagacggtcagggggatgtccgcggcgtcgatcttgatcacctgcgcgtactgggcatccgggtcggagtggtattcgacgtagtcgcgctccttgcgcgggtcgacgtaggcgcgcgtgatgtcgtcgacctcgaacaggccggccttgccgcctgcctcgatggccatgttggagatggtcaggcggctttccatcgacagggtgtcgatggcgctgcccgtgaactccatcgccttgtacagcgcgccgtcaactccgatgaggccgatgatgtacaagatgatgtccttgcccaccacgccgggctgcagcgtgccgtcgatctcgaacttgatcgtctcggggaccttgaaccaggcacggcccgtggcatagcccacgcccgcgtcggtcgagccaacgcccgtggaaaacgcgccgagcgcgccataggtgcaggtgtgggagtctgcgccgatcatcaggtcgcccggtaccaccacgcccttctctggcagcagcgcgtgctcgatgcccatgcagccgacctcgtagtaatgcgtgatgccctgctcgcgcgcgaagtcgcggacggtctttgcctgctcggcggacttgatgtccttgttgggggtgtagtgatctggcacgaggcagatcttggtcgggtcgaacaccttgtcggtaatctgcttgcacacgccgatggcgatgggcgcggtgatgtcgttcgacagcaccagatcaaggtcgcattcgacgagctggccggggacgacctcgtcgagcccagcatgggcggcgagaatcttctccgccatggtcataggacgagccattgctatcctttctgcttcttgtgactacacatgcgcgaagatgcatgtaggtgttggtatgccacgaaaaacgacggatgtctatctataaaacggcgcgagccaccgtgcatgatacgcactggctcgcgcatgcggtgaagccgttcgaagaattgcgcaaaatctattcggcgatgtctgcctcgctgggggcaaacgggtctttggcgtcttgcgccggttcctccgcgtgctcctcgcgcggcctgttgttgcgcgcgcgaatctcatccgcacggctgccatgcgaaggtcccgagccagagcgcctgttcgaggacgcgccgtggacgggcgtcgtgcagtatggacacgccacccattcgggctcgagaaccctgccgcagcgcgagcacacgttgcggagctgcttgcggcaatgcgggcagatgatgaaatccttctgcgtggggtagccgcaatgggggcagctgccgtactccttgagctgattgcgcagtagcttgagctccatgtcctgctcgcttgcgtcgcgcctggtcagcggcgggcgcatcaggcagtaggcgacaagacccgcaaccgggataatggcgatgacggtccagaccaccggcgaagtgtcgcgctcgtgcgcgtcgcggttgacccagacgatcgccagcaggtacaagataatcagtatgacgacagtgacaccgagcccgatgcgcacgggcagggtgatgagctgggagagaatgtcactcatgggccctcaagcattcgttgtcgtgggcgaatacgaacacgtgggattttagcaccaaacgcgcttaacctctcctgcaacggtaatagagcccgtggcgatgaccgggacgtctcccagcaggcgcagcgcgtctgggatggtcggggcgacttgcggctccttgcccgtcacctccgcgacgatctttgccaggtgcttgccggagatcgagcggttggagcgagacgccgtgaccaccaccctgttgaacagcggtgccagcgcctcgacgacgcctcggacgtccttgtccgcgagcacgcccagaagcagcgtggggatttccgcctttccagccgccttcttctcggccacgtgcgactggaagtccttggccgtgatgaagcggtctgcgagctcgcgcgcgagcacgcgggcggactgcgggttgtgcgccgcgtctatcatgagcagcggctctttgcgcagtacctcgaagcgcccggggatgaccaggttcctgaaggtctcgtttgccgcctgcggctcgatggcgtagccaagcgccgcctgcgctgcggtgagcgccgtcgcggcgttcgaatgctggtagctcgggaagtgctcgaggcagccggcgtacgcccccaccagcatggggcctgcgaccaccacgtcggcaccgacctttttggcctgcgcgtcgaagacctcgcgtgcgggcagcgagtcagcgaacaccgccgtggagcccggcttgatgatggcggccttctcgcccgcgatcttttcgatggtgtcgcccaagatcttggtgtgctcgagcgcgacgccggtgatgacggcaaccttgggcctgcacacgctcgtggcgtcccagcgcccgcccatgccgcattcgagcacggcccaatccacgccctcgcgcgcgaacagccacagcgccgcggcggtgagcagctcgaactccgtccccgtgacgttggccgcctcggcggcgtcgagcgcggcctcgatgccctcggcaaacgcgcggtcggagacgacctgtccgtctatctcgatgcgctcggggtacttgaccagatggggcgaggtgtaggtgcccaccttgaggccctggcttctcaggagcgcggcgatcatgcgcgtcgtggacgacttgccgttcgtgcccgccacctgcacgcaggaatacgcgtcctgcggctcgccgagcgcccggcacatgcgcttgatgggctcgagagacgggtcgatgccgaacttcagggcgccgcccagcgccgagattgccatgttgtacgttagcttgcggtccatgtgtgaaatgcccccatcggctgcgggaaagtggttcgtttgggtagctcgggctctattgtacttgctcgtgagacatattttcgcaattaatgcgttttcaaacttgatatgtttagacttagatattctgatttataacgcagtaagtaacatgttagtgacaacggataaatccttatctgccatcactatagaatcggttcatacggttttcgtactgtcagtcaatcgaaagggtgattcggcaccatgcgcaagttcaaagccgagagcaagaaactgctcgacatgatggtcaactccatctacaccaacaaggagatcttcctgagagagctgatctcgaacgcctccgactccctcgacaagctgtacgtgacgtccctcgagaacaaggacaacaccatcacgcgcggcgacctcaagatcaaggtcgccgtcgacaaagacgcgcgcacgctcaccatcagcgacaacggcatcggcatgaccgccgaggagctcgagaagaacctcggcaccatcgcgcattccggcagcctcgacttcaagaacagcgaggacaaagacctcgagaaggtcgacatcatcggccagttcggcgtcggcttctactcttcgttcatggttgccgaccacgtcgaggtcatctccaaggcctacggctccgacaccgccaacaagtgggaaagcgacggcgtcgagggctttaccgtgtccgaggcacagcgcgacgagcgcggtaccgacgtcatcttgcacatccgcgaagacgacgatgactcgtcgttcgaccgctacctcaacatcaacgccattcgcaacctggtcaagcgttacagcgactacatccgctaccccatccaaggcgacatcgagaagagtcgcgagctgcccaagcccgaggacgccggcgacgactacacgccgcagtacgagcactacaccgagaccgagaccttcaactcgatgattcccatctggaccaagaagaagtccgaggtcaccgacgaggagctcaacgagttctacaaagaccacttccacgacagcgacgacccgctgtgcaccatctcgctgcacgccgagggcaccgtctcgtacgacgcgctgctgttcgtgcccaagaacccgcccgtcgacctgtacagcaaggatttcaagcgcggcgtggcgctctacagcaacaacgtcatgatcatggagaagtgcgaggacctgctgcccgactgcttcggcttcgtgcgcggcgtcgtggacagccccgacctcaacctcaacatctcgcgtgagctgctgcagcacgaccgccagctcaaggccatcgagcaccgcatcgagaagaaggtcaaggccgagctggaaaagctgctcaaagacgagcgcgagaaatacgaggatttcttcggcaagttcggccatggcttcaagtttgccatctacaacaccttcggcgcgcagaagagcctgctgcaggacctgctgctgttctactccgccaaactcgagaagcccatcacgctgtccgagtacctggacaacatgaaaaacgaccaggaagagatttactacgcctacggcgacacggtcagccgcctgtccaagagccccaacgtcacctcggcgctggccaaggacttcgacgttttgctgtgccccgataacatcgacgagttctgcctgatgtccatcggcgagtacaacgagaagaagttccacaacgtgagcgacgaggccctggactttggctccgaggaggaaaaagaagaggccaagaagagcgacgaggacaacagcgcgctgttcgagaccatgaagggcgccctgggcgacgaggtcaccaaggtcgtcacctcgacgcgcctgagcgatgccgcctgctgcatcaccgcagacggccccgtgagccttggcatggagaagtacctcaagaacttccccgatgcccaggacaagcccgaggcaaagcacatcctcgagatcaatcccaagcacgcgatcttcgagacgctcaagaacgcgcaggcagccggtgaaaccgagaagatcgagacctacgcgaagatcctctacgaccaggcgctcctggccgagggcctcgacatcgcagaccccgccgcatacagcgaggcgatcctgtcgctcatgaagtagcggcacgcgcacgcaccgcgcgaaggcaccaaacacaataaagccctccgagctcatcttgaaccgcctcccgtttcttggacatgagaaatgggaggcttttttatggatgga

SEQ ID NO: 4016 - DNA, 6849 bp, Unknown
  16S sequences of unknown bacteria
tagcttaagctgccgcggggggtgaaaagcgcggttctttcggggtggtttttgaccccgttttttaaaatgtcgtcaaaaattttcatttctctttaaaaaggcctgccgagggagtgctcccaaagacaggccgttaaatcaatgttatttgctttggatgagcttttccgccgaggcaagcttgcaacacagcgtgaacagctgcatggcaaggtcgagctcctcaacaatggcataatgtatatgaatttgatcctcaacgggcgggaaggagggggaaagacggatgtttttgttttccgggtcctttccgtaggggaaggttgcgcctgcgccggtgagctttacgcccgcctgctcgcacagctccacgacctctttggcgcagccgtaggtcaaatcgacgctgacgaaatatccgcccacaggctcggtccaggtgatgattccgtcctctccgaggtcgtttttaaggcgggaaagcaccgtttcaaatctcgggcggagctttgacgcatgcagcttcatgtggtcgagaataccctgagtgtttttgaaaaagcagagatgacccagctgattcatcttgtcggggccgatggtctgatatttaagacggctgagcaagattttcttgttaccctcggaacaggccacggccgaaacgccgcttccgggatatgcgattttggaggtggaagcgaacatgaagtaaatgtcctcgttgccggcctttttgcattcgtcggcaaggttcaaaagggtgtcttttttgtcctcgtaaaggtcgtgaacggcataggcgttgtcccagaaaattctgaagtcctttgcggcgggacgaagggcggcaaagcggcgcaccgtctcgtcggaataggttattccggtgggattggaatatttgggaacgcaccaaattcccttgacggcggggtcctttacaagctcctcgacggcgtccatgtcgggtccgttttcggtcattttaacggttataagctcgaaaccgaaatattcggtgacgcagaagtgacggtcatatccgggggaggggcagaggaatttgattttgccctgcttgcaccagggcgtgtcgccgaagccgtgggtatagccttgggaaatgcagtcgaacatgacgtttaaggaggagtttccgccgagaataacgctgtcggccgaaacgccgagaatgtcggcaaacatctgtctgacctcgggaaggccgtcgatacagccgtagttgcggcagtctattccgccgtttttgctgtaggtttcatagtcgacgcagtcgcaaagcccggtggacaggtcaagctgctcgggagagggcttgcctcgcgacatatcgagggaaagacccctgcttttgaattcgtcatactgtttttgcaaatcgtttttaagcgagcaaagctcttccttgctcatgtccttaaactgcatatccatcaaatccttcacaaaaatatttgaattgtatataaagttaaaattcggcgctgccggtggtgcgggggaagggaagtacgtcgcggatgttctgaacgccggtgatgtacatgattatgcgctcaaagccgagaccgaagcccgaatgcttgaccccgccgtatttgcgaaggtcgagataccaccaatagtctttttcgtcgagacccagctcctccatgcgggcgcgcagcacgtcgagacgttcctctctctggcttccgccgatgatctcgccgactcccggcacaaggcagtccattgcggcgacggtcttgccgtcgtcattctgacgcatataaaatgccttgatctccttgggatagtcgatgacgaaaaggggttttttgtatatcttctcggtgagatagcgctcgtgctcggtttgcaggtcgacgccccagctgacgggatagtcaaactcgtcgttatgtttttcgagaatttccaccgcctcggtgtaggtcacacagccgaaatcggagcttcttacaaagtcgaggcgctcaagcagacccttgtcaacaaagctgttgaaaaactgcatttcgtcggggcaggtcttaagaacgtgatttataatgtgctttatcatggcctcggcaatttccatgtcatctttaaggtcaaagaaggccatttccggctcgatcatccaaaattcggcggcgtggcggttggtgaagcttgcctcggcgcggaaggtggggccgaaggtgtagacctttccgaaggccatggccatacattcggccgaaagctggcccgaaacggtcagcgaggtgggcttgccgaaaaagtcctcgccgaaattcacggttccgtcctccttaaggggcgggtccttggggtcgagggtggtcaccctgaacatctcgccggcgccttcacagtcgctgccggtgatgaggggggtgtgggcataaacaaagcctttgctgtggaaaaattcatgaattgcaaaggcacattccgaacgcacgcggaaaacggcgttgaaaaggttggtgcgggggcgaagatgggcgatggagcgaagaaattccacgctgtggcgctttttctgaaggggataatcgggagtggagagaccctcgacggtgatttcctttgcgtgaatttcaaagggctggcgcatctcgggagtgagcacgacggttcccgtgacggtgacggccgagccgacgttgagctttgcaatttccttgaaattgtccacctttccgtcctcaaagacgatttggacgcatttgaaggagctgccgtcgttaagctcgataaagccgatggtcttggagtcgcggacggttctcgcccagcccgacaccgtgacctccttgccgtcaaagttttcaaagccgcgaagcaggttgcacagttcacatctttccataaatatatctccaattcataattatgtcgcttgttatcgacttattatataccaaattccgccgcataacaatacctattttaatattttgccatgttttttttgacactttggtatgcaaaacttgaaaaaggcggccttgtgtgttaaaatatcgattgccgacaaaaagggagggattatatgattacatttaaaaatgattgcaccgacccttttttcaatcaggcctttgaggaatatgttttcgaaaattacaccgacgacgatattttctttctttggcaaaatcgccccgccgtcattgtgggacaaaatcagaacatctaccgcgaggtggattttttcgagcttgaaaagcgaaatattcccgtcgttcgcagaatgtctggaggaggcacggtttatcacgacctcggaaatgtcaattataccttcgtttccgatgcgtcggaaaacctttgctatgacacttttttaaaccccgtcataaaggctctgcgctctctcgggcttgacgccgccaaaagaggggtgtgcgacattgccgtttgcgggcttaaggtgtcgggcagtgcccagcgcacaagcaaggggcgggtgctccaccacggaacgctgcttttttccgccgaccttgagctgctggacaaaataaccgcaaaaacgaaaaacgaaagtattgtcacaaagggtaccctttctacggtcagcgccgtcaccgacatttccgagcatttaaaggaaaaaatgtcggtggaggaatttaaaagccgccttgagaggaccgtgctttgcggggcaaagaccgccgagctttccgaaaaggagctttgcgaggtgaaaaggcttgcaaaggagaaatatcaaagcgacgcatggaccttcggaaaaaccccgtccttcgattttgaaaagaaggggattttcgaaaatcggcccattgaggtgaaatattccgccaaaagaggttttataaccgaagggtatattctttgcgattttctttgcggcggaaaaggtgatctttcggggctgagcatcgcctttgaaaatctcaaaatgatttcggccgccctttgcggcgacggccgtcttgtaaaatatctcatataaaaggaatgaaaacaatggaaaaggaaataaaaatgccgaaactccgtcccgaaatgaaggacggcgtgctgtgcgcgtggcttaaggaagagggagatgaggtaaaggccggcgagcccatcttcgaaatcgaaaccgacaaggtggtaaatcagatcgaggcctccgaggacggcgtgcttgacaagcagctttttgaagagggcgatacggtcgaggtcggaaccgccgtgggacttcttaaaaccgataaggattgatattatggaaagaaaacccgattggctcaaggtgagatataaccaggaggcggtgtccgaggtcgccgaaatcatgcgcgacatgggacttaacaccgtctgcaaggaggccaactgccccaatctcggggaatgttataaaaaacacaccgccacatttatgattctcggcaacatctgcacgagaaactgcaaattctgcaacgtcaccacgggaaggccgctgcctcccgacgaaaacgagccggaaaacgtcgcaaaggcggcaaaaaagctgggacttcgccatgtggtgctgacctgctccacccgcgacgaccttcccgacggcggcgccgagcatttcgcaaagaccgtccgcgccataagaaggctttgccccggcgcaacggtggagaccctcatttccgacatgaagatgaacacggccgccctcgacattatcgccgaggttcaccccgatgttataaatcacaatgtggaaacggtaaaggagcttcaaaaggtcatccgtcctcaggccgattacgagcgctcgctgaatgtcttgcgctatttcaagcaaaaggacgaaacccttctcaccaaaaccggctttatggtcggcctcggagaaaccgaggagcagatcgacgctcttctcgacgacgtgctcgccaccggctgcgacattctgaccataggccagtatcttcagcccacaaaggagcactatcctctcaagcgttatgcgactcccgaggattttgcccgttataaaaaaatcgcccttgaaaagggatttcgccatgttgcctcggcgccccttgcccgaagctcctataaggcatgggaggttttggagggcgtagatgatttatattgagacaaattcctgcgacgttttttataatttcgccgtcgaaaactattttgccgagcaaaaggatctcggcgatacggttttcctcttttggcgcaccaccccgacccttatggtggggaaatatcagaacgtcgccgaggaaataaatctgccctacgcaaaggaacacggcataaccgtctcccgccgtttttcgggcggcggcacaatatacaccgacatgggaggctggcagttttcctttatcgagcgaaaaaatgcccgggaaatcgagtttcacgagtatatcgcccccgtcatcgacgcccttaaaagtctcggcgttcccgccgccttcaacgggcgcaatgaccttaccattgacggaaagaaattttccggaaacgcccaataccgcctccgcgacagcgtggttcatcacggctcgctgcttttttccaccgatattgagcagatggtcgcctcctcaacggtggacgattataagataatttccaaaagcataaaatcggtcagggatcgggtgaccaacatttccgaccacctcgacagcgaaatttctcccgaaaagtttaaggaaatcatgattttccatataatgaagggcagcggaaagagctatgctctcacgcccgaggacatcgaagaaatatcggtcataagggagcaaaagctttcaaactgggattatatctacggcaaaaatcccaagttcaacatcgagcgcaccggccgctttgccggagggaaaatacagttcaagcttgacattaaaaaaggccttatcgactcggccgccgttttcggcgatttcttttccaccctttcggaaaaagaaatatgcgacgccatcgtcggctgcaggtatgacagggagtcggtgaaaaagcgcctttgccagcgggacatggaggggaagatatataacatttcactcgacgaaatcgcctctctcatagccgattgacatccattgtcagcaattttttaaacacagacaaagcagactttgcgtcaccgtaaagcctgctttgttttttttatatttgggttttgtggaggaaactgtttttccgcaggaaagctttcgatttttcccacggccttttgcaaaatccgaagtgcgtcggacacggtgacatcgccgctgccgtccacgtcgcagcagtcggccgacgaggagtcgagcgaaattttacccaccgccgcccggagggtgagcagcgcgtcggacacggtgacatcgccgtttttgtcggcatcgccgtaaagaagaagtgtaacgcttaccgattctcccttttcgccgacggttatctcgatttgctcggttttgtgacgggcttttgaaaccttaaggacataatcgcccgctttaattccatcgattacaaagtcggcctcgttgcctgccgcccaaaaacctcacgtttcaataaaatttccgatttaacaaaaacacttgacaaacacaagtaaaaattttacaataagtgtggcggaatttgtaggaatatgaaaatgattggagagatactgtgatgaagaaaaaagtatatgaatatattaaaggaaatccgaaaagtgacatccatataatagctgtcggaattggtgaaaaagaatttgatgtacttaagacgataaatattcttacggaagaaggctatgtaagaatggagcgtcctgtaccgcttgatttgaccatcttttac

SEQ ID NO: 4017 - DNA, 31125 bp, Unknown
  16S sequences of unknown bacteria
gtctgtctgtctgtctgtctgtctgtctgtctgtctgtctgtctgtctgtctgtctgtcacaggattatacatttacgcatttccctatgtcaagtaactttttgtagaattttccgtttttttgtcaatattatgattatagcatttatttaaaaatgtgtcaattattttaaaaaagaaaacctgcggcttaaaccgcagattttctttaaatatgatttaaaattcagaaatttttctcttattccgagcaaaagtcaagctgctttataaggctgccgtcacagtcgccctcagcatatgccgtttgcaggtgtaaatagcacagtccgttaggtgcgaccacctgtgcgggaagctgctttatttgctcaccgttaataaagagcaccgctgtgttaagcgccgtatcaaaccttatttccgcctcgctccagccttcgcggtttatttgctcctttgttataatatcggtaaaaaccgcatcgtcctttacggtaatatcgcaagggttctgccagtggtccataagcgatactctaagccccatgccgtttacccacagctttattttcacagtacccttatgcgctgcgggaaaattccaaacaagcccctgcacattgtttaaaagcctgtcgtcattggtgttctttatcagcacaacctcgcttcggtcgccacaggggtcgggcacgggcaccgcgccgtttgtgcggttccatgcacaatgtcccggaaagctgcgcatacagcccgaaacgcttttaaggtacacctgcgttgaagtattttcaagcccgccgcgaaaatcctcttttcttgttttttcataaagccagtttatatcaaaaatcatcagcctgcgcaccctgctgtgctgacccacatgcaccagtattttattgttcggcagctcaattgcctgaaattggtgcacgcttttatctctgcccgagccgttgccgcccacggtgcggaaatcacagctgttgcgtaagggattaaggtaaagctccctaaagccctgccagcttttgccctcatcagaggatattgcaatgcagtttgagtctctgtttgtaaaaacatcctcccatacgccgcccttttcgtcattatcaagcggtgggaataccttttccttatcctgctcgggcaggggctttgtattgttatagaagaaaagtattttcccgcttgataagcgcattaaatacgggttggtaagtgttgagtgaaacgcagttggaacagcatgcgaccaggtttcgccgaaatcggcggaatatgtaacgtaatgataatcggtagaggttctcagtatcatcataagtctgccgtccgcaagctctgaaacagtcggctcaacacccgagttttcccagcgtattcccttatgcggcggcttcatttcaaatttatcggttttcggaatatccaccgcgcgccaggtatttccgtcatcatccgaaaggtatacgaccgcgtgcccgtcgcgttcggtcgcaagaacccagcgcttgatttttttaagcggcaaaagcctgtaagaaaacgccactgttcccggcagctgaacctcgcggtaatttcccgcgaaaatatccccctcgcatatacggagaatatcgctcccgcattcatcactgcatgcgggggccaaatatctgcccgaccacgggcttttaacagccgcgccgatagttccatgctttacattgtattccttccaggaaagtccgcaatcccgcgatgaaatatatacctctctgcaatcgccgtcaggcaaatcggaaaatgtaaccttgccgtagcagcgaatttcgccgtcaggcattacgcaaagtgaatggtatgcgtccgacggcggaacagccacctccttgggcgcataaattgcgtttaaacgctctgcgtcctctttggacagcctgcttttaagttcctcaagatattcaatcatacaaaagcccccgataacaataattgctattttaaaacggtcttatttaaaataaattccgcgctttctttgcagctgtccataggcgttctgcccttttccggggagtcctgctctactattatccattcactgccggctgcctttgccgcgtttattaccgcgccgacatccataacacctgagcctaccgccttgtaagaaaagtcctcgccctttttgccgccgttataatcctttatatgaataagcgggcagcgacccttatattttcttatatattccgcggggtcaatacccgcgtatttaacccagcaggtatctatttcggcaccgaggtatttcgggttgaccgcgccgtaaaccaggtcaagccccggcacctcgtctatttttgcaaattcataatcgtgattatggtagagaagatatattccgttttcgcggcatattttgccgagcctcgtaaaattatcgcgcaaatagggtatactctcctttgaaatgcccataccgttaaacgccgcgtatttcaagccgagaccttttagcccctcaagcttttcttcgttttcaatttcatcaagcccgatatgcgccgatattgcggtaattcctgcactattcagcacctcagccatttcaaaatagttaaggctgcttattccggcaatttccacgccctcgtagcccattgccttcagcttttcaacagtacccttaaaatcggcatttgcctcatttcttacagaccaaagctgtattccgagtttcataatttttttcctttcatattttatccggttatgcctaccctatcaatactctttacgaatttccgctgcagcaacaggtaaagcacaagcggtattataataaacagcaggcagcaggcgaaaacatacgcaggcgccgcaggagccgaacctagccatattcccttttgctggtaggtctgcgctatattgtaaacggcaaccgaaagcggccaatcgtcatttaaaaagcagagtgacgcaagctgcgtttcattccagtgccatataacagaaagaaccgaaacggttactataaccacgccggatgacggcagtgcaatgcttaaaaatgtgcgtatgggtcctgcgccgtcaacatatgccgcgtcctcaagctcataaggcagccccgagaaaaactgtatgtaaatataaataataattcccgagcgtatacccacgccgaatatgctcggcagccaaaaggtccagttggtattgtaaaggttaagccttaaatctgtcccggtaagcctgtaaatcataccgaatataccaagcagatccacctggcggtaatttaccgaaagcgacaggctatacatttgtgtggggataagcagtgaaagaattaaaaacagcatagcaacctttttgcccttgaaattaaatcttgcaaagccgtaggctattaccgagcagacgaaaacctcaattaaagcagataccacctgcaaggaaagagttcttctaagcgccgaccaaaaattcagcgtttcaaaggcgtccttaaaacgctccgatgttatatagcgcggcagccaggcaaagcttgcatcaagcagcgccttatctgatttcagcgccgtgctgagcatataaagcaacggataaagtacaatatagcctattattataagcatatagtacctgaacgcattaaaggaaaccagcgcggcaagcttttttgtaatatccagtctttttttattttttacggaagcagtcataaagcattaaccccactttttaacgaatacgcggttgtaaacaaagaagaacagcgctaaaaacagcccaactaccataaaataaaaccacagcatagccgagcccacgccgtattccatagcgccgaactgcgcatagccctttgaaaccaccgtgtttgtgccggaggaaacaagctcaataacggtaaatataataacgagcatcattgttcgcagcatcataggcagggttacaaaccagaatacctcccaccttgtagcaccctcaacctttgcaacctcatagagcaaatcgggaattgactgcaagcccgcaattataagtattgtttgtattccgctttgccacaccagcataaatatctggcttaatgcctttgaaagcaccgtttctattcccgagggcaggctcaacccgtcaagcaccttgctgaaatctatcattccgaagcttgcctcgctcgataccgcaacagcggtagcctttgacgaagcagcgtcaagaaagagcgccagcacaggtcccgccgcaattataaccggcaggaaatacagtcccctgaaaaacaccctgccgaaatattttccgttaagcataagcgccaaaaccatacttacaaccaaaataaacggcagcgatataagcatacttgaaaatgattccagtaaatcgtcaaggtatttcgggtctttaacaagaatttcatagaaatttttatttcctacaaaattaaccttaatgccgtcagcctctattcctatattcgcaaaggagaagaacgccgattgaagtataggaaaaacaacgaacagaaccattcctattatccagggggatataaacataagcccataacgcgatttcagggtttcaatgcttctttttttgcatagcttactcattttaaccctccgttattattttatagctcatacttttaaccgtttcgccgttaaacgctatatcggcgtcggtttcgtttaccgcaatgcgcactccgttttcaaaaacggtgacgcgcaggccgctttcttcaattctgtgctcctttattgcggagcttccgagcttttcaaacacgccctttagctctttataggagcttactatccgctcgcggctgctttcaaacagcgcgcccgccagtgccgactgatcaaccgtgagcaggctgctgctgtaatttttatacagtgtgtaggtaagcggcagacccgattcaatgcatttaagtatcgtcgtattttcatccgccgccaaattcaccgattcgccgctgagcgccgtacagccgcgaaaaaccattgaataaaaaggaatatcggcaaatgcaacgtccagtcccgatgattcggcaggggcatcggtagcataggaagaacccgccgcagcgtatacattcggcgcagaggttaaaacctcggtattttttcttaagcccgataatatgccgctaacctgcttttcggtaccgccgcaaacaaacgcgccattaaccttataatcggaatacgcagtgtttgaaagggaggtaagcgaaacacccaaaaagccgtatttttcggcggtatcggctgctttttcagcagcaccgtcaaggcggctgcgtgaaagcaggttatacctcagccctgtttcctttcgggtaacatagtcctttcgcacgtcataggcgttttgtccgttcgggaaagctgccgcgtcacgcgtcagcttaaagcccgcgcccgatttattaaaggcgataatatcaaaatccaaaaacagcggcacgccgttctttttgcaataatccgataaacgccttatatcctttttaccgccaaggcttgagggaattttaaagcccccgcccaccttgccgaaatcaagccccgtttcaccgaagcccacaaggcttacaagaatatttccgtctaactcttttgaaaaatactctgttatttccgccgcgtcattaacgcttgtaagggtgtataaaaccgttcgcggaataccgaaggtgtattttttcataagcacgccgccgagcagctttatactcaccgcgggcattgttttatcggtttttgaaaacaatttattctctgtaaggtaatttctgtaaagctgtgccataccgttataatcggcgttgtcccccgtaagcggataatacgaaaccgaaagcggcgcagtgtttatgcggtcgtcaaacgcctgcaattcaacctgcgtggatgtaaacccttcgggagcgtgaataaggttgtatccccttattctgaaaaagggataaaccgcggaatagcccacattctgcgaaccgacgttccacgcaaggtccgctccctcagcacccgatgttataattccgaaaagtgccttgctgccgtttttcatgccgaaaacaggcattgacacctgctttttataagcttcaaggtggtaggactgcaccgtggggtcagtaccgtatacgctcattgagtcctgtgtgcctatcaggtcggttgtggcggtactgagcagcgcgccgctgccgtcaggcaaaaacagccagctgttctcggtatcgtttttaaccgagcaggaaaaaggagaaagcgccaccgccgtaacgtaattttcgccgttatcctttatatccttcgttataacggtcgccttaaaagaatccttattcagcgtgtattccaccggcacggatatttcagcctcggcgaaatcgtaggtgacgcgcaagccgttttctatgctttcggtgtaggtctctccctcctccaaaacatttaccgcaacattcaaatacttttcgcttatggttttgctgtcaagataataaaccaaaatcgggctttcggcaagcgggttgttctttttaagtataccgtcttcatcgtaaacgggcgtcattgcgccgtccgctatggttgagtataccgtttgcgttgccttttccttaaaccaaacatattttttcgtgttattccaataaagctcaaagcggtcgttttcacagacctttccgctttcaaggtattcaccgcttaaatcggaggaatattttcccgtgtttaccgctcccgcaagcgttttattgcccgagcagcccgcaagagccgttacggacaccgccgcgcaaagcagcagcgatataattcctgaaaatttcacctttctccccccttacctgtatatcatttcaatataaacggtcttcacccatccgaacacctgctgcgaaagcaggaaaataaggaatataagaaataccgttattatcattcctataaccgtgaatacggttgtaccaacgaattttccgaattcgtaatcgtgaattttcattattcctattataagcataaatgccgcgtacacggtgcaggcaataacaaatatattcaggaaagcgccctcatcaggcacgagtatatgcgtaagcacaagccggcacagccttgcaaaaattacgggaataaggctgtagcaggtaacgaagtaaatttcgccgagctttcctattccgcccgcaagcgtgcacacaagccagttgcacgccgtccaaagagctacaagccccaccgtgctgaaaaacacataaattgcgttgtaattgttggtatcaaaccttgtaaaggcaaagccgccgtttgtatcgttcagcaccgttaccacataaagcattattaaaagcacggttgaaattataaacgagccgcttttcttttccttaacaagcctgaagctctcgctcgggtgcgcaacgcttgaaagcgcaaccgaaagcctttcgtttttaataagcctgatgccgtgcttctttttatatattccgagagccgcagcaccgcccgcaagcgccaaaaccgctatgaaaataagtacaaaatacttttccgccgtttttgtgcgcactgccttaaacgcgtcggcataggtttctctgtcagcccccagccgcgcgtattccattgtcttttcattttcgcccatatcgtaataagccttggcaattccgcggtaagccgcctgtgagtccgcgtcgtactccaaaaccttttcccaatcggaaagcgcggcggaaaaatcatcggacacggttttcttctgtgccgcgcgcaccgtaagaccgtactcggtagccctaaacacggtaagagaatttttttgagaatcgcttaccagcacgtccgtgccgtttacggctattcccgagggcagtctgaatgttcccttttggtcgccgtcgcccatacttccgccgaatacggacaaaagcgtacattcctcgtcataccaaaaaactctgccgtaggttgtatcaagcgcgtagaaaaaaccgtcgccgtcggcgtctataagcgaaaggtcctgcttttgcgcgctgcggcgcaaagagcctatggcataatccgcaaagttatagctgcccttatcaagaacatccttaccgccggggttcagctggcatatctgccccgtttgcagagtgctgccctcttccccgctgcggccggttgcggtgtatataaagtcgtttgcgtcaaccgccatatcggtaaaggtatacggcagcgatatttcatctgcagcacgctttatatcgtttgaggtaagctttttccaaagcttttttataacgtccgtaacagaagccttaaccgtgtttgcgccgaaaaagcccaaaaattccatatcgggcgaataaagtattgcgccgtagtacgagccgtcgcaggctatataggtatagtgctttgagtcaaccgcaacctttatggggcggtatttgaaatcggacggaataagctcggaatcgggcagggtcagcaaatgcgtaacctctccgctgccgttcaaaacaagcacccgcgcgttttcggtatcggctatgtaaattttcccgtcgcaatcgacaaatattcccttagcgtctgtaaaggtgaccgcctgaccctcaaatttcaggttctcaattttcctttcgggcttatagtcctttccgagaatgtaaaccgccgaattaccgctgtcaagcaggtataccctgccgcttttatcggttgcaacatcattgattttactgtttgagttgccggctaactgctcgggacctataacctccgccaccttatacatcggctttgaatatgccggtattttttcgcggttatcgtagtcggtccaatatgtatagcttttgtagggcgtttcgccggttgatattccattttcgcccggctgaacagccgaaaccgcaaggggtgctgaaaggcttaaagcagccgccaaagcaagggctaaagcaattttcatttttttcataaaaccacctttacccctttatacccgcgctgcccatggtctccttaatgctgctttgcgaaattaagtaaaccaaaatcggcggaatcatcataataaccgaggttgccattgaagaacccgtgcgggcaagaccgcccgccgctattgttgacattaccgtaggcaatgttttcagctgctcgctgaatattgtgcctgtagactgcacattccaaagacctaaaaatgtgaaaagcgtaagagttaaaatgcagggcttgattataggcacaattatcctgccgaaaataccgaaccaatcggctccgtcaatatgcgccgcctctataagtgcgtccggcacgtagccgtccatatactgcttcataagaaaaacacccatggacgaggcaagcgtcggaaacagataaacaaaatacgtgtttataacccgcagctgagaataaataatgtactgcggtatggcaagcgtatatgtattgaaaagcagggcaaactgtattgcggtaaatattaagcccttatatttaatatcggtttttgaaagcacaaacgccgccattcccgagaatataaccgtaagcgcagtgccagccgccgctataaaaacagtgttgaatatatagcgcgaaagcggcaccgaaagacttgaaataaggtcgggcagcgcagcatagtttgaaagcgtgggtctttttaccgtgaaaagcgtaggcggaaaaaccagcagctcatcaagcggcttaagcgatgttaccacgcagtagatcataggtaaaagcgaaaaaacgcccgccgcaaaaagaaagagaaagtagaaaaagttgcctgcctttgagcgcgtgtagcgtttcatctggttgcgcgccggcagatgaagtatttcgcggatattctttttcattgctctcacctgcctgttttatttataagcctgtttgttatccgtcgtgttgccaccataagcagaaacagcacaacggaaagcgccgaggcatagcccatttcgtatttaaccgtgccgacatccgaaaggtacgacacaatagtatcagccgcatagcctaccgtagggtagcccgcaagctgagttattatgttgcttatggaaaaagccgaggcaatttgcattaccgcgctgaaaagcagcatatgcttcattccgggcagggttatataccaaagctcctgccagcggttgcgtattccgtcaatcgcgcccgcctcgtaaagctcggcatttacattttgcagtcccgaaaggtttgaaaggaacgaaataccgaggcttgaccaaagctgcacagccaccacaataggcactatatacgccgaatttgaaagccaggttatcggctcggttgtaagccccaaggacattaaaacactgttcacatagccgtagctgtcacttgaaaataatatctgccatatgtaaaccgcgtttcccgcaaggctcggtgcgtaaaacataaaggaaaaaagcgttcttgcagcgggtccgaattcgtttataaaccacgccaacacaaatgaaagcagaaaacccgcaggtcctgttaaaattgcaagcagaattgtgtttttaagcactatggggaaaatatcgtcgtgcaggaacattcgtatatagttatcaagtcccgcaaaccgcgggaacgacaccatatcgaaattgaaaaagctaagcactattgaagccgatactggaagcaccgtcataagaataaaaaatattaaaaagggagcaagcaatacataaagctgccaccgtctgccgccaaattgcggctttgctgattttgacaaagtaacttcctccccttaattatttctgtaagcgtattcttcggttttacgcttaatttcttcatcgcttattcggctccattcggttattgactcttttgccgatttttcgccattataaaccgcccaaaacgcctggtctattgaccttgaaacataatagctgccggggacttcctcaatttctctcacattatcccactgcttcattataacgtcaaggctctttctatcccacgaaaggcgggaaagcgcagatacattagcggtcataattctgcccgaaacaccaagcaacgcttcgcagttaaaggaataattatactgcgtatcagccgatacccaccacttaataaattcccacgcggcgtttttgtttttgcttgatttcataatcgcgcagcccgtgcccgagcccgcgcaaatgctgcttatgccgccgttttcgttttccgtgccgggcagctcataaactgaccatttatcggcaatttcgggcgctgcggcattaaatgtaaggtattgcgaatagcccgctattccaagcggcacggtgcccaccctgaaacgctggtaaaagtttatatcggggttgagcttgtattttttgtaaaaattcgtccaggttttaaaaacctttaccgccgccggcgacgaaagcgccgtagccgtaagctcatcattgtaaacgctgccgcccgcctgcataagcatagtcgggtatatggtaagccctcccgcgcctgtattaacggtggtagccgccgttatttttacatacggcaggtagctgttcatattcttgcgctgcagcaccgccgtagccgagagaaattcatcccacgttttcggaatttcaagccctaactcgttaaatatatcatcgcgtacaaacattacgttaaagccctgtgtatcgggcagagcataaacgccgtttttatatgtatagggcttttccgcaccgttcttgaaatttttaagaacctctttataatcgtcaaattgcgtcaggtcgtaaagcacgccgcgcagcgctaggtttacgggctcggttcgcgccatttgcaaatacaaatcgggcgaattatttgaaataattccctgcacaagcgaagcgttaacctgctcaaccttaacgtttatgcccgtttcgggcgaaaagctttcctgtatcaggctgtttaaaaccttaacctggtctctgccccagtttacccacagcttaattgaattatcgctaccgcctaagctttctgtggtatagtcccccgtaaaggaaagtataaactttttaaaaccaaagcccagcttttcaaaaaatcccgcgcctacgctttcgtcgccgcccggtgcgctcaatactattttatcaatcgcaagcgccatatttttaatatcgtaaagccaggaggaaagggtctggtagtatgaataataggtgctgaggtaaaggtgcgattcatagcggttattccgcatatttcccgccacgcgcgccatatttttaaccgcgccgtcaagctcgccgttaatatcccgccgtgtgttcagctcctttgataaggcggtgagctcgctgttgaatttaccgagcatttcttcaaagctcggtatttgcttataaagctcatagtcgcggtttgcgtcgggtgattcgccggttatcattactatatcaaggtataaatcgcctatttccgagcaaagcgtgccgagcttactgcatatttccgaaacacccgccaatgtaaccgccaaagaaagcgtatgcttacccttttcaaggtaaaataaataatcgctgccgctgccgtcgcttaaagtcttatattgccacgcggttttataggcaaagcctatgcgctcggcttccttaaacggggtttccccgtcaattttaagccagcggtaggtttcgccgtttataaccgtattctgcttgaaattaaagccgatattgtaaagcccgtcctccggcacgtctatttcccatgtaatttcctgcccgggcgaagaccagtttgttccgcccacatagtttacaacggaattaaccgcgctgctcggggtgacgtcagcactgcccgtatctgcctttgcggtaagcgaataatcgtttctgtaaagcacgttttccgcctcggtaataagcgccttaccaccgtatttgcttttattgccgtactccgccgaaatctcggcatagctttttatgctttcgggggctgaaagccttattcccgcaaggcttatggtattgcccgtattttctattgcaacggtgtgccgccccgccgaaaacgcaaaggtatagggctttagctcaatgcccgttttatcctgcgccgctgcggttatgtacccctcgcgctgcttttgcttgggcgatacctggtcgccgtttgtaagctttcttattccgccgtcatcctcatatattaccggtgcttcaatgccgcgcgctccgtcaaaaggatattcgccgtctattttaacattgtactctgccttttgggtggcggtgtccgccgtcttgaaaattacagaaagctcatactcgccctgcggcgcttcaaccgcaatttccgcggtctttccgttttccagcgtaacgggagaagcgaatttgaattcaagccccttttcatcattgcccgccgccgctgccggcagacataccgccgcgcagcacaatgccaaaaacatagcggcagcacgcttaatttttttcatagtttcgtctctcccccgttaaagatattggcttatttcgtcctttatataaatatactcgtttttccggctttggtaaagccttatataatcaacataataatctatcggcatttcgtccgcggcggtcactgccgcacccgcaggcgcccattcgcttttttccgtaaacaattcgttattcaaaataatatactgcggctcgtgaaagccctccgccgtggggtaattatcgcaaagcaacaccgagcggtcgtctatgtatgttttgaaataacaggtatcgtcaacataaaattttattgtttctctgtcccactcataagcgtaggtgtgatattcgctgttgagcgtatcgggattatcaaatttatatgtgcgctgcatattgttttcctcgcccggcagcattgtgtgaccgtgattgccccatatgtgaagattgggtgatacgcggcaaacgcttgaaaagacctctgcaatatccgtttcggcaaaccagcccaagtccttattatgaaataccgaattaccgcgcgtccaaaaggacggccacgcgccgtgcctgtagggcagtcttgcgcgcatttcaaggtagccgtatttaaaattcatagtgttttttgtggctaacccctcgggcagcgagtaggtatctccgtttctgcaaatccgcatatgcaggttaccgttttcaacccttatgtgcttttcgctgttatcgtatattctgccctcggtatacattgagcgcaacatatgccatttttccgaattgattttattcccctgaaattcatcatgccagacaagctgcctgccatgcttttcaatgggaattttatcggctgtatccgtaattaaaaagctgttcattgcgtttcctcacatagtgtattgcagacggcgcatttcaaccgataagccttatagctattcggctcaaatccggcgccggcagctttgccaatcataggctcccttcattttaagaaaggagcctatgaaatttttggtgcaaagcggcttagttccagttatcggttacagccgtttcgccctgtgacaaggtaattccgtcagtgtttattaaaatctttttaaggcagactaaatccaaaatgtcaacgtttttatcctcgtttacatcactgtaggttttgtttgtctctacgccgagcaaaacctttttcaaaaaagcaaggtcggcggaatcgggtgcgcttttagaattatcggtatcgcccaccgtgtggtaatcctgagcgtttgcagccgttgcaaaacaagaaatcattataagtgccgttaatgcggctattatttttttcatggtttttcctcctgttcttccgctcttaattatttgtaaaaacgaacatagtctataaggctttcagccgattcgcctgttttaagcgtatctgcgctcaggcttaaaataaggtatgtcgggttttcaaacagcgccttaacctcatttacggttctgtaaagatagtcgccctcttttttgttttcacggcagtccttcaatgcctgttcaagcgtatattcgtaaaccaattcgccgtcaacataggttttcatagcgtcggcggttctttcaaagccgtaggtatgccactcgttcaggctcaggctcttatcgacagccttaggatcacttaacgggttaaggcgtatttggtgccgctggctgccgtcactgccccagctgtgcagtgtagagtaaaacttagtgttattgtcgaattccacaatatcaagttcggggtgaacataattatcggtatcgtttgaggggtatttatattccgtttcgcttattcctgctgaattaagccaaatgcagccgcctatgtccgcaaaatcggataattttgcccttacctctaaatagcctgtggtaaaatgctgccttgaaagcatatagggtattctgaaagcactgtcgctgtcacgggcaacggtcataaccatattttcaccgtcagctgaaaccgcgtcgactgttgaataagccgtaacgccgtcagttgttctgctgtgaccccatatattccagtttttaaaaatatccgctgtatcagccgaattaaattcgctgttggttgcaagagtatagccgtatttcccgtaagccgcgttatccgcaatgctgtcgagccctgcggcagccgctaaattgcggtttatgccatagcgtgttttgctgtaaagcactctgccgtttgcgcatttaatatagcctaccaccgtataatcgcggttaaagctgtttgtgcttattaccgccgtcacttcaagtctgttatcagccgctgtcgaatatttcaaattgctgttagaaagcttctgtgcgccgagtgcttcataatttttaagcgttaactcgccgctcagcttttcatccggcaaaacaagtaagcctatttcggcaataccgtagcgcttgccgtctattattgcgtttttaaccgttatgttttcgccgactgcggtatattcaagtccctcaaagcctgctttaaaggatattgttttattttccgtatcggcagcggtttcggtaaccgcaatttgcgaggtaacctttgaaagctcattatcactgtaatttacagttacatttgttaccggctcgccggatttctcatagcagataaaattaccgtcagccgcgggaacggaaacgctctcgccggcatagccctttgcaagctcgttgccgttatcatcggtcacggcaatttgcgatgtgagatctataattttgaaattatcaaaataggtgaaggtgagtgcctgccacggtgttatgtaaaccggcagaccgttatccagcccctcaatacggaactcataatgtctgtaccaaccggtggtaccgtatgtgccgtcagagttttgatatccgtatttaatcggaaccttagactcagtatatctttcattatcaagcaacggatatgtggtagtaaagtttccgtcagtcggatatgccggttttgaatatacaagtgccaaagcggctctttcgggaattaaagacggattatcaaccttcatatcaaagcttatcaggtattcatgaccggagtatgtaaggaaatcggagccatcggtattgagcagctttaaaacaggcggccatgcggaatttgtgctgggtgttccaccctctttataatcggtcaatgcgcttgaattgtcaacgccgacatacggtaatacactccagcctccatcgtataaagttcccgcaagagcatttccgttttcaaaatcgcctgtaacgctttcaaacgctgcccaaagctctctcggctcatagcccactgtgccggttgcgggctcagtaagcgctgcgtctaaatataatcctttaaaccgcgcgcccgccatgggaacgttaaccgtgcttaaatcggcgtcgcacttagcggtaattgttttggtctcgcttgcagaggtatgaacagtaagtgctactgtcgtttttttcacttctacattatcaatatatatttcctggctgccgacatttccccacgcggtattgtaaagaacaaatgtcaggtcagatagctctttgagcgctgaaacggtcaaatttgcggttatgtgcgtccaatctgccgtaccctttgtaaaattcgctattttggctttttttgcagaccagttacttgtgtagtcgcggtatcctatcttgtttattttgttgtctgtaatcgagtagtaggcatataaatcaaaatcaacggttgccgtaacccttttaatatcaaaagatatttggtatgtttctccgtttttaaccttaaaaggaccgaaattattgcttgcgggaatctttattgcatgcggccacattccgaaattatcattgccgccatagctgcctatttgggtgaatttaatcgcctttccgtaattatcgtcaccggtatcagcaacggatgcgccgttgtagttggcagaaatatttaaaaattcatcggtattttcaaaatccgcaaaagttttattaagattgctttcaccgataattatatcatctacccacgcaatgcctgcgtttttccaagcaccgttaccttctataaccggtaaaaggaaaatttcatcctgactgcctatgtttgcaggggcggtaaaggtaaatttaaagctataccagccttttctcatttccggggttttatcggtccacagcccgtttttcagcgaataatcgttaacggagcagctgccgcccaaaatatatcttccgttataagcgccgccgtaaagtatataaaaatacggtatattaaaactgctgtcaaggctttcaatccacattttaaaagcaaggtcatatgtagcgcctgcttttaccttaaatgcacttacagttccgtccgccgccgtttgtgatattcttatactgctgggccaagccgtagcgccgttacctgcagatacaaatgtatcaagctttgccgcatagccttgcgtatcgtcggccttctctacggttgccgcactgcggttgttggtatggaaatattgctctgcctctgtttcaaatgttgtttttgcgtacattgccgccgctgccgattcagcgcccgcgctgaagggaatggctgccaaaaccgataaaagcattgcagccgtaagaataattgatagtgtcttacgcataatatacctccaaattattttattttaaagaccggtgaatttttaatttcaatccgccggtcttattaaaaccgttggggaaatttgctgaatgattatttcttctgataaagaattgcgttgttatccgctttttggtaaatgtgaatccaatcgtatgaagcctccgcaaaggtaaagctgtcatcaataagatttttgctgtagctcggctcgcaggggtcactgcttaaaatcagccacgccgccttatcaaagcaattgtatgtttcggctgagcagtcaaacgtaatattcagcttgccgtctacataaaagctacaggtgtcgtcatcccattcaaagccgattgtatggtactctgttccgaatgccttggttacgccctcggagttattaagaataccgccgtcgccgcccaataaattgcggtggctgtcccccgggccccaggtgtgcagattggattttaccgagaacgggttgccgaaggtttcgtaaatatccacctccaaaaacgccgacgctaaatcgccctgcgtccagaatgccgcgcctatgccctttaccgtgggcagctttgcgcgtatttcaagatagccgtagcggaacatcatttttttagcgcctgttgagtaaagcgaggcagcggttatatttttgccgtcccttcgtgtttcctggtggagagcgccgtcctttacaacattattcgccttggttatggtagttttaccacccaaaacatttttttcggaattagttccccttgactgccatacgtcagatagctttgtgccgttaaattcatccgaccaggtaagcttgtatccgttagtcaaagagtattcgccgtcatagctgcctgtttccttaaagccggcagctatgccgcccttttcttcaagcagctttacaaggcgtatggtgccggcatttaccgcgtaaatatgctcgcctgtaacgctcaccttaccctttgccgccgaaatggtatagcccggtgcggcgttcttattggtaagtgttgaataatcagccgaggtgcggttagtatcgcctatgagtatttcgttggcaatcggcagtgtattatcatctgccgaagctataagcttaccgcacacacgaactatttcccgccgcaaatactctgccgccgaggtttcaatataggaggctacgtgagagcaaactattctgtagctttcaatcggaacgcccgcaagagctaagcttttaacagggttatactttgaggaaacataattaaggtcagcccttacctccgcctttgagtcgcggcaatagtttgcaaggaaaaattcaatagcgttttccaaggaataggtattccccgcagctattacaaggtcattgccctccattcttataatgaagtcgcccgcgtttgcacttctgcccgtattgatttcattaagcgcctttttagaagcctcataacgggtggtgtaaacaaggagccttcgaccctcggcgtcaaattcatcgtttttcatttccacctgctcgcccaaagccttgctcatacccgttctgagctttgcaagtatcggcgatacggttttatcaacaccctttgacgttactattgtaaaggtgggcagtccgtcggtcataagcggaacagtagtggatttctgcccgttattttcattttccaccaaaaccttggcttcatttttaagccttttaattacggttttggtttttgcaggtaaatcgcagttgcctgttgttatgccgtcggtggagcttaccgcctgcgcggtgaaaataacgctgtccccttcggataaagcaatatccgaaagataagggaaagctaccgccgtactgccgctgtttaaaactccctgccagtaaatacggctgtttctgtaaacccgcagcactacggcgcttgcggcgttcttttcgttaaggaaagaggtatcggttcccgctatactgcctacaattgccgcgttaccgcccgaaacatcggagaaagtaacggtgcaatcggattttgcagtatagcaaattccctcctccttttcgcctgtaaaggacattataattccgttttgcggaatatcaccctcagcgcagccgcttattgccatttttgaggagtcaaacaccgcaagcgaggctgttccgtcatcatttaccgtgtatgcatagggcgcgcccttggggattactccgtcgccgccgcgccagggggaagcagtgcgtataagtcttttttcccattcgccgttttccgcgcccgaaagccactgccaatcggtagaggagtaaaattcggttgcggtttttgccgaaacatcctttgaaagcgcccgcgccgcatcgtttctcacgcttacaacgctgccgtcctcaaaggctaccgaggggttcattgcaataacatattgcgcgctgtcatttaccgttttgcctgtatcggtctttgcgggttgcggtttttcgccgcagctgcaaagcagcgtgatacttgcagccagtgctaatgctaaaattctttttttcattgtctttcctcccttcataccttatttttgcgttttttcacggctattacagtaattaccgcgcccgccgccaaaactgccgcgccggatattgcaattattatccaaatcaggctgttgtcttctttttctgcttttggcgatttattattagcggagctgcttattttaccgattttatcattttcgttaacggttattttcccgtcaagctcggggtcgttgggttcaacctccacctcttcggcaacatcggtatagcttgtaacggttttgtaaacaggctcgggcgttacaattttttcccagccggcgtaaagggtcatatcctgatttacgagcgtgccggtaaaatcaaacttgtttttaagcgccttatcgctgtaccagccggtaaaggtgcagccctcgcgctcggggtctgccggagcaattatgtaatcatgcgaaagctgggtaattccgtttacctcgctgccgccgtttgagtcaaaggttacgtttatctcgcgcagctttgtaattgtaatatcgtcaagctttgcggtaaggtagccgccgtaaagcacaaaaccgagtgttcccgcaacgccgtcgccgtcctcatcatctccggttacaaccgtgttttcataaagcacccatttgccgaagttttcaaactggttggtatcggttatatagttttcgttggcaaccgtccaatcggtcaaattatccttattggggaataccgcaaggtaaaggttgccggcgcctatatcctcaatattaagccagaaggaaaccttataaaccgagttcggcgcaagataaacctgatttcccgcagtgttcgggtcgtacagcttcattccgcgcaggtattgctccatccagtgcccgcactgataataacggaagtaattatttccgctgtgagcgttttcggggtcattttccataacgaaaacgccgtttgacgggtggtagcagtttttgccgtcctcataaaaggcttttgccttatctgtatcctcaaaatctataattacatcctttgaccaatcggtagcggcttttgatatatcgtccgcctctctccaggaggcataaagggtaatatcacttttcgggaaggtgttgccggtgaacagcttgccatccttatcgcgccagccgttaaacgaatatccctcatacttagcgctgtcgcccgctataagcaggtcgcccggtgcgcccagccttaccccggctgatgcctgcccgctgccgtcaggcttttgctgaatatactctaccttaatacactttgtatcatccaaaagctctattttaaggttatccacatcaactatgtggtcaggtgaatcgccgcacacagcaagctttaggggacctgacgccgccgctataacataggtgctgtattcgccccaggtttgcgtttcgtgcttatccggtcccagcgcgcctatatcaagaatagccgtggaattacctgagtttatgcccacgccgggcgcctgctcgcttgcaagcagctttattttggtgtttttattggttgcggcgccccagtgccggtaagcaaggcttattttgtagcgcttgccctctataatctggaagggcgtgccgtccttattataaaggcttattgccatccaacggctgctgctttcacccgtcaggttttcaatgccgtcatcaaaggttatatagccgctcccgtcgtatgcttcattagcgtcattttcatgccacagggcagatgatgacatagcgttatccgaaacagccgcggcagcgccggtatttttatagggagcctctgcatattcgccgctttcaaagccggtatagaatgattttgcctcggtttcctttttcacccaggcggcgtaaagggtcagctggctgtcgggcataattccgcagtcaaagggctgcgtaagctttgcgtcggtataccagccgccaaaccaatagccctcgcgcgtcggcgggttaaacaccggaatttcggtttttgcaatgcagcttattgccgcaagctcattgccgccgttggtttcaaaatatattccgcgaacgtcgagccgctcgttcagcgtaatatcatccacataaatatcaacgtcatccgccgaataatttgtattttcggaaacgcaggttattgtaatcggggtttccgaatcggtgtagaaccgagccttagcagtcacccagccgtcagttacgtcatctattctggcaaggtcgataaggtaaatgttattgctgctccactttccgttggggttgcgcacacctgccgctacacgctctatctgtaaaagcagcggctgcgacggctttttatccgcacggtatttaaggcttatttcataagcggaattagcgttaggtgtaaattttgcatttttggtgccgttatcgtaaattctcgcaattgaaggccactgccagtcatattttgccgcctttttaaaatgaagcgcgtttgtttcggtgcctgtgccgtcatcggtttttacaacctccgccccggcagaggtaaagtctaccccattacttaccaccgaattgaaatctgtcatattatcctttacggtgtaggtaattccctcatcgtcatatgtgtttactatgctttgcggcacgcgggtatccgctgtccacttagcgtatacataggtgcagtcgcttcttacggtagcgggtgccgaaacggtacattcggcatcggtaaaccagccgccgaaaatatacccttcccttgtggggtgaccgtaggagtgcccagcataaagctctgctttttcgggtgctttgccgtccttataatcgcgggttacttctaccgtgtcgccgctgtaatccacaaccttttcaacagcaacattatccacccaaagcttttggtatttaaggtcgcccatatcgtatgtcatagccgacattgcaagcgtgccgtcagctaccgcggtaaatgtgccgctgaatgtaccccagctgttgctgttgcctctgcctatccagcctatgtatactcctttgcccgcttcattccacgagcccattgtgccaaggttgcctattccatttccggcgtcggttattgcggcaagcatattaacgtctccggtcagtctttcctttttataatcaaaggatattttatattttgctcccttttcaagcataaaggctcctgagccgtcggtattgcctatacgcagcgcctgcggccatttgttcgtccaatagcttgaaagctgcgtgaattttattgccttaccgtgagaagaatcctttgtgtcctcataggatgcattggtctgtgtgctcttttcgtaaaaagcggcgcttgcgccatcgaaggtgacgcgcgtaaaacttttatttccgccctccgcgcccaccaccgagcctatagccgcggcaaccgtgctaagcattaccgcagcagagagtaccgtcgctaaaattctgcgcataataatctcctttattgtttaataattacctgaacgctttaattttatcatttgctttggaagcagcattgttaaatacattctgcttgcctgcaagcaagcccgaaacctgcgccggatcagcctttgtaacgtcagccataaacatgcctatattcgcgttgccggcaagcgtcatcgggtcgcctgaaaaatcaaagtttataccctttttcttaacctcgggaataatgtggtcaaatgtcattttttcaagcgatttattcttaaatacgccggctcctgcagaagcataatatttataatcaagataatagcggagcaggtaagccgcgccctcggggtttttagcaccctttgcaataccgtaagcgcgtattgagccggtcggcttgcactccttgccgttatagcttgtgggcataggcaccatacctattgcgctgtcgtccatatccttaaagaaaccgttatatttcgcgccgtaaagtccgcttacaaatacgcctatatttccgtttgcaaaggtgccccaccaatcggtactgttccaaagtccttctttatatatggtagcggcaaagttatagcctacagagagaacctcagccgtattcgccttaaaggttgcggtttttgtgtcgtagcttataatcgggttaccaagccctgcattaagcttttgtccgtctacacatccgcctacataaccgagctttttaatgctttcgagacactttttaaggttttcatatgtccacttgcccgaattataataatcaagcgggctggttataccgttattggagaaaagcgttttgttatagaaaaccgagttgatattttcccatacgctttcaagactgtttacaaagtatgtatttccgccaacggtacaaacgttagtaatatttgaatcccagaagctgtccttcaaatcaataatgccctggagcggctgcgcaatttcaagcgctgacgggaaaacatcattgcaaataattatatcggggcccgatttagccgcaatctgctttgcaacctgagcaacatattccgcctggttataagaaacaagcttatatttaatgcccgttttctttgtgaaagctttaagcaccttttcatactcagaggcgccctcatcgccgaaatgcgcaaaggttactgtggttccctttaagcgcttgggaatatttgcaaacgggtcgctgcccttcatttcaaccggcttttcaacaaccgtacctccgccgttgttgtttccgcctgttgttccgcctgagccggtggtgctgctgccgctttgggttttgtcccctgtgcttacggtgtcatcgtcaaagtcatctatcagcacggcagacgcatccgaagcatccgcgccggcgtccgatgccgtgtcctttttgccgcagccggcaaagcccattaccgttgtcaagcaaagcaacagtgccaatgttttaattgattttttcattttgtttacctccgtttttgttttggttttttaggaaatttatatcgtttgaaaaatcaccgccctgttagctaaaaacgcactaaaaatgctaattatttagcactagctgacaatttagtacaaatttataactttgtcttgacttttttcttaatttacgatatcattataccaaagttatgtataaagctccataaaaaaacagaacgcattttagcacaaatcagtcatcaaaggtggaaatttttgtatgttcaacgattttcaggccgactccggaattaagggatattcaagatctcctagagggtattcaacaaatgattatatacacgtaaatatgtgcggtaatttaaacctggatgaagacagtgatgttttaagaccgcttggccgcgaggattatctgctcatatataatataagcggaaaatgccacgtaaggaccggcggcaaaattgtaacggcgcaaaagggcgagcttgtggtttacaagcctgatgagccgcaaaattatttttacagggcggtagaaaagccgcataattattgggttcatttttcgggcacggcgtgtgaaaagcttataaaccgtatttctttggctgacgaccatttgattaaaatatctcacactaccgaggttgagtattatttttcaaagctctgcgtgcactatcatttcgacagctccgagcgagataccgtttgcaacgggctgctgcttacaatactggggcttatcgcccaatacagctcgggcaattcagcgcctaatttttcgggcggcagctcaagatcgcagcagcttgtaagcgaggttataagcatgcttaaaatgaacgatatgttgtggatgaatgttgatgactgcgcagagcgggcgaacctgagcagcgcccaatttacgcgaatttttaaaaatcttacggggctttccccactcgattacataaccaaaacccgtatgaacagagccagagagctgcttttattcaccgattttaatatagaaaaaatatcggaattatgcggctaccgcgaccaaaactatttcacaagaatatttaagaaaaacgtaggtctgacacctactgatttcagaaagcaaaaataaaaaggagaaaaaattatgcttgagttaaaaattctgtcttcactggaaaaaatctttcccgattccacaggtgccgaaaccgcccgtttttccgctatgagaaacgagcctgtttcatttcaaatagcgtataaaaacgctgacggcgaaaggtatgttcagccgttttacaccgtaattgacaccgatttggaaatatcgcttatttcgcagtataaaatcgggtatgtccccgtagcacaatgcgtgaacatacccgaggatgaatattacgaccgaaaaacacccggacttttccctgacccgctgcttccgcgcggcactaacgaccgggttgaaaacgacggcttctgggcgcccagattttatgagcaggatgaaaaaaatcagcttaattcgtaccccgcctgctaccaggggctatggttcaccgtaaatgaaagcggcgcacaaatacccgcaggcgagcactatgtaacagtgcgctttctggcagcagcagacggcaaggaaataggcgcaaaaaccgccgaaataaccgttgcagacgcatatcttcccgagcagacgctcttttacacctcttggttccataatgattgccttgccgatatatacggcgttgaaattttcagcgaccgatattttgaaattatggaatcctttgttgctgaggcggcaaaaaccggaatgaatatgatacttttgcccgcgtttactcccccgctcgacacgcctgtgggaaaggagcgaaaaaccgcgcaattggtgcgcataagccttgaaaacggcgaatattcctttgatttttcgcttatggaaaaatatatgagcctctgccttaaatgcggaattaaatattttgagcattgccagcttttcacccagtggggagcaaaagcggcaccgaagatctttgccgatacacccgacggctgcaagcgcattttcggttgggaaaccgattcaaaaagcgaagaatattcggcatttttaaaggcttatctgcgctcgcttatgaaattccttaaaaaagctggtcttgaaaaaaatatcttcttcggtatttcagatgagccaatgcccgataatattgaatattaccgcaatgcgaaaaacattatcaaggacgaaataggcgattgtccctcgggcgactcgctggcacactacgaattttttgaagacggcctcgtgcaaatacccattatttcggtaaactcacccgatatggacaaatttaccgcaaactgcgataatttctgggtttattacactggtgaaaccctttacgacggctatacaaaccgaattatcaccactaccggcgcccgcaaccgaattataggtgttcaaatgtatatggcaggggcaaagggcttttcgcactggggttataactattactatgatgttttaagtcacggtcttttcaacccgctgaacgacccctgcggctacggcgggctgcccggcacttcgtttatagtgtacccctcacccgacggcaaggcgatagtatccaccagaatgaaggtattttacgaggggcttaacgattaccgcgcactaaagctattggaaagcaaaataggaaaggagcagacggaaaaagccgttcttgatttcttcggagagatgaatttccgcacctgccctgataattcaaagctgattgaattcagaaatcttttatgcaggctgataaacgataattagaaaaatctgctttgtacatatttttacacaaaaaatcagcacggtgttaaaccgtgctgatttcagtctgtctgtaaggtcagtcttcctcaaagcaattatactgcgttaaaataaacttacctatatcataaagaattgtctcgtatcttttacgaaattcaagcggcaggcgtaggcaccttgtatcagcctcaaatttgcgccgtcttgcgggggacgacggcatattatcagcctcaaaggtaaaatagcctttatagtttatatcctgtaagccgtgcattatggagtcaaaattcaaggttccggtatacgggaatgtatggtgatcatcgtttcccatattatcctgaatatgcagggtgcgcacattatcacctaaaattttcagtgcttcatgctgcggcagctcctgcaaattaccgtgacctacatcccagcaggctttaagcagtgggtgatttacatattcaagcaattcaagcaggtcctcggctgagtctacccaataataatgctcgtcaaacattttgttgaaattttcggtcagcacggtaatgccgtgcttttcggcaaccttttaatcccaatcctccggcgcgcacagcgcctgcccgcacagccagtcaagctgttcattggtataccaaaagcgcggaagtcggtttacattttccgtaccgtgccgttttcatcaaacggtttgcgcatatccatagtatcaagcactatcacacgggtcttttttcggtttaagtcgtaataaaaatattttgaaaattcgtagcttttatcgtgaacgcaatttttttgcaaaggggtcccttacggtgtaattcatacttattctcccttgcaaataagattatgtgtttgcattgcaattatagcatatataaattttacgcgcaatgtaaataattaccgatatgctgtgaaaaattaaagccttccgcttgccagggcttgcgccgaaacagccggaagactttatatatatactaccgttaaatctttttatcgcttgtaagcacggttttgccgcccatataaggtcttaaagcctcgggaatcaaaacgctgtaatgctcgccgtcaaaacggagattgttttcaaggaaagctatgagcatacgcggcggggctacaaccgtgttgttaagggtgtgggcaaggtattttttaccgtccgcgccctttactcttatgcccaatcttcttgcctgcgcgtcgccgaggttagagcaggagcatacctcaaaatacttctgctgcttgggcgaccacgcctcaacatcataagatttaacctttaaatccgcaaggtcgccggtgcaacattcaagggttcttacgggtatatccatactgcggaaaagctctaccgagtagctccacattttgttgaaccaatccatgctttcctcggggcggcaaataactatcatttcctgcttttcaaactggtgtatacggtaaatgccacgctcctcaatgccgtgcgcgcccttttccttacggaagcagggtgaatagcttgtaagggttaagggcagcttttcctcaggggtaatgctgtctatgaacttgcctatcatagaatgctcagatgtacctataaggtaaaggtcctcgccctctattttatacatcatagcgtccatttcttcaaagctcataacgccggtaactaccttacttcttatcatataaggcggtatgcagtaggtaaagcccttgtctatcataaaatcgcgcgcatacgccagcaccgccgagtgcaggcgcgcaatgtcgcccataaggtaataaaagccctcgcccgcaaccttgccggcagcgtccttatcaatgccgtcaaaaagctgcataatatcggtatggtacggaatttcaaaatcggggtgagactgctcaccgaactgcttaacctccacattttcgctgtcgtccttacccacaggcacgctcgcgtccactatattcggtattttcatctgtatttcggtaacctttttttgcagctcgtcctctttttcttcaagggctttaagctcctctgcctgctcgtttacaaggcgcttcatttcttccgcctcgtcgcgcttgccctgcgccattaaagcgcctatctgcttgcttaccttgttgcggttggcgcgcaggtcgttagcgcggttgttggcagcgcatttttcgccgtaaagcgaaataatttcgtcaacaagcggcagctttttatcttcaaacttctttttaatgttttctttaacaatatccggattttcgcaaataaatttaatatccagcatttttattcctccgtcagaccataatctttttttagtataacacaactgcctttttctgtcaaattttttaagcgaaagtttttcagaaaaaaagatttttattttttcgcaaattgcaatagcaacctgcaataattcacagaaaagtaacgattagcgtag

SEQ ID NO: 4018 - DNA, 13659 bp, Unknown
  16S sequences of unknown bacteria
gcgcgaaaaaatacaaagagagatcgggcgaacttacccgatctctttctttatttatttctttttagagccgatgacgccgagggccaaaagcatgactgccagcatcgcggacaccgcggcggcgctcgtcagggatttacagcctccgcagccgttgaccgtcgtgccgccggaatttgtcgaagaagacgcgtacgcgctgtccgaagaattttgggaatcccctgaggaatcgacgatttctgtcttttcccatactgccgaaagcgtcatattttccgcgggcatcaaaccgggcgtatacggcgccccgtcctttgtccaccccttaaaggtatagccctccttttcgggcggcgccacgacgatctgcgcattatattccacctccatgtcttgcctatcgcagttttcgaaaatgattttataggtattgatttcccaaaccgccgcgagcacgatatcttcggcgggcatcaaatcgggctgatacgcttccccgtttttcgtccatcctctgaacgtgtaccccgtcttcgtcggcgcggatacggaaatctgcgcgttatacgctatttcgatttccgcaaggtcgcagttttcaaaactcaaacgataggaattgatctcccattccgctctgagcgtgatattctcggcaggcattacccccgcttcatacggcgctccgtctttcgtccagccccggaaagtatgccccgtctttacgggaacagccgcctcgatggatgcgttatattccacctcccgctcggcgagatcgcaattctcgaaagtaactttatagacgttgacttcccattccgctttgagaaggagatcctccgcgggcatgagttcgggcagataggaaacgccgtccttcgtccatcccttgaacgtatgccccgttttttcgggcgccgtcagatcgatcggcgcgttatactctacttctatttcctgtaaatcgcaattttcaaagctgattttgtatctcttgatctcccatgccgccgtgaaatcggcattcccgctcacaacgatctcccccgcaaacagttcctcgccgagcttccaccccttaaaggcgtatcccgtcttttcgggaacggggagagtcactttatctccgacataggcgtttatatcggacgcgttttccccgaacgtaagctttgcctgcgccgcggtgagcgtgtaggcgggctttaaatccacccatacgtccgtttccgagccgtctacggaaacgaattcaaaatagaatatgtcgccgtaagaaacctccgcagcgacgtcgctgaaatagacgacttcttccgccgcaaccgttttctcgtcatagcgaacgatggcgtcccccgtgtttttatacgttctcagaataaacggacgcgccgtaccgctcaacgtattcgtcgccatcgcgcgcccgttgaaggacacggtgccgccgtgcggcgccttccatgcgaatactaacggggagcccaaacagcttttcgcaacgtgaccgtaccatactcccgtccagttattgggattgtttgcaatccaatagttatcgcccacaaagctcaattcgttcagagtgcccgtcaccgagccgtaataagtataccaattgtttgcgccttcggtatttcccgccgcagggtaccacgcttccgccgagagattatacgccgcctcgtcgaagtcggcagtcgttcccaaaagcgtattttccgaaacgatcgtcttgcgggtaaaatcggcgaaaatatgcacctcggaacgactttccgccgtggaggcaggcgtcatttcaaaggcgtatttttctccctttttcacttccagctcgataccgctcaaatacgccacgctctccgccgccgtaaaggaaacggtgtctatcagcgtcgccgagctttctttttcgttataaattttataggtaaatccgtcgccgagaatatcgacgcccatccttcccttgaactttaccgttccgtcctcgggcgcctcccagcttgccaccgcgccgacgccgcccgcgcagttgaaatatcctctgtaataggcgccgctccacgaatcgtccgcaggccgccaccaaacgccgccgttttgcagggtacattccatgcgtgtcccttccaccgtccccgcgtataccgtccactgattatccccctgcacggcttcgggagcgggaaggtagtcctgccaatgactctcctcataagtatccgtgtcccctaagagcgtgagatttccctcttccgcgctcgccgcggtacgggcggcgccgattccaacgcacgccagcgcgattgccaaagccgtttccagcatgacagataccatttttttcatcttatttcctcctgtttatttactgacttttttatcattatcgctcccgccagcaatagaagcgcgattcccggtcccgcaccgatactccccgaacagcccgacgctttttcaaaacgcacttccaccgttacgtcggcggcgaccttttcgataatgcaggcataattttcagcggagcgcttttcaccgttgactttcacttccgcgatgcgatagcccttttcgggtacgatataaatctttacatcgccgttttcctccacctcccggcttcccgcgaacacttttccgcccgcgccgcccgaaacgttcacgccgtatacgggaattttcgagaaaaacacttctattttcttatcgctttccgctttgaaaacgatttggttttcttcgacgctcgtttgcgcgccgtttatcaggactttatccagcttatagcccctgtcgcagacgatctcgtatacgcattgcgaatttttaatgacgctgccgaacgtgccttttacccttccgcctccgcccgtttgaacggatacgagcacgtactcgtttttcaccgccatttcaaacggcgcaaacgggagattgtcggaggagtagagcgatacgtcgggtacggcggcataggcgtaccttatccgcacgggagcggaaaccttcccgctcgatacgacgattttgttcccgactatctgcgcggacgcggcatgataaacggaatcggcgccgcaaagctcaaaaccgacgatcgcttcgccgcgattgacgatctcgccgtttaagtcggaaaaggaaagggtgacgacgccgctgtcgttgactgcctccgagggatagggcgaaagccccctgtatcccgccttcccgtaaattttcgtcagagccagttccccggcgcgtttggaaaactcatatttatcgacggggtgaatgtcgcttttaagccccagatcgatgccgcagaccacatataactcctcgatttcttccatcagctcccattgcatccgacggaaagcgggccagcgggaatcgctgtatttgggcagctgcgccgctatcacgggcatatcgttgaattccgtcctgtactgcgcggtcagagccttaaactgttcggcgtataattcgggccaggcgctgttcgcctctccctgataccataaaaatccgccgaaggtataagagagcatcggatatatcatttgattatatctttccgtcgccgcctttcccatactttcggcgaccgaccccgtcttttttaccgaggcttcgttcatccattcctctattgcggagccgctggtatccgattcgacgatgccgacgggaacgtcgccgagtccttcctgcaacttcaaggcaaagcccgccgcgtaggcggaataggtcgccaaatcctctattttcgcgggcgttttccaaacggctttttccgcaaactgcatttccgccgcggcgctcgttccgtttgcgatatcgacgactctgattttatcgacgttttcgtattctctatatccgtcgtatttgacatattggaggggaagttccatattcgattgtcccgagcagagccacacctctccgacgagaacgttatcgatttgtatctcatcgttcgtcgtttttgccgatagcgttttcccctcggctgcggcgtccattttgtccaggcacaccgaccatttgccgtcttccacgcgacagcgcttttcctgtcctccgaattttacggtgacttccgtcccgctttccccgtagccgaatatctttacctcccgcccccgctgcaagaccatattgtcggaaaaaatcggagccagagagagttttgccgccgccgaagcgcggacgacttctccgccgacctttccttttccttcctttatctccgcccatccgagtgcggcaaggcacaacgccaaagccgtaccgaaaagcacgaaaccccgctttatatgttttttcattctcgtttctcctctccgaacgaatcccattttagtttttcaaagccgccgcgtcaatggacaaaaaaactttgcgcaatggacgaaacggaccttttttcaaacatggacttacttttgcggacaagtccctttatatttttttatcagctcccgaaattcataataactgtccttaggcacccgccgcagcgttttgcaatcggtgtataccagcccgaatctctgcgtatatccctccgaccattcgaaattgtcgagaagcgaccaataaaaatagccgtctatttcagttccctcttcggcggaacgctctaattgccttatatatctctttataaattccgtccgcgtcggatcgtgcactttcccgtcgtcgaagataaagtcctgcaaagaaatcccgttttcggagatatagacgggctttttgtatctttcatacaaaaatttagtcgcgtaatagagggactcgggaacgatatgccagcccatcggagtggtgggcgctccgacggcgtacgggagtatctttgccttgccgccgcattccccgacataatagccgtcgtaagtattctgtgcgaaaaagtccacgggcgaggagataatttccatgtcccgttctccgatcttgggcataatttcttgatagcggcgatagtattcctcgggatacctgccgaaaaaaatcggatcggcgtacagggaaacggacccgagaggacaattttcatcgagttcgaaaaatttttcgtaggcagcccgataatccgcttctttttccgcggcgggcacgggcacgccgccgcaggaagcgtatcccgctttggcgcccggaatttttctcacttcccgcacggcaagaccgtgcgcccgaagcatatgatgcacggccgaaagctgttcctttttagagagagaaagtccgggcgcgtgcaccgcggaatccatgccgagtccgaaaatacactgcggctcgttgaaggtgaaaaaatgtttcactctgtccccgaattcgcgaacgagcgtttcggcataggcgcggaaccactcgggaaaatcgggatttaaaaaaccgcccttttcctgcaacgcctgcggcaggtcccagtgatacatcgtcagatacggccttacgtttctatcgagcagcccgtcgatcaagcggttataataatcgattcccctgcggtttacgcttcccgttccctcgggaatgatcctcgtccacgccgtggaaaatcgataggcgtccgcacccaaatccgccgcgagttttatatcttcgtccaaaaattcatagctgccgcaagcgacgtcgccgtcggagccgtctttaatgcgtcccgggcgatgagagaaggtgtcccaaatggatgcgcctttgccgtctgcgagcggggcgccctctatctgataagcggcggtcgccgttccccaaacaaattcttttttaaaaggcattttattcctccgacaagttattcctttttcttaaaagcagctcatttgccgtacttttccacggcggcgttgtattcgtccatcaccttttgcccctgataggtcgtaagatacgtcctgacgaaattatcccacttggaatcgaactgatttctgtcgcccatgatgagattgacatattcgctctccgagtattcgtcgagcgcctgaccgagagagaggatattttcgccgttatagtactgcaaaggcgcggtgatcttcccgttcgccagcgtcatttctttgattttgagcagcgtttcgctgttgtccgtccagggataaatgacgttttcattgagggaaacgaaggaatagagcagcgtccccgagtcgacgtcggaaacgttcttctgtaccccgtcctctgtctttccgagaagattgacgacgtttccgctgccgtccacgtcgtaatgctcgccctttaccccgtagagcatcaacgtctgcccctcttcgctcatcaggtaatcgagaagcgccaaaagcctttcccgttcggtggcggaaacgtcggcgttgatggcggtgaagcaatagtatccgaatccgccgcgctgcccgcttttgcccgtatctcctttgggcggagcaaaatacgtgatctccgacgtgccgttgacctctttgaatttattgagcaccttgttatatcccgatacggcgttatgcatcatgatgccgcattttcccgtcacgaatttgcttatcttttcgtcgcccgtattgttgacgaattcaggatccatcagcttttcgctgtaaagccgattgaaaaactttaccgcttccttggagccgtcagccacccaggtatccacccatctgcccgtggtttcgtcgtaaacgcgatcgtgaaagccgccctcgtcgtacgcgtaaaaggcgaaattgaggaaccaaagactggcgtcgttggtagaaaatccgtacgtatcctctttgccgttgccgtcggggtcctgctgagaaaacgctttgcacacgtaataaaattccgtcatcgtttcgggacccgtgaggtgaaatctgtttccgtcctcggtaaaattcggctcgccggggaacttctccttggcgtttaccgctttcagccaatccgtgcgtatataaaggcagtgatcgcagtcggaggaaagaatgggaatggcgtaatgctttccgttcgtataatcgagattgaggaattgattataattttgaagccgagcgtaaatatgcggatatttcgtttccgaaacgtaatcgctgacgggcaggagaatgtcctgctccacccattttttatactgtacgggacgatcgggcccgtagcagacgaacatatcgggaatgcggtttgtggaaatcaacgtattcaaagtttcttcccaattgctgcttggcgccgtcttgacggtgatatccatgttgaatttacccgttatcgtcgtggacacggaagtcttattgcgcagcgccgtagagagagaggtgaggtcgtaacggaatacggaaacggaaactttgccgtcttcgtccacgctgtcgtcttttccgtgttccccgcaggcacaaaaggcggaggcgacgaggaaggaaagccctaaggcagccgcttttatcagttttcttttcataaattttctcctttttattttatccttttaccgcgccgaggaccatgcccttgacgaagaatttttgaacgaacggatagacggcaatcatgggaatgatagagatcatcactaccgccgcctccttggatttgctgtcgagatattcgagaggcgtatatccgccttcgatttccagatctcccgagctgttgatgatgagcgaacgcagcgccagcgccaaggggtatttgtccgtatcttcgagaaagatcatcggccaataccagtcgttccaaagccccaccgcgtagtatagacctatggtcatctgcgcaggcacggagagagggatgatgatgctgaacaggatccgaatctcgctggaaccgtctattttcgctgcctccaccaactcgtaagggagggcgcggatgaaatttctcaataaaatgagattgaagctgttgacggcaaagggtacgaccagcgcgaaatagctgttgagcagatgcagcgactgcaccaccagcacaaagggaatcaacccgccgccgaaaaacatcgtgaagatgatgcccgtcatcaggactttgcggaaaggcagcgttctcgaagagaggacgtacgcccctatcgtcgtcatgagaagctgaaagagagtgccgaaaatcgtcactgccgcggagatgagaaaaggcttcgtaatcactttcgccgcaaaaatataacgatacgcgtcgaatgtgaaatgccagggaacgacgaggaaatcggcttccgcgacgtccttataggaagcgaaagaggtgagaagggtctgcaagaacgggtacagcgtgatcaaagccagaagagtcaaaacaatgccgttgacgtaatcgaaagcagttctttttccgttattcatagattcccgcccccgtcagttttttgacgatcacgttagatcccatcaagaggataaaattgatgaccgatttgaaaagccccaccgcagtcgccttttcgaacaatcctttcgtaaggcctatcctgtaaacgtaagtatcgatgatgtccgccgtggaatagaccgccgagttgtagagattgaaaatcgaatcgaatcccgcgttcatgatattgccgagcgtcatgatgaacatgatggtgatagtcatgccgatgcagggaatggtgatatgcacgattttcttaaaccgggtgcagccgtccacttccgccgcctcgtacaattccgaagggacgcccgccagcgccgccgtataaatgatcgtgccccaccccacttccttgacgatctccgaacaaatgagaatggcgtaaaaagcgtcgggatcgagcgtgaacgattttggagtgccgccgaaaagttcgataaatcgattgacgatccccccgtcgatgctgaggatgtcctgcacgagcttcgccatgatgacccaggagataaagtgcggaagatacatgagcgtctgcaaaaccgttttgtatttctttccgcgcatttcgttgaacatcaccgccacgagcacgggcgcgggaaaacagaagagtatcttcaaaaaactgatgacgagtgtatttctcagcacctgagtaaatttcaccgttttgaaaagctcggtgaaatgcacgaagcccacccaggaactgcccatgatcccctgtttgatgttatagtctttaaatgccagcgtcaccccgtacatcggatagtaacaaaaaattatgtaaaacgcggcgacgggcagaaacaggagatataattccctgtgcctcgccacttcgcgcaaaagttttttcccttcgtttttcatgatgaggactatcctctcctttttttgatcaggaatacgggagggacgagcagacaaagagagcctcctatccccgcgaggcttgcgccgcagcccttttccgtttctttttcgccgactaagtcggcgagcttgatccgaatatcgaatacggtggaatccgtccaattgttccccacgtaatcgagcacgaaatacacgctgtcgcccgcagacaccgcgtaactgtccgaatacgtctttatttcggagtccccgacattcatatattcttcgtccagcaattccttctcgtggttataaatcagcatcgaggaaccgtcgccgttatcgtgatactttttctgagaggaagccgtgaaggaaagcgtgccgccatacggcgccgtccagacgatgacgaccatttcgttcgtgcccgggtgcaggataccgtttgcgatttcgcaatatgcctccgtgcccacccacgacctttgcggagcaaaataggacatatcgtaaaaatcgtttatttccccgaaacaaaaccgccaattcgcgtttttatacgcctcgaaatgttccgtataatattcgagatcgttgagaaagtcgttttcaataaaatccttttcctcggcggtcgcggtgacggcggagaaagcgggaaacagcaccgcagcggcgagagccaaaatccatcctcttttcattttttacctccttgccgctcttacaaacgaagaaacgttgtcgtccccgtccgccgcgcgaacttcgtattcgtccccgtccgcggccgtcttatcgaaccagaaagtccccgaagataccctgtctgcgaacgctccgtttttatagacgtcgtaataggaaacgaaattatcgtccgtagcggcatcccagcggagcgcgacgccggatacgcccgcgtagatcgcgttttccgccgtacaggaattctccgccatgacgggcgccgtcttgtccctgccgctctgcggcgtaaggggcatattgaagaatatcatctcgccctccgcgcagccctcgacggagatgcccttttccaaaaggtcttttcccgtcgccgtatagtagtttttgttattataaaaactgaccgtatacgtcttgtctgctttgagtccgacgggatatatctttttgtcgtatcccgcgggaatccccatcacgaccgccctgtccgcctctctatccgtcttcatatacagcgactgaccgagcaccgccgtcgtcagatggtattgtttcgaatatctgcccaaaacgccgctgtttcttaaatagcggtaaagagcgacgtccccgcgcatcttttccttattcgccgcatactcctcgctcgtatcctccacgctgagtatcgtgcacaagccgcccacgaacccgtaagtacgggtattggcgggagaatagctctgtacctgcgcgtatcccgactggaattttcccgacggaaagagataggataaactgttgacgggattttccgcggcgccgtccgtcgtcgtgacgtacgtggcgtatttgaggaactcgaagccgtgcagctccccgcccgaagcgcacataatccaactgaaaccgggattgtttttgcaagcgctttccagatagtcgagaaagccgtaatattgagaataagacgcggaacagccgttgtcgtccgtactgtgggaatgggaaatatcgtcgcagggcgcgatgacccatccgtccgttttgaccatatcgagagcgtttctcgatacgatgtcgtcgagtttttccttcatgaaagagagcgtcttatcgttgcccacgcagagcagcggaccgtaataaccggaatccaattcgggaatttccaatcccttgttttccccgatcgcatcagacgtataatcataatgctgcgtcgtcgcccatacggaggatttcataccggaagcgtgcagataatcggagatcgacctgacgtcgaacgtattgttccaatccatttttttgtcgtaccagcccacgccgctcaaattgtcgtcgatatgcaccatatcgaggccgagatatctcgcctgctccgacagcgcgacgacgttttcaaaggaaactttggaaagcgaagaccacgtatccgtcgtacaaagcggaaaaatctctcccgtttcatcccaattgtactcgtattgataatacaaaaggtcattggtggcgttgtcgaggttatcggtaaacgttccccaaaaagcttccggcgaaaggaaggactcgcccttttccaaggtcttcgtatagagagtaagcccggcttttaaagaaatattctccgctttctttacggacgcttcccaaagtcccgcgtattcgaatccgaaataaattccgccgccgctacgcgcgttttgcagcgcaaagaaaggctcgtatccgctgtatccgttccattgatcctgcgtgctgtcgtaatagcccttgctattggtggcgacttcccgctcgtcgtaactgagcatcgttttggaatacccgtcggaaatagaattttctttgagcaacaggcttcccgtaaaattgccgccgcccgtcatgtaaaccagcttctcgctcccctcttcccccgtcgtcccttcaaaatcgataaagctgagatttttaagggatacggcgtttttctgcgtgttgatgagcttgtagcggctctttatcaaagaggtgccgggatagatcgtgaacgtgtattccacgtcgtactttttgccgccgagcgacaaggtgaaaacgatttctccgtgctccgcgatttccgccgcatagtctttataggtaagttccaaatcctcggacgtatactccttttcgccctccgtaaagcggaatccgagcttttttccctctcccacgtactccgcgccgctcgtcttatttacaagactcctgatcccaaagccgcttttgtccgcggcgaccgtctgtttcacagcttctgtgccgaattcgaaagcggcattttcgggatcgtaccccacataggcgtccccgctctccaaaaccgttatcattttatactcctccaaggacggagaatccttcccgcagccgacgaacgaaaccgccagcgcggcgcaaagaatggtcgctatgagctttttcatctctgtttcctcctctttatgacgagcgcggcgatgccgactgacaatcccgccagcccggttgcggcaaaagacgatttacagccgcttcccgcgccttcgtgccgcacctttacgggcgtcaatttatcgtcgggaacggaaggggccttgattttctgtcccacttcgtcgtccgtgaattccacggcttcccccgacgtttccagatatgccgccaccaatgtggcggaggtgttgtcgaaggagttttcatgaccttctttgtttcctatcgaaagaaagatgagatcgcctgcggaaacctctatatccctgtaataatagcgtctgtccgtcgtagtcaattcctcgctgtttaacaaagcgccgttatagtagatattgaccaccaccccgtcgccatcgccgtcgtgcagattataataggacatgaggcgaattttgcccgcctgatcgatccgtttgattaaaatacattcctcgttgtcgtatccgggatgcagagagcctttgctcagcctcgtaaacgtatccacggagggatttttccatacgtccccgaagacgtcgtaatccatcaggtaatatcctttttcgacgctcccgtaggcatagtaccagccgttttcgccctgttccttgccgtaatacgcctgcgcttcctcctcggagatatactgcgggcgcaggggatagccgttaattacccctctgtcgcccaaatcgaaagtttcgtcggcgtcgcccgcgctttcgacatacgtgatataggcgttgagcgtcaccgtgtcgtaagaattatagttgtttccgcccgaatcgacgtaaaatacgagaatatcgcccttcttcacatcgatgacgcgggagagatcgtacaccgtataatcgtccccgtcgatatgtctgtccaaaaacggagtttctcccaaaagataatatcggaagccaacgccgtcgcctacctccgccgccttgtgatccactttctgcaagtatcctctgacgtcgatttttcccgtgtccgtgcaggcatacattctgatggccgccatgccgttgccgggagtcatgtaagaggcgctgacggagttatagctctctatgcccacaaattcgcccgcatcgtaaatcatgcggtaatactcatcctcgaatcccgtcatgtaataccagttgcagtatccctgatcggcgccgaactgttcctcgtacagaggctccgcgccgatgtcgtcgg

SEQ ID NO: 4019 - DNA, 3887 bp, Unknown
  16S sequences of unknown bacteria
ggggatggcccggcggatggaaccgatggcgccggccccggcgagggcggcacttcgggcgacggctccggtaacggcggcgcttccggcggaggcgatggcagttcccgccggggagacgaccccacgcagggggcgcaaggcgacgagagctcgggcggctcgggctccgatgctccgcgtccgtctgaggctgcgggcgacgacgaggacgatgagagcgaggaagcgggtggcgagccttccgagggggaggatgcatccgaagacggaggaaatgcgggcacggattcgcgccctgcagacgaaagcgaggcagacgacatggagcgtgactacagcttcgacaacggcaccaacgagcagcgcgaccccgaggaggacctgaaggactacgaggatgacccgttcatcgtgaccctgcgcaagcgctacatgcgcttcgaacgcggggactatctcaagatgaagctgcgcgagcaggaaaaggagcaggtgcggcagagcgcacatccgctcaaggcgcccggcttcaacgcagatgccgtgacgggtcagacaccctacgagttcggaacgccgcgcagcagcccgttttcgatgacctaccgtcccaagcgcaaagactagcccgacccctcaagggccgtccactcggggtcggttctcgctggtcccaatagcagatggcgtccgctagcagagccaatggggtcggttctcggtggttccaatagcagacggcatctgctagcagagccaatggggtcggttctcggtggctatttggtggctacgcgcggcggggtttgcgtgcgggtgcaccgtttcgccgcgcgccctttcgggcggcgcccttgcgcgcctggcccgccccccttgcgcttcggacccttgccggcctttcccggacgcacgaggcatttcttgtcgtagccgatgagatcctcgcgccccgccttcttcagcgcctcgacgacgaggtcgtggtttttcgggttgcggtactggataagcgcgcgctgcatcgccttctcgtgcggatcggtggggcagtacacgcgctccatggtgcgcgggtcgatgccggtgtagtagatgcacgtcgagacggtcgagggcgtggggtagaaatcggacacctgctcggggttgtagcccaggtcgcggcagaactcggccagctcgacggcctctttcatcgtcgaccccggatgcgaggacatgaggtacggcacgacgtactgctctttgcctgccttctttgtctctctgtcgaactcgcgcacgaactgctggtacacctcgttgcggggctttcccatcaccttgagcacggcgtttgagacgtgctcgggcgccagacgcagctgcccgctcacgtggtagtccacgagctcgcggatgaaggtgtggtccttgtccagcaggcagtagtcgaagcggatgccgctgcggatgaagaccttcttgacgccgggcagggcacggagcttgcgcagcagcttgacgaagcgcttgtgcgacacctcgagcgccttgcagggctcgggcgacaggcagcgccggtcgatgcaggcgcccgccttgagctgcttgccacaggccggtttgaggaagttggccgtcgggccgccgacgtcgttgatgtagcccttgaaggcagggtcgtgcgtcatcgcctcggcctccgccagaatagactcgtcgcttctggactggatgatgcgcccctggtggaagttgagcgcgcagaaggcgcactcgcccaggcagccgcggttgctgatgatcgagaacttgacttccttgatggcggggatcccgcccgccttctcgtaggaggggtggtagcttcgctcgtagggcagcgcgtagacggcgtccatctcctcggtcgaaagcggctccgacggtgggttctgcacgacgaagacgccgtgggggtactcctccacgacggtgtgcgccgaaaacgggtcgaggtttcggtactgcatgccaaagctcctggcgtagacgcccttgtccgcctgcatctgctcgaaggcgggcaggaccaccggctcaaagcaatggccgatcgagcggcacttgtacacggtgccggggatgaaggtcaggtcctccaccttcagccccgcctgcagcgcctcggcgatggcgacgatggacttctcgcccatgccgtagctcacgaggtcggcgccggagtcgagcaggaccgagcggcgcagcttgtcgtcccagtagtcgtagtgcgcgagcctgcgcagcgacgcctcgatgccgcccaggatgatcggggtgtgcttgaatgtgcgcctgatgaggttgccgtagacgacgcacgcgtggtcggggcgcagccccatcttgccgccgggcgagtacgcatcggtcttgcggcggtgcttggcgacggtgtagtggttgaccatcgagtccatgttgcccgaggacacgagaaagccgagcttcggttcgccgaacacggcgatgctgctcgggtcgcgccagtcgggctgcgcgatcacgcccaccttgaagccatgcgcctcgaggaggcgcgtgatgatcgccatgccaaacgaggggtggtcgacgtacgcgtcgccgctcacgtacacgaagtcgacgcggtcccagccgcgcgcttccatctcttgtcggttcgtcggtaaataagccatagcggcattataggcatggcgcctgccgcgtgccgctatactcggtgcatgaccaacatttccgacataggcgcgcacgacagctaccgaacgattgccgcttcgggcacgtcggaatacgtcgaccgcaagagccgcttcatcggccaggtgcagcacgtggaatccgagcgcgaggcgcgtgagttcatcgacgcggtgcgggcgacctatccagacgcgcggcaccacgtctacgcctacgtgctgcgcgagaacaaccgcgtgcgctactcggacgacggcgagcccaagaagaccgccgggctcccggcgctctcggttatcgagcatctcgacctgcgcgacgtcgtctgcgtcgtgacccgctacttcggcgggacgctgctggggacgggcgggctggtgcgcgcctacacgagcgcggcgcaggcggcgtttaccgacgcgcgcatcgtcagcgtcatcttgtgcgacgacatcctcatagccgccgactacggcacatacgagctgctccgctacgagctcgaccagcgcggcgtgcaggtcatctcgacggagttcgcgggggacgtgaccgtgaccatccgcgtccgacacgaggacagcgccgcgacggttgcctgggtgaccgagctttcgcagggcaaagcggacgtcctcgtcgacgagccggcgatgcgtcccttcgatgagcccatctgccctgtataataggggtgacgattcgcaagggggtggcgtgccatggcttttgtcgagttccacgacgtgcgcaaggtctacaagatgggcgaggtcgaagtcgccgcggtagacggcatgagcttttccatcgagcgcggcgagctggcggtgctcgtcggcccctccgggtcgggcaagaccacgctcctcaacatgctgggcggcatggacagctgcacgtcgggcacgatcttgctcgatggcagaaatatcagctcctattcggataaagagctcgtccagtaccgccgccacgacatcggcttcgtcttccagttctacaacctggtccaaaacctcacggcgctcgagaacgtggagctcgccgcccagatctgcaccgacccgctgccggcagacgaggccctgcgcctcgtcgggctcgagcaccgcatggacaactttcccgcgcagctctccggcggcgagcagcagcgcgtcgcc

SEQ ID NO: 4020 - DNA, 5038 bp, Unknown
  16S sequences of unknown bacteria
agcgccaccttgccaaggtggaggtagcgagttcgagcctcgtaacccgctccattttttatttggcgttggcgccatagccaagtggtaaggcagaggtctgcaaaaccttcaccaccggttcaaatccggttggcgcctccaaagagatcctggtttcgtaagagaccaggatttttcttttgccttgcaactttatgccaaacagtggtaaaattcatgcatcaaaatctttccggattcacactatacaaatgaatccattctgaaaggaagcgatgatatgaaaaaaataatggcagttttgctggcagcactgatgatgatgagcctggctggctgtactcagaatcaggcagggaatgaatcttcttcttcggagcaggagagctcctcggtggcggaagttcagcctccggtcgtggcggacgcagccctctaccgggggactgtaaccgaaacctcaggccagcagctgaccgtagaacaatatgacggtcgggattatggggaagtggtcattgttttcacccttccggaagaggtggagaacaccttccaggagggagaatatgtggagatttactatggcgcgctcaaggagtcggctccggcccaggctgatgccatctcggtgaacaagctggcagatcaggctgaatcggtggtgaccaatggtaccatcaaggaagtgactaccagtgaggacggcactgtcaccgatctgctcctgaccgattccaatgggcaggaagtggtgttccacatcagtgagagcacacagatctatatgaacgctgaggacctcaaggaaggcacagagatcagcgtgctgcacagcggtgcgtttaccatgtccctgccgccccagggcaacgcactggagatcagcccctggcggtaccagcgggaagcggcagacagccaggttacagagtaagcaatcacacaggatacaggggagaggagcatggagcacattatccattccatagagccggtatttgatacggagtcccgggttctgattctgggcaccatgccgtcgcccaagtcccgggagatgcagttctactacgggcacccgcagaaccggttctggcgggtcctggcggcggtgctgggggaagagctgccccagtctgtcccggaaaagaaggccatgctgctgcggcaccggatcgccctgtgggacgtgttggcagaatgtgagatcaccggtgcatccgattccagcatccgcaatccggtggcaaatgatctctctgtgatcctcgaccatgcgccggtacaggcagtctttaccaccggggcgactgcctggaagctgtataccaggctgcagaaaccccataccggaatcgaggcggtacggctgccttccaccagcccggctaactgcgctgtgaagatggaggcactgaccgaggcttacaaagcaatcctgccctggctggaaccaaacgcatagataaaacaaaaaggacgaggaatgaatcctcgtccttttttagttggatctgagccggaattacttggccttgtttacgatctcaacagtatctcttgcaatgagcagctcctcgttggtggggattacccaaacctcaaccttggagtcatcagcagagatcttctgctcgccgcgtaccttgttcttctcttcgtcgaacttgatacccaggtattccatgttctcgcaaacttccttacgcaggttgccgtcgttctcgccgataccgccggtgaaagcgattgcatcaacgccgcccatagcagcagcatagccgccgatgaacttcttgatctggtataccagcatgtccagagccagctgagctctgtggttgccctcgccagcggcagcgatcaggtcgcggcagtcgctggagataccggatacacccaggaagccggacttcttgttcatgatgtcagacatctcatcagcagtcaggccttccttgttcatcaggaaggtaacgatggaggggtcgatgccgccgcagcgggtacccatgatgaagccgtccagaggggtcagacccatggaggtatccaggcacttgccatcctttacagcagtaatggagctgccgttgcccaggtggcagacaatcagacggtccttacggccggtcagctcagtgtagcggccggagatgaaccgatggctggtgccgtggaagccatagcgacggatgctgtacttctcatagtactcataggggatggggaacatgtaagccttttcgggcatggtctgatggaaggaggtatcgaataccgcaaccatgggggtatccttgccgaatacttcctggcaggccttcatagcggtagcctgcggaggattgtgcagagggccgaggtcacggaaagcaaagatatcctcgataacctgatcggttaccagagtggaaaccttgtacttctcgctgccgtggagcacacggtgaccaacagcattgatctcatccatgctgtcgataaccttgccttcgccggtggtcagcatatcgatcagagccaggaaagcctccttatgggtggggaagggcagattcttttctaccttcacaccatctgctctcttgtgctcgatgcggccgtccacgccaatgcgctcgcacaggcccttagccagaacgctctcgtcagtcatatcaatgagctgatacttcagcgaggagcttcctgcgttgattaccaaaaccttcattgggtaattcctcctactaaattttgtgatcttggataaatagcttgacactatatttcactattctatattataacactgtaaaataaaattcaagcattttgcgagagaaagggagaaaccgtgaggattgctgtaataatcgctgaatacaatccgttcacaacggacacgcttaccatattgcccaaacccggaaaaacggcgctacacacattgctgtggtgatgagcggcaattttgtccagcggggagaaccggctttcctggaaaaacatgtccgtgcccgggcagcactgtccggcggagcggatctggtgctggaacttcctcttgcatttgcctgtgctccggcccagcggttcggactgggcgctgtctatgtggcagagaagatgggctgcgtggacatgctcagcttcggcagtgaatccggggacactgcccggctggaacaggcggcagcagtgctggacaccccacagttccgggaggccctggtcttggagctcgagtccggcgcgccctacccgcaggcagtgagccgggccatggagcggtgcggcagcggctttgccgggctgactgcctcgcccaatgacaccctggcgctggaatatctccgggcgctgcgtcagctggggagtaagatatacccgatggcagtgcggcggacctttgtggaacacgatgccgaggggaccgtggagaactttgccagcgcctctcggctgcgtgcccttgcccagccggaggagatcgccgcctatgtcccggaggcggcagcgcagctttaccgtgctgaactggaggccggacataccccggacccccagcggctggatgcggcggttctgggggtactgcgccggcagcaaagagaggagttctcccggctgcccgacctctccgaggggatcgaaaaccgtttctggaacgccatgcgcagcggcagcagcatggaggagatcctcactctggcaaagacaaaacgctatccccatgcccgtctgcgccgcatgatgatgcatgccttcctgggcgttacacaggagatggcggaggaactgccggcctatctgcgggtattgggagccaatgagcggggcagggagatcctctcggtcatggcggggacagtcggcctgccggtttccgcatcgctggcagggctggaacgctccggccctgcagcggcagaacaggcccggctggaggcgatttccaccgacctttatcaggggattctgcggtgtccgggcccctgcgcgacggattacactgcacctgcgatctggaatgcatgaaatgtttcactttacttcgcaaaaatcagtgatataatggaactacatatttttttgaaggagtgatataaaatggaccagctgcttactctgctctccgcagatgccagactcaccaatgcccagcttgctgcggcgctttctatatcggaggaggaggtcgccgcacggatcgcggactatgaggaacgcaagatcatcaagggctacaaggccatcgtggactgggacaaaaccgaccgggattatgtcaacgcccggatcgagctcaaagtcactccgcagaaggggatgggctttgaggagatcgccggcgtcatcgcccgttttgacgaggtggaaagcgtctatctgatgagcggcacctgtgatattgccctcactgttaccggcaagaccttcaaggatgtagccatgttcgtggcgcaccgtctggcaccgctggattcggtgcagtccacttccaccagctttgtgctgcgcacctataaggaactcggcgtctttgtgtcgttcgatgagatggacgaaagagaggtagccaccctgtgattgactatagctcccttttgtccgagaaggtacaggagatcaaaccttccgggattcgcaaattttccgaactggctgccgagatggggaatgtgatttccctgggtgtcggcgagccggatttccagactccctgggccatccgtcaggccggcattgaatcgctggaacggggccgcacccactattcacccaacgccggtttccgggaactcaagcaggagatcgaccgctatctcgagcgccgcatggggctttcctattccgaagaggagaccatggtcaccatcggcggctctgaggccatcgacatgatgatccgcgcggtgatcgatcccggcgatgaagtcctgatccccgagccctgctatgtatcctatgatcccattgcccgtctgaccggggcgaaggttgtaagcattcccacccggttcgaggacgatttccgcctcactgc

SEQ ID NO: 4021 - DNA, 26886 bp, Unknown
  16S sequences of unknown bacteria
atttttatttgtttcttctgattctgacgtggtacgtgttttgagcagcggtcagactgaaattctgaaaccgggtcgggcaagtgtcactgtttctacagagggcacaatgcttttccagcccgcggaagtgcaggttgtatttgaagtaaagccggacaaaacatcttggaaaaccaaagcatttaaacgacagaaatctaaggttacactgatgtggaaaaaacagtccggtgtaacgagctatgaagtcgcttatgcaacgcagaaagacttcgcaaaacacaaaaaaaccaaaacggtaaaagagaatctttcaaagacgactttaaagggtctcaagaaagaaaaaacctattacgttaaggtgagggcattagtcgaaacgacggatacccgcggaaacaaaagaaccatagcggggccatggtcctcggttcgcaaaattgcaggctgagcaaatgcgtatactatgcaatttaatcaagttttccgacgatttgtcggatatgcttaaaattcttttttaattgatttttaagagccttaggcgcattttcataaagattgccattgcagtctttatcttcgggaatgagcacaaaaggctttttttcgtattcatccagcatatagcacggataataggtttgatctgcaagcataacttcgccggattcgttcctttcgagtgtaagcgacagaattatggtttcctttgtctccggtgcaatcattgcagaagtgaaattccccattgaatatatatacggagttacggtgccccgatagagaaggggttcataaggctgcaaaacatgcggatgtgaaccgacgatgtagtcgacccctgcatgtgcaagcattatgccgtaacgcatctgccttggtgccgggagatgcgagtactcagttccggagtgattatatgcaataatatactccgcgcctgctttgcgcagagcatgaacatcagaattcattttatcctgaaccggtctgtttaacataatgtcctgctcctcatcagtcagaaatttatcttttaaattgtaataggcggcatatgaaataactcctactttaatgccgttttcctcaatgataaaataacgttttgaatttttatcggcaaaaagtcctgtatgcggaatgctgcggctgtccagttcctccagagtttcgacaattccggttttgcctccgtcgcaggcatggttgtttgccattatgaacccgtcaaatcccgcgtattccagagcatcaagccactcctccggcgcattgagatacggtttgttctgaagacgcgacatgtcctttgaaagaggaaggcttttgcttacaagtgtctcgagattgccgacaactatatcggccttgtcaaaaatgtttttgacatatttgaacgtcggcttaaaattatagcttgtgccgtcaaatgccctgagctgctgaattctctggcacattaaatcccctgtcagcataacggtgactgtatctgtttctgttccattaaccggattatcagtgcctgccgtaacctcatcggcgaatgacactgttgtaaataaaagcatagccgtaagcgtgagcgcagcagcaataagtttttttcgtttaagtatacccaattggattatccccctcaactgtaaaaaaggtttaaatatttattaaacaacattttaacatagatgccgaaggttgtcacgaagtgtcacaaagaacaacacggattttcagcggcgttcgtcaatatatatgctgaaccccttgaaaaaatcgggaatttggtatacaataattaacaatattttttgtaaagaaatgatttatatgagtcggggcagttcacagacattgggtgctgcaaaggcaatgtaatcaggtagttgaggtagatgttatgagagaaaatataatagttttggacttcggcggtcagtataatcagctgattgcccgcagggttcgcgaatgcaatgtatactgcgaagtccatccttatacaatttcgattgaagaattaaaggcgctggctccgtcgggaattattctgacgggcggtcccaacagtgtgtacggcgaggactcgccgcagtgcagtcctgaactttttaagcttggaattccgatgctgggtatttgctacggtgcgcagcttcttgcccaccagctgggaggcagagttgcaaccgcgccggtaagtgaatacggcagaaccgaggttaccattgatgaccgcagcggtctgcttgcagagcttggtgtgggcggtccggaaacaacgggatgcggaacggtaggcaatacaattatgtggatgagtcacacagactatattgaaacagttcctgagggcttcaaagtgacggcgcatacaccggtttgcccggtggccgctatggaaaatgcagaggcaggtttctatgcgacacagttccacccggaggttatgcactccatagaaggatttaagatattacagaattttgttttcaaagtttgcgggtgtaaaggcgactggaaaatggacagctttgttgagacgactattcgtgaagtacgtgaaaaggtcggtgacggcaaggtgctctgtgcactttcgggaggcgtggactcttcagttgcggctgtactgctgtcaaaggctgtcggcaggcagcttacctgcgtttttgttgaccacggactgctccgtaaaaatgaaggagatgaggttgaggcagtattcggtccaaacggtccatatgatttaaactttatccgcgtgaatgcgcaggaacgtttttattcaaagcttgccggcgtaaccgagccggaagcaaagcgtaaaatcataggcgaggagtttatccgtgtatttgaagaggaagcaaagaaaataggcgctgttgatttccttgttcagggcaccatctatccggacgtaatcgagtcgggtctgggtaaatccgcagttattaagtcacatcacaatgtgggcggactgccggattacgttgattttaaggaaattatcgaaccgcttcgcatgctgttcaaggacgaagtgcgccgcgccggtctggaactgggaattcctgattatcttgtattccgtcagcctttcccgggaccggggcttggaatacgcatcatcggtgaagtcactgccgaaaaggtaaaaatcgtgcaggatgccgactacatttatcgtgaggaaatcgcacgcgccgttagtgagggacagattcctcagttcggacagccgggtgctctgggacagtattttgcggctcttaccaacattcgctctgtaggtgttatgggcgacttcagaacctatgactatgccattgcgcttcgtgcagtgacaaccagcgactttatgaccgccgaggcggcacacctgccttgggatctgattgatcgtgttaccactcgcattgtcaatgaagttgactgtgtcaaccgcgttgtatatgactgtaccggcaaaccgccaggaacgattgagtttgaataagattaatctaatatgaaatctatgcagcaggcagtttgtgattaattgtctgctgtaattatatatttttaggacaattcatatctgttttattatataatgctcttacagagattagtttccaggtataaattttttaaaactgctataccttttagtatttctattgtataaataaatagaaacacaagcaaacccgagagagcaggaggatgattcaatgaaaaaatccgaaaaagtaaatgatatagaaaaaatatatgacactgttaataacgaaatagcagatgacaaacttgactgtgtggcaggaggcagcggtgcagataataaatatgccgccgtcaaaactggagattagagacaatgtgatgttcaaactccatccgtgggatacagtattccactttggaaaaatagtcgataaacgatatgacggaagcagctgggaatacaagattaaatataccaagtatgaagtggttcagatcagctactatgtgaaagaaatgtttgcgacaaaaacaaagtagaagcattcaacagccccactatatatgaagcaggagaaaagaaatgaaactgtttaaaagaaaactgtcagtaattaaagaagaaacaccggtagaaaaaatcagacttgaggacggcgagcttgaagcagtaagcggcggagttgtcgaaggtcagacgcttgtatgcgaggactgcctcaaaccgtatacatttacaagaggcaacttcagcacagaaagcctatgcaacgactgcgcaattgcaaagtacctcacaaagcctgaggacggagctgtgaagacatgtgtctgcggtacctgcggcaaaacctttcagccttcaatgggcagtctttcaagcgacaatgaatgtccgacatgcgctgcggcaaggatcttcggctccggcagataaaacttttgcagacaaaagcaataaatataattttgcggtgttaattaacaatattatctgatataatagagacacattatatttgaaaaggagatacggtatgagtcttaacatagaaaaacagatagcagagcagacagttttaaagcttgagggcagacttgacacagcaacagcgcctgaacttgagaaatgcattgaggagtcactggatcagattaatgaactcgtatttgactttacagatcttgagtacatatcatcagcaggacttcgtgttattcttaaagcacagaagataatgaacggcaaaggcggtatgaaggttatcaacgttaacgaaagcattatggatgtttttgaaatcacaggttttgctgatttccttacaatcgaataatttttaaactgaatacttgaattcccggaggattttgtgctttcgggaattttaagtacaaaaaacaagaaaaaatgttacagaaacaacataaatgcggctaaagtgtggtataattaaagcaaaaataaatgaaagaagaggtatcggattttgagaaaagtatgcgccatagctataacattcatattaatagcttctttattcccttttcaggcctttgcggcgacaggaaacagcccgtttaaatcggggacttacacacattcatcggtgtttgacggtatgaatatctacaacggaatagacgtatcggagcatcagaagacaataaactggaacaaggttaaatcagccggggtggattttgcaataatcagggttgccggaagaggctacggttcgggcaacctgtacgaggataagtattacaggcaaaacctgcagggcgcaattgatgcgggcatcaaagtgggagtgtattttttctcgcaggcggtaacagtcaaggaggcagaggaggaggccgactatattctttcgaggataagcgggtacaatatcactctccccgttatattcgactttgaattcggatcaggctacagagtaaacgcacttaaatacaagaacacagcctgcaaaacggccataaccaatatgtgcactgcatttggcgacaaggtaaaagcggcgggctacaagcctatggtatatgcaaaccttactacatttaacggatatatgtatccgcagaagataatatcctcagggtgcgatctgtggcttgcgcagtacaatacatcggcaggacttacatatgattacgtttgctggcagtacacaagctcaggaaaggtaagcggcatatcaggaaatgtagactgcaatttctggtatgacagcggcaagtatttcggaggacaggcacctgaagaccctgagccaaagcctgaaccgaaacctgagccaaagcctgaaccgaaaccggagccaaagcctgaaccgaaaccggagccgaagccatcggtagacaaggctacgggagtcaggcttaaatctagaacaacatcttctgtcgctttgaaatggaacagtgtatcagatgcagacggctactatatatacagagcagattcctatggaggcaaatacaaaaaaatcggaagcactgccaaaaacgaatacaaaaatacaggtctgacacagggcagggaatattactacaggatatatgcatataaagacggcagcaaaggaagcgcgtcatcaaaatttgcagcgaccgcaaagcctaagtatgacagatacggcaaaaccacagagaattacataaacatgagaagtcatgcaggcacttcatattctgtggttacaatgatgtccaagggtaaaaccgtaacaatacttgcaagcaccagagattcttcggggaatatatggtataaggtgaaatataccagtggtggcaagacatgcaaaggttacatgattaaagacttctttacaatcaccaaaaagggaacaacaacagcagctatcaatatgagaaagggcgcgggcacttcatacggcagaataactacattgcctaagaacaaaacccttgtgctctacagcagcaaaacagtaagcggcacgacatggtacaaggttaaatacaaggtttccggcgtttacaaaacaggctggataagcggcagctatatcaaagcgcttaacctgtaaatttaatcatattgaaatgatgacggattgaatatataatatagataatctatttaagaatgagaggtacggcttgtgaaaaaactactggcaatactattatcacttgcagtaatatttgcaatgcttcctgtgggagtgtttgcagacgaaacaggcgatcagccgcagggcggctcagacataaatgcaggagatgacagcaaacccgaaatagatccggatacagtacatcttaacggtgttacggagaaaaatccgggctcatcatatgacgctgccatcacctttgctgataatgtatattactacagaaccatttcagatgcattcaaagatgcaatcgcagatgatgttgtgacattgcagagaagcatagctctgtccgaaaatctgtatctttatacagaagtccctgtgacactggaccttgcgggacagactctgacctgcggcagcaacagagtgtttacaggctatgacggcgaaaaggtatacagcagcgatattacatttacggacaccaaaggcggcggcaagatatatgcgacagccaatcaggtggcggtatacgtatccagcggaaaatttacattttcgggaggctccatagtgaacacatacagccccgaaaaaacaagcgcctacggtatctatgccaagagaaattcagaggttaacataacagcaggctccgtacttgccgaaacagcggttatggcatggcctgcaacggtaaacatcacaggcggcattatacagggcacatatcaggcgggacttcgtgtcaacggagataaagacacacagacaggctctgttgcaaacatatacggaggctacatatcgtgctttgaatatgcgggcatatacggagatgacagtgcgacagtcaatttttacggcggatatatttacggcaaatacggcgtatatctgtacgataaatcagaggttacggtaaacggcggtgagatacagggtcgtgatgcctcggcggcagtcgcgcgcaaaagcaaattcactttaaatgacggaacacttgacggttcggtaataacggagtatgagggagccacctttgtaatgaatggcggcagcgttaaaacagcgggaagcgatattgctattatgggcaatgccgaggaaggacacggcggcgtaagcatagtgataaacggaggcacaattacatccgatgctacggcaatatatctgcctcagagcggaaccacgactattaaaggcggcagtattacaggcgctgcgggaatagaaatcaaatccggcagacttgaaatctcccctatatcagatgatgcgcttacgatagaggctgtgggagttccgtattcgggaggacgcccggactcaaaccttaacaatgaggacggagcggccgttgcggttacaggagatgccaagtatacaggcgatatagatgtgaacatttcaggcggcacctttaacagcacttacggtattgctttctgggcatacaactccgacggcagcagatgtatcaaaaatctggatatatccggcggaatattcacaggcggcaaatacaactctaaaaaatattcagcatgcgcagcatacaacgctaaaggctttgtaaggggcggaagcttcaatacagacccggcgacgcttgttgcaagagggtatgcttcagaaacttccggaagcttatatgaagttaaaaacggtgtgacatttaaaggtgagaaatcagatatagcaacagatgaggcttcaggaaacaccaccaaaacaattaccagaacgggaacagatgcagcgtcaaatcctgttcagcagattacaaggacagttacaggtaaaaacggagagcctgtaaagaatataacagaaacttcgtttgagtacgaaaaaaacatactgactataaaaaccacagcagttaaaggcgaagctgcatcgtcagaagcaattgttgaaatcaaaggcgatattacagaagaagcactgtcagatgcaaaggcgcttctcaaagaggcggagcttgagcttgccacaacaggcggcggcagtgttcagcagattataaggcttagcacggacaagacctcgcttgcagttaaaaaatcagtatttaactccattatgcagacaggaatgcttgaggtacagacctcagagggaacatacagatttaatgcagaggaaatgaagctcatagcagataaagccgcaggagacagcattactctttcatcagagtcagtagaaatagtaaaacagcagcgtataaacaaggcaaaggcggcaaaaccgtcggtttcatcaatcagcagaaaaaattcactggtaacagttaaatggaataaaaaagacggcgtcgacggatatatactcaagctggtaacaggcggcaaaacctacacgcagaagataaccgatgcgactgtttcggaatttactttcagccagaaagtcactaaatcctacagagtcaaagcggcttccgttacagaggttgacggtcagcaggtaacatcatcctacagctacaaaacttcagttgtaaagccgaccgtatcgaagatttcaaaggcttcaaagaccaaaaaggtaacagttaaatggaagagaatgagtagcgctgacggcttcagagtaagacttgtatataaaggaaagactactaccaaatacatatcaaatccgaaggctgtaagctatacctttaataaaaaggtaacaggagcatacaaagtcaaaatttcatcatattcaaatatcgagggtaaaaaagcctattcgacagaaaaaactttttcaagaaaatagcaggagaaattaattgatgggaattcttgataaactgaatgataaacaaagagaggcggctgtccataaggacggtccgcttttaattcttgcaggagcaggaagcggcaaaaccagcacaatgacatgcagaatagcccaccttatattagatgagggagtaaacccctacaacatacttgcagtgacctttacaaacaaggccgcaggtgaaatgaaagaaagagtagagcagctaataggcagcacaagcggtatgtggattatgacatttcactccgcatgcctgagaatactcagaatgaactgcgaggtattaggctacggcagagattttgcggtttatgatcccgcagaccagaaagctgtagtcaagtcgattataaaagagaagaatatggaggacaagaaataccctccggcatattatctgtccataatcagctcatgcaaaaacagcggcatgacagcagaggactacataaaccttgagggtgaaaccttcaggacaaagcctgtatatgaagtgttcaaggcctatcagagcaccctcaaaaaaaacaacgcaatggactttgacgatttgcttttaaacacagtcagactatttgaaacagatgaggcggtgcttttaaaataccagaacagattcagatatataatggtggacgaatatcaggacaccaacagaatacagtataaattcataaaactgcttgcgcaggagcacaataacctgtgtgtagtgggagatgacgaccagtgcatatatcagtggcgaggtgcggatatatcaaatatccttgactttgaaaaggattttccgggtacaaaggtggtaaagctggaacagaattaccgctcatgcagcaatatactgaatgcggcccattccgttatcagaaacaatatgcgtaaggataagaagctgtggacaagcgccgaagccggcagcaaagtcagctattacagagccgatgatgagcgggatgaggcggaatacatagcaagagaaatagatatgctgaaatcaccggactataagtacagtgattttgcagtgctttacagaaccaacgcgcagtcgcgtacctttgaggaagccctgtcaaagagagatattccatacagagttttaggcggacttaggtattatgaccgcaaggaaatcaaggatatgattgcatatatgaggcttgttgcaaaccctgcggacagcctttcccttgcaagaataataaacgagccgaagagaggtatgggagccaaaacccttgccaagctgcaaacgcttgcagaggttagaggtcagagtctgtttgaggtgctttgcgacgaggagatagtggcgggactttcggcaaaatcacgtccgcttgtcaaagaccttgtggagtgcattcagaaatactcggcggaaaaagacaacctgagagtttcggatatatatgacggacttctcagagcgtcgggttattacgatgctcttaaatccgcaaatacagtggaggcagagggcagaatagaaaacatacttgaatttaaatcggtaatatatgatatggaagccgaagaaagcaatatttccctcagtgaatttatggaaagacttgcgctgctttcggatatagacaaccacgatgaagcagaggacgcggtagtgcttatgacgcttcattccgccaagggactggaatttccggtggtgtttatgccgggcatggaggacggtctgtttccgggctggagagccttcgaaaagccggagggcattgaagaggaacgccgcctgtgctatgtgggcatgacaagagcaaaggaaagactgtttatgacaagcgcccagatgagaaccatgtacggccgtaccgattttacgagagagtcccagtttgtcagggaaatagacagaaagtttatggacggtgatgccgtatatgagaaaaaacagggtgaccgtttcggaaacggcggaagcctcgacggctttgacggtcccgctcctgcaaaaccatttgactcactcaaatatgccaagcagaatatggcatcaaagagcagcggggaaattgatctttccgagggcgacagagtcagccatgccaaattcggagagggccttgtaatagaggttaaaggcaacgtggcaagcataatgtttgactcggtggggctcaaaaagcttgccaaggatatagcgccgattaaaaaattatagaggtatatatactgtgaaagaaaaaattcgtgaacttatagagcttttaaatgaagcctcaaaagcatatgagcagggcacaggagagcttatgtccaacagagaatatgacgagctttacgacaggctcacgcagcttgaaaaagacaccggcataatctttgcggacagccctacaagaaacgtaggatacgaggtgttaagcgatctgccaaaggaagcgcaccctaagagaatgttgtccttagacaagacaaaggacgttgagcagctcagggcatttctgggagagcagaggggaattctgtcgtggaaaatagacggacttacaatagtcttaacctacgaaaacggagaattgtcaaaggccgtaaccagaggaaacggcgagataggcgaggtggtaacctcaaacgccaaaacctttaaaaatcttccggtggagataccttttaagggcaggctggtgcttagaggtgaggcatttatcacatattcgagctttgaaaaaataaatcatatgattgaagacgttgaatcaaaatacaaaaatccgcgaaacctgtgcagcggcagcgtcagacagcttaacagcgaaattaccgcaaggcgcggggtctgcttcaatgcctttgcactggttgaggcagagggtgtcgacttcagaaactcaagggaggcgcagcttgactggcttgatgaaacgggttttgatacagtacagcgaaagacggttgatgcaggcagcatagaagaagctgtaggctggtttgcagataacattgaagattatgatataccgtcggacggacttgtgctgatatatgatgatatagagtacggcaggtctcttggcgagactgccaaatttccgagagactccattgcgttcaaatggaaagatgaaacagcggtaacaaggctcaaagagatggaatggagcccgtcccgcacaggccttataaatcccgttgccatattcgagccggtacagcttgagggaacgacagtttcaagagcctcggttcacaacctgagcataatgaagcagcttcagctgggagagggtgatgaaatagaggtttacaaggccaatatgataattcctcagatactcgaaaaccataccagaagcgcatcggtgagcatacctgagatatgccctgtatgcggggcgcatacggagataagagatgacacaggggttgaaactctcgtatgtcccaatccgaaatgtcaggtgaagcacatcaaagcctttactcattttgtatctagagatgctatgaatatagacggaatgagcgaggcgacagttgaaaaattcgtagacgccggatttattaagaaatacggtgactttttcagacttgacagatttgaaaatgaaatcagcagtatggagggcttcggtgagaaatcctttaacaatatagtaaatgccgcaaaggaggcttcgcatactacagctgcaagacttctctatgcgctgggaatagcaaatataggggcggcaaacgccaaagttatagccagagcctgcggaggcgactgggagcgtatgaaagctcttgattttgagcagcttgtggagatacagggcataggcgatgtaatggcggcagactatactgcatattttaatacagaggataatctggagataatagcagatctggagcaggtagtttcatttgagcaggaacagcaggctgacatgccgcagagccttgagggcaaaacctttgttataacggggagcctcaatcattttgaaaaccgtcagcagctcaaggagctcatagagaatatgggcggcaaggtagctggctcggtaagcagcaaaaccgactacctcataaacaacgacaacacatcaggctcgtccaaaaacaaaaaagccaaagaacttaatataccgattataactgaagaagaatttctggagatgataaacaatgcttaaaacaggtaaacttgacagcgaagttttaaaaagaataatatttgacaacataaaattcaaaagagatgagataataacaagaccgggaataggagaggactgcgcggaaatagatttcggggaatatatctgtgtaatgtcaacagaccccatcacagcttccgtaagcgatataggcagactgtcaatccatatatcctgtaacgacatagcctcaaacggcgtgcagccggtgggaataatgctggctgtaatgctgccggtgggtacaactgaagaggatatagaaaccataatgaagcaggcggcggcggcagccgaacttatggaggttgagataataggaggacatacggagataactcctgcggtcaataagcctgtaatagtatccaccgccataggcagacagccgaagaacaaaattaagcaggagataaaaacaggagataaaatcttcataaccaaatactgcggtattgagggaacaggcatcatagcctgtgactgcagggacgaggtgaaatcaatacttacatccgaggagcttgatgaagccgaggcaatgcttgatatggtcagtgtcgtaaaggaaggcgtaattgcaggtgacataggtgtatcggcaatgcacgatataacagagggcggcgtgcttggcgctgtctgggagctttgtcaggtggcaggccttggagcagagataaacatagcggatataccggtaaaaccggtaactcaaaaaatatgtgcgcactttgatatagattatctgcgcctcatatccagcggatgcatgctcataatagcgccgccggagaaacagcaggagcttgaaagccgcatcgatatgattaagtgcataggcgaggtaaagcctgcggatttcggcgttatgatgattacggataagggagcggaagtgatagcaccgccggaaagcgacgaattatacaaggcagttaaataatgaatgtacagtcaggccggaaagttttccggcttgcaccataaaatacgaaaaattcagaaaaaacctgataaaaatttaacaaaactatagaaatctatcaaagagtatgatagaatacttttagaaattaaagtgtgaaaatcgaaaggaggaacgcttacatatgatgattttcggaattcatatcggagcggcggcaatatggcttgcagcggcgatagtgcttttcataatagaagcggctaccgtgggacttacgaccatatggtttgcaataggcgcgctggcggcatttgtacttgccctgtttgatattccggtggccgttcagattattgtatttttagtggtttcagtgtgtctgctggtgtttaccagaagaatatttgtagagaagctccatgcaggctccgaaaaaacaaatacagatgcgctgatagggcttacagccacggtggaggaggatattctgccgatgcaggtgggacaggttaagctgaacggacagatgtggtctgcggtatgcagagaaaacgaaaccgtttccagaggcagtctggtggaagttaaggcaatagagggtgttaaacttatagttgcacccgcagagaaaatttaaggaggaaactgaatgtatatgtacagcgtatcaaagtttttaattatagttattgcaatagcattccttatatggctcatagtttcaaatataaggattgtgccgcaggcgagagcctatgttgtcgaaagactgggagcatataaatccacatggcaggttggactgcatttcaaggttcctgttatagacaagatatccaaaaaagtttccctcaaagaaatggtaattgatttcccgcctcagccggtaatcaccaaggataatgtaaccatggaaatcgacacggtcgtatatttccagattacagaccctaagctttacacatacggagtagagcaccctatggacgctatcgaaaatctgacggcgacaacacttcgtaacatcataggcgagctggagcttgacgaatcccttaccagcagagagcacatcaacaccaagataagactggttcttgatgaggctacagacccgtggggcatcaaaattaacagagtggaagtcaagaatataacgccgcctagagatatacaggttgcaatggaaaaacagatgagagccgagcgtgaaagaagagaagcaatcctgattgcagagggtgagaaaaaatccgcggtactgattgcagagggtcagaaagaagcggcaatactgcaggcagaggccaaaaaacagactgcaattaaagaagctgagggtcagtcagaggcaatccttatgattaacaaggcgacagcagacggtcttgcaatgataaaggcggcaggcgcagatgatgccgtaatcaagctcaagagccttgaaacctttgcaaaggctgcaaacggcaaggctaccaaaatcattatcccgtctgaaatacagggaattgcgggacttgcaaccacagtaggcgagcttgtaagacgcgatgatggcgaggagcagccaaaggaaagagcagtgacggcagccagaaaaggcagtgtgaaagttgaatagcatattttatgaagcggccacccggtcgcttctttaatagtgtgccgggcatggcacagttctagcgggtgagagtcccgtcacgggcatttaccgccaagtgtagcgaaccacaagctggaagcagcaatgccaagggggaggaagtggtgtagcaaagccgatgagcctacgaacagaaaccggatatgaggctaaatggcgggtgaggttgctatacaaaccgaagccctaagggtaaatgtaaagccaagatagtaaatccggaggttgtgcggcgaaagaactgtgtcttaccccgggagacccgggtagcgtgcagtatgcacgttcgataaaaagctcatatccgggagtcagctgaaaccgcagtatcccatggcaccagtgggaaaagggtctaatgttaatatattgcaaatcgctgaaggcaaggtcggaacagtctgaaatcgaggatatgctcatcaaacggaagcgtatgtccgtgggagcagaaggtagaggagatggtttccggcagctttacagacagaaggaggagcaacagatggaattaatcgaatggatactgcaggacagaaatattgatgaggctgtaaaggcggtaaagcgaaacaaaggtgctgccggagttgatggaatgacggtagacgagcttgacgcatactttgcccttcacagggaagagattaaaactcagatacgagagggaagatacagaccgagtcctgttaaaagagtctacataccaaaggcagacggaaggaaaagaccactggggataccgactgtgactgacagagcgctacagcagtctgcagcacagatactgtcgctgggatatgagaagtacttctcggaaaacagctatggtttccgcccggggagaagctgtcagcaggcggtagagaaggcattggaatatctgaatgaaggatatgagtgggtaatagaccttgacatagagaaatattttgacactgtaaaccatgaccgactgatttcaatactcagagaacgcataaatgatgcgaagacgctaaggctaatcagacagtttctgagagccggagtaatggagaacggactcgaaagtccgaatgaggaaggaatgccgcagggaggaccgctcagcccgatactttcaaatgtctatcttgacaaacttgataaggagcttgaggcaagaggaatgcactttgtcagatatgcagacgactgcaatatatttgtgaaaagtgaaatggcggcagacagagttatgaaatccattacagggtggctggaacggaaactcaggctgagagtcagcgcaactaaaacgaaggtggtcagacccacaaagagcatatttctgggatttactttctggaaagacggagaaggctggaaatgcagacccgcagaagacagaaagagaaggctttatgataaaacacgagaaatactgtgcaggcgtaaagctgcggcaagaccgataaaagccacattcgagcagctgaaccgacttatcagagggtggattaactattacagaataggaagtatgaagacattcttagataagtatggacaatggctcagacacaaggtaagggtggtaatgctcaaacagtggaaaaagccgaaacgcatatatctgaacctgcagaaactgaacagggcgctgaaatgtggcttcacagatgaggaaatcttcaaagtggcaaacagcaggcttggctggtacagacgctgcggtatgtatgtggtaaacttcatactaaacccggagatactggggtacaaaacaaaaggtcgaccgggattagtcgacccattggcgtattatctgagctgatatctgattttatattaatgtagcgccgtatacgagacccgtacgtacggtgcaatgggagggtgagataaatatctcactctaccctattattcggccttcatatattcaaaatcaagcgcatcgtgaagcagctgtccttcgtgtcaaaggaatacattccgttgtgccgttcaacaatacttctgatgctttttactccaaatccatgcaaaggctggtcagaaacaggcagtccgtcttctattctaacatctcctacatatgaattccttattgaaataagcaaactggttttgtgggttttgcaatcaatttcaacccatctgtttccgttctcacatcgggaggctgcatttattgcgttttctattccgtttgataaaagagtgcacaactcggtatccgaaagtgtgatgacctcaggaatttttacagtgacctcaaaccttataccggacctttgtgcaagtgaacaataatgcgacagaataagatttgtggaattattgttgcaatattttttaggtgtgagcaaatcaatgtctttttgtgccatcttgatgtaatccaaagcttttgctgtttcatcattttggatatactctgcaagaatcataaagtggtgcctcatatcgtgccggtaggtagctgtgtcttcaagcgatttctgaagtacgacaatctcggtgtcagattgctttagctccatattaaggattgaattctcaagctccatggaatatctttttttgagctcgccatggtacaatggtacgaaaacaacataaaacagaatagtaactgtaggaaccaattcgttgactacaatactgcctgaatagagaatctgagtgtataccgttgaagcataatcaaaaatataatagaacataggcaggctgccaaggaaaataagcgccctccgtgagtagttcatcgtctcatatgcaggctttacgaggaatatacgaagcagtgcataagaaataaacacagcaatcgcatacaaaatttcagaaagcagagctgagcctgaaatctgcaaaactaaaatacggcaccaatttggaatttgacagcaaagatatgccgtaaatacggagacaatggaaatccccaaaggtcttttcatcaaaaatacaagaatgcagatcaggggtatatgtgtaactaaaggatacagcttatcggcagccgaggctcccagagacaggaatacagcaatctgcacaagcagaagaattgcaatcgcagcggcggtaagctgcttatctttttttgaatatagcgtaccccctcccgaaatatcaacggccagaagaatgccataaatcaaaacaagaccgtaattaaacaaagtcataactgtaacaaaattcatttcagacctctccggtaaatatataattcatataacgctccttgatatccttgaccagcagtctggaaacagggaaacttttgccgctgtaggtgataatttctccggcttcaatggactggatatagtccatgttgatgatataggaacgatgtatttttataaattcatttcttgccaaaaaaacattttcatattccgtaagagagcctctggtttccttactgcctccgtcgctcaggtgaaatacaagatgcttgttgtacacctcaagtccctcaatctttgcgaaggggatatttacaattcccatgtgggtgtagatgacgcaggattcctgtttgcttgtgatttcggaaaccaccttgtcaaggacagaaaaaagtttttctctatgtacaggcttcagtagataatagtaggcacccacagcatagctttcaattgcaaattccttggaggaggtgagaaagatgatcttgatttcttcattgaactgccttatctcatgtgccgcctgcatacctgtgaagttgggcatgataatgtcgagaagcaggacgtcataatttgtcttcttgacttcctccaaaagatcaacagcactgatataggtatgaaccattataggcatgttgcgagtactctcgtattcaagcaaatccttttcgactttttcaagcaattcccggttgtcgtcgcatactgcaatcttaagcatatgtgtacctccttatacaattttagcatagcacaggcagatagtaaagtaagcaacatttcagggcgcaaaaacgacatttcggggcgtaatcgccacctgccgtcacgaaaaaagtatactgaaagcataaaagttcaaaacaaaattactatcagtttcagaacagcgattaaaatcaaattacgacaatgaaaggagaacgacatgaagaaaaaaatattcagtatcttgctgtccttgtgcatggtgctgaccatgatacctgtggcggcaggcgtggtgtgggcagaagaaaacagtgtgtcaataggtgacttgcctttgtctgctggcactccatattaccataatggcacaaacggtgcgatgggtatagtgaataatacaccgacaggtgccaatgccacatttaattctactgacggtacactgacactgaacggattgaacctgacaagcggaaatattagtgcaacagggaatttgaccataaagttggaaggtgagaacacactaggaagcgaaagctacggaagtaatgtgattaaagtaaataatggcaatctcgcaatcaaaggatccggcgcgttaactgcagaaaatgcaagcggcgtaactactacgatctatgcaggcggcaatatcaccattgacggtggagctaatgtgtccgcaacccatgcagacggaggagcacaggccatccacgctagtggtcaaggtcaaattactatttccggtgcaggcacagaggtgatagccactcataacggaaaaggctcaagtactgacgcaaactatgttgcgctgaaagccggcactattcagattttaaacggtgcaaagcttatcgcaaagggtgaggcaaaggcagtggacggaacgctgagcgttgataaccgcgcaaactataagatctatgcaggcgacagcgaaccgggcacagaaaagagtgatattacaaagcttatcgacaaatatctaaagattgagccgaagaccgctgtaccgactgcgttggaggaggttatctttgggtatgcatatgatgtgcagagggagccagacttcccttcgataacgaatcccaagattacattgtccaggctaagcacgaatgcaggaaacggcatatcaaataatagcggctctttgacgcttactaaggttgggacatattcttacgttgaaagccagaaagatagtttgaattacaattcaatattaaacagcattgtggatacaatttatgacaattataaagcaagcggtttgaaaaaggaaacaatcgttatccatgaattgaaaaacggaaacaatcacatcgcttacggcgtagtcatcgcatatgatgcggagaaaaattgtgctgtgtttataggagataagcataatgaaggtggcgcagggtatctgctttcaaaaaaagcacaaagtggttcagttaccatcgataaaattaagattgcgactgactttgtaaaggatatcagcattaagttagtagatacggaaacttccactgacatggatcctacggcaactcatgtattcccggcagtaacagccggctacaaggacagcgatctgacaccaaaggaagtgacaataaccaataccggaaatgcggaaacaggtgagttaacagttgccctctcgaatgacaacggcttcatcgtagtaccagaaaatcgaacaatttcaagcatcactaagggtggaactgcggccttttcgataaaaccgcaagctgacctttcacaaggcacatatacagctactgtaaccgtcagtggacagaatatagttgcacagtcatttgatgtgagctttacagtaaaggctgcagtaaccaagacattgagcagcatcgctgtgactacggctcccaccaagaccaactataccgctggtgagaaattcgatcctgccggaatggtagtaacggctacctatagtgatggtactacaaaagaggtaacagactatacatttacacctaacgcagcactgacaaccaatgatgcaagaataacaatcagttacaccgagggcgaagatactaagacagctacgcaggctattacggtcaatgcattagagtacaacatcaccgtaacaggcggtaaggctacacaagttgaaggcactgaaattagcaaagcagcagagggcacagtgattaccctgaccgcaaatgcggctccttccggtaaggagttttataagtgggttgtcgaaaacggaaacatcaaccttgcggaggcaaacagcgcaaccactacttttacaatgcctgccggtgcagtcagtgtgaaagcaacctataaggatgtaccgcataccggcggcggttcccactcctcgtccatacagaagccgactattatcgcaggcgaaggtgctgagacaagtcttagcattcttgggacaaatctgacaattaaagtgacagaaggatatgaactgacagatgttatcttaaacggtgtatccaagggcaaagtaaccgaactcaccggtctaaggacaggagataaggttgaggtaaaaacagaaaagaaacaggaaaagccgactaaggaagaaatcatcgcggctcttgacaacagcaagcttgtagcacgttcgaaactcataactttggagaacggaaagaaagctgtacgcgttacatggtatgatcagaacggaaacgaaatcgactttgacggcattgaagtttaccgctcggttaagagatacaagggctacgggctggagccgttctacacaacaaagggagacaagagcgaaggatattatgttaatacaaaagacctcaaagaaggtactacatattactacaaagtacgcggatatgtaaccatcgacggtcaaaagtactacacagattattccctcaaggcaatcagaacaatcaaataaggtaagtacaaataggggctgtcgcattaacggaaacaaaccgttagggcgtcaggcccttttaccatgtttgcccttgacttgagtgtacaaatctcatataatagatgagtaattaaatttcagattgccttttgaaagctccgcctgattggtctgggtcctgcgcaataagactctgcgaaccttgtcaggtccggaaggaagcagcaataagcggaagctcttatgtgccgcagataagccttctccttgactgcggagctttcaaagggcaatttttttagaaaggaaggcttatgtatcaggcactgtacagagcatacagacccgaggtattcgatgagatactcggtcagaagcatatagtacgaatacttcagaaccagatagcaaaggacgagataggccacgcctatcttctgtgcggcaccagaggcacaggcaagaccacaaccgcaagaatacttgccaaggccgtaaactgtctgtctgagggagagcgcccctgcggtcagtgcgccaactgcatagccatcaaaaacggcacctttatagatgtaatagaggtagacgccgcatcaaacaacggcgttgagaatatcagagagcttcgtgagagcgtcaagtaccctccggcagcaggacgcaaaaaagtctatatcatagacgaggttcatatgctgtcacagggtgctttcaatgcgcttctcaaaacccttgaggagccgccggaatacgttatgtttattctggcaactacagagcctcagaagcttccggcgaccatactttcaagatgtatgagactggactttcgcagagtctccgaaaatctgctcaaacagggcatgcgcagcatatgcgaggacaagggaatacaggtaagcgaggcagctttagggcttattgcagccaatgcggacggttctgtcagggacggactcagcatacttgaccagtgccttgcggcaggcaaggacacccttgacagagaggacgtgcttgactttctgggcacttcatctgaggagatatttatagagcttacacataatgtggcggttcacaatattgcacaggcactgctgattttagagcaggttttgtcggagggcaaagaaatcagacagtttatgaaagactggctggcccattacagagcgcttctgatttcaaaattcgtatcctcgtccgaggatatgctcaatatgtcggcagaaaatataaacaggattaaagagcagagccagacccttgaggttgcagagatagacagagctataatagagttgtcaaagactatagccgatgccaggtggtcaacgcagccgagagtgctgctggagctttgcatagtaaggcttgcctctgtatacgaggagcctcagattatgtatcagcagccggcgaggagtgaagctcctgcggtcaaggcgcagccggcaccggtgcagcagacagcgcctgcagagcctgaggaagctgcttctgttaaagcgccggtacagcagtcatcgcagcctcctgcggattacgatatgatatggagagctgttgttgaggcggcaagcagcagacagggaagcttcaatctgcttcgttcggggtccagactgacggacatatcagacggagtgtttacggttgccgcaggcagcgagttcatcagaaaacttatacaggacagcagcagtatgttcgtcgagcttatggaaaaacagacaggacagaggcttaccctcgattgcaccttaggcagcagaggcagaaagcaggaaacagatataaacagtgttgtaagagaagccgaagataaattagggcttaatatagaaatagaataatggaggattactatgggtaaaggaatgaaagcgggcaaaagaccaaagactcccggcgcaggaaatatgcaggcgcagatggcgcagatgcaggccgtgcagcgtaaaatgaccgaaatgcaggatgaaatagataaaatggaaacaacagctaccgcaggcggcggagccgtaactgttacagtatgcggagcaaagcagataacaaatatcgaaatcaatcctgatgtaatagatcccgatgatgcagaaatgcttcaggatcttgtaatggctgcggttaacgaagccttaagacagatggaagaaatcgcagcagccgaaatgaacaagcttacaggaagcctgggacttcctccgggactgctgtaatgaaaacctatgcaaaaccgctgtcaaagctgataaacgagttgtcaaagcttccgggaataggcggcaaaacagcgcagaggctggcgtttcacatactgtccatggaagaggaacaggccatgagcctttcgcaggccatagttaatgctagagagcagatgaaatactgctccgtctgcggcaatcttacggaccaggatccatgcagcatatgctctgaccagtcgagagcgcaggatataatctgtgttgtcgaaagtcccagagatgtgtttgcaatggagcgaatcagagagtttaaaggtctgtatcacgtgcttcacggagccatatctcctatggacggcataggtcctgaggacatcaacctcaaatcgcttatagtcagacttcagcaaaatgatgtcaaggaagttgtgctggccaccaaccctaatatagagggagaggctacagctatgtatattgccagacttattaaaccgtccggcatcaaggtttcaagaattgctcacggtattccggtaggaggagatctggaatatgccgatgagataacgcttctcaaagcccttgagggcagaagagagctataggcgcataccctttttctttgcaagatttaaaagatatgtgtattttgcctctgccgcaagtatgctgtaggaagcatagtccacagcggcaaagtcgcttaactgattaaaatcatactgagcctgctcaagatctgagtaggctttttctattgaatcaaacagcagcattttttcatctgcgggacgcagtcggctgttcagaaatgttctgttggcagcgacaagcctgctctttagcatacctgcggtgctgattatcctttcctttgaagtcataaattcatacctcatatcacattatttaattctattttaatcattactggaatattttatacaggcagtatatgaaaaggagagaaattatggcaataaatcagcagcttctgatactttctgttatcgcggctatagtaattataattgactgcggcaggacttcgctgaagattgtaacttcgtcggcgctgggacttgcagggcttgcggcacttcattttacagcatttgcagtgcctctgaacgcagttacaatcggtgtttcggcggttctgggactgccgggagtcggagcgcttatgtatatattcgacaagataatatgaaataataattaatttgaccgaaaaagtcaatattcttgctcacttgattgtattttctgaaaatcattgtggtttttgaattaaagtgtataataaacgtgtgattatatttatgttattttatgtttaaggaggaaatgtagcgtgagcgaacaagtaaaaactcatgctgttgacgttgatgaacacggcttgaaaaagcatgacatcaaggtttcaacagtagtattcatgattttctgtctggtagctgcaggatgctatggtatcgaagagatgcttcctgaatgcggtccgggactgacaatcattatgttatgtgtacttccgtttgtatggggacttccattcggtcttgttgcatctgaactcggttcagtaagaccgcaggagggcggatattacaaatgggtacaggaggctctcgga

SEQ ID NO: 4022 - DNA, 31611 bp, Unknown
  16S sequences of unknown bacteria
gcggaacttgcgcccgtccgcctgctcaatgaacagcgtgaccggctgcacgccgggatagttgtcgaagatactcgagagctgcgacatgaccgagttcgagaacttgtcggagcgcacgcgaatcgtgagtgcgctcggcccacgcctgctgccctgtccctcgagcgacagcgggttgatgtccttgacgatcacctgtacgccgcggtcgctgcgctcgaatttgccatgcaagtggacgatcggattgcccacgccgccctcgttctggagcaggtcgcgatacttctcccaggtcttcgaccacagcacgcattcgatggacgactccaagtcttcgagctgcatgatggccatgttgttgccgctcttcgttgtcttgacctggatacccgcgaccatgcccgcaaaatcgtacgtgtacgtgtcgtggaacaggtcctcgtcgtcgacctcggaaagcggggcatgcgagttggccttcaggagctcggtgtacggggagagcgggtggtcggagacgtagatgccgacgacctccttctcgaactcgagcttctgcaggcggtcccactcgacgccgtctgccggcgggatcttgtcctccatgtcggagtcgtctgccccgtcttcgacctcggcgaacaggtcgagcagtgaggtctggccgtcctccttgtcctgacggcgctgctgcgcgcgctcgagcagcgagccctcgtggaggagtgcccacagctggcggcgcgtgtagcccgtggagtcgaaggcaccgcctttgaccagtgcctcgacgacgcgcttgttgcaggcgtcggccggcacgcggaacacgaagtcgtacaggtcggagaacgggccgttttcctcgcgctcggcgatgatcatctcgacgaccttctcgcccacgcccttcaggccggcgagtccgaagcgcacgccgttttccacagcggtgaagtcgctgcgggactcgttgatgtcaggcggcaggacgttgatgccgtcttgcttgcaggcgttgacgtagtggacgatcttgtccgtcttgcccgtatagctcgacagaaccgaggccatgtactcgttgggatagtgcgccttgagccacgccgtctgcatggtgaggatgccgtatgcggccgagtgcgacttgttgaaggcatactcggcgaaggcgaggacatcgtcccagatcttctgcgccgtcgcgcgctcgtagccgttgcgcacggcaccgttgagccagtggttctccatcgtctcgacgttgccgtcgtcccacttctgctcgacttccttcatcagggcgatcttcttttttgccaccgccttgcggaccttgtcgctctcgcccagcgtgaagccggacatgacgatggagatgcgcatgacctgctcttggtagacgatcgtgccgtaggtgctctcgaggatgtccttcaggcgctcgtcgtagtagacaatcttcttgcggccctgcttgcggtcgacgaagtcgtcgaccatgcccgcgcccagtgggccgggacggtacagggcgatgacggcgacgacgtcgtcgtaggtatcgggcttcatgcgcttgagcagcgcgcgcatgcccggcgactcaatctggaacacgccgttggtgccgcctgtctccatgagcttgaagacgccctcgtcggttttccagttggtcttctcgaggtcgaggtcgatgccgtagttgtccttgatgttgcgcagcgccttcgagatgaccgtcagcgtgcgcaggccgaggaagtccatcttaagcaggcccatgtcggcggtcatgtgaccgtcgtactgggtgatgatgacgccgcccttggtatcgagcttgacggggacgtagtcggcgacggcatcgcggcagatgatgacagccgacgcgtgcacgccctcgccgcgcgtgaggccctcgagcttgcgcgccgagtcgatgatcttgcgcgtgtcggggtcgctctcgtactccttgcgcaggtcggggttgcccgtcagcgccttgtcgagcgtcatcttgggatcgttcgggatcatcttggagatggcctggctcttccagatggggtagtcgagcacgcgcgcggagtcgttgaccgcctgcttggccttcatcttgccgtaggtgatgacatgcgcgatcttttcggagccgtagatgtcgcggcagtgctggataacgtccagacgccgctcatcgtcgaagtccatatcgatatcgggcatctcggtacgctctggggagaggaagcgctcgaagagcaggtcgttttcgagcgggtcgaaacgcgtgatgccgagggagtacgacacgatggagcccgcagcagaaccacggcccggccccacgccgatcccgttctcgcgtgcccagttggcgaactcctgcacgatcaggaagtatgccgcgaagcccttcttgcagatgatctcgtactcgtgctcgaagcgctcgatgacgtccatgcgctgggtcaaatctccgtagcgctcttcgaggccgcgcagcgacatctccttgagcagcgactcgttggtctcgtcttttttcaggaacgggtagcgcggcaggatgatgttgccgaactcgatggtgacgttgcacttgtccgcaatctcgagcgaggtcgccaggcactccggatggtccttgagcgcctcggccatctcctcggggctcttgaggtagaactggtcgttcttgaacttcatgcggttggtgtcgctcacgtgcttgcccatgccgatgcacagcatgaggtcttgcgtataggcgtcttcctgcttgaggtagtggatgtcgttggtgccgacgaccttcagccccatctcgttggcgaggcggacgagcacgtcgttgatctggcgctcggacaggccgctgtctgtggtgacctcgggaccgtggttttggatctcgatgtagaagtcttctttgccaaacaggtcgctgaaggtctgcgcccattgcttggcgacctcgtattcgccgcggtcgatggacttgggaatgacgcccgcaatgcaggcagaggtggcgatgatcccctcgtggtatttcttgagcatctcgaacgtggtgcgcgggcggtagtagaagccgtcgaccgcggactcggagacgaggtgcatgaggtttttgtagccctcgttgttcttggcgagcaagatcatgtggtagagctcggggcgcttgtcgcgcgagagcgtggagtcgggcgtgaagtagatctcgcagccgatgatgggcttgatgcccgccttgatggcggcaaggtagaactccgcgcagccgtacatgtagccgtggtcggtgatggcgacggcgggcatgccgagctccttggcgcgctcgcacagcggccccaggcgggtgcaaccgtcgagcagcgagtactccgtgtggttgtggagatgcacgaaggtgccggcgtcacggcaggtgtggggtgcgggcccctgccccagcgacgcggcctttatttcttcccatccggggatgtcttcttctgccatagtctagcgctcctcgtcctgtgagccgcaaagcatgccgagcgcggccccgtagccgccgctgccgtagttgaggcacttggagacccggctgatggtggtagccgacgcccccgtctgctcctggatgtcgagatagctcgcgccctcggagagcagacgcgcgacctcgagacgctgcgacatctccgtgatctcgcgcaccgtgcacaggtcctgcaagatcgcgtagatcgtatcctggtcctgcgtatgtgcgaaaacatcgagcagatgctcgacaagctctgtcctgatcttgtcctgtgccaaggtttgactccgaatcgtcaccgaagaacgaatgtgtccgagtgcgtttgccgcctgcgtctgcaggggcatgctgcatgcggtcgagccgctccacaatcctactacgcccatgtgacacgcttcctgaaaatctggtggaatcggcctcgcccgcgcactgtcccgactgcctccaacggagccgaaaaccttttgttagctatatcttactttactcacgcatcgatgcgcgtcaagcaacggattggctaaaagccaaggggcgctgcacctacagcgcgtctggatcttctgccttgagcacgaagtggtagatgatgagcacgacgcccataatcgccgcgctcacgacgccggtcatgataacgacgaaatcccagcgcacgttgagcttgaggtagatcgtcgacatgattccgacggcgatgatgccgacgacggcggcggggacgtggctcttgccccgccccgggtcgaccgagaccgcccagcccgtgagcgccgtgacgagcgccgcgagccctgcgaaccacatgatggacgcggtgaccgcgccgacctgctcgacctgaatggtcaggctgcaaacgcagacgcccgttcctatgccaccgactatgatggagaggatgcggacgataacctgcttgaatgtcagatggtattcgttgctcatgtgcgtaatgttaacaggattccagacgcgcgcatgtgtcgtttacgcgaacgtttgcgcaagccacgcgccgtactcgccgctccacatgccgccgagctgcgcaaacgtcgtgttccagtcgaagtcggcgttaaagagcagttcgaggtagttcttgcacgaaaggtcgctcctgccgtcgttgatcatctggaacacctgcgtgtacgtgcaggtcgggcacatcgtgacgacggtgtcgcccggctcgcactgcgcgaggatgctgcggaccttggcctgctgctgctcggggaacgacgcgctcaccgcgccgcccgcgccgcagcagctgttgcagatgacgccttggaaggtctgcccgtcgacgagcgccatcgtgtcgtcgaggtagctcgcatcgcggtcctggcacgacttgaagaagcggacctttccgtcgacgtgccgcggggcaaagccatgctcgcgcaaaaagcgcgagaccgtcaccgcgcgcacgtcgaggccgcgctttgccatggcgccctcgaccatgttgcggcagcccgggcacgcgcacacgacctcggcagccccgctcgtgacgatctcgtccacgatgcgctgctcgagcgcggcggcgcggtccagaaagcccgcgctcttgagcggagacccgcaacactcgtcgatcatcgtggtcttgccgcccagctcctcgatggtgccgaagacctcgcggcacagctcggggccgtaggcagcaagcgagcagcccgggaagaacgcgacttggcagtcggtctcgggttcgtgcccttcggaggcaacgtgacgggtgaggtcggaatacccgataccgtagatggcgcgatacgccgtgaagatgtcccattcctggtcgacctgcacgctcgtccaagcagagcgctcgatcagcccgtcgttctggaagaccttgcggctctcgtagacgagctcgctcaccttgatgtccgcttcgcacttgacgatgcagttctcgcagaagaagcagccgcgcacggcctgcacgagccccggggtcgccatgatgctcatggcgagctcggtctcgtcggacgagcggacgagcgcgttgcgcatgccgttggcaatctcgagcaggctcatgcccgcacgctgcagcgactcgcagcgccccatgcacttgccgcacgacaggcacttctccaaagtctcgttgtagacggcaggaatctccatcacgctcatagctctaccttcatcccatcttctgcgacggcgacgcgtccgccgaactgtgccgcgtactggtatatctcgtgtatctcgttcacgcccttgtcgcacatgtgcggtgcgaggtgctgcaagatgaccttgcccgcgccgaggaggttgatgccctcgtcgacggtctggtgcacggtgtggtgcgtcttgtggacgccgacgttcttccaaaacgtcgcatccatgatgagggtgtcgactcccttcaagatctcgacgacctcgggcttgagctcggcggtgtcgggggcgtagaacgtgcggtgcccgttgggcgtcgtgatgaggtagccaaacgcgcccgggcagtggttgagcgggagcgcctggatgttcatgccgtcgaacgagcgcgtggcgtaatcgtcgatggcatcgagctcgaagcagtcgtccatgtaggagaactcctgaagcgcctcggcgagcgcgtggctgctcccatggaacggcagcgtgccctcgcgacacaggcgtatgaagtactcgagctcgcccagaccgcccaaatggtcgtagtgcgcgtgcgtgagaaagagctcgtcgatggtgtcgaacccttcgcggatgagcgcctggcgcacgtcgggcggtgtgtcgatgagcgtcgtgccgttgccctggatgacgacgcccgtgcagccgcggcgcttggaggggtcgcggcgcgcctcctcgcacgcggggcagtggcagaaaaacgccgggacgccgcagcccgagctcgtgcccaggaaggtgagcacgtggcgggcgggaaccgacttgaacgggacgggcccgcaggtgccgagcatggggcacatgtcgcagtcggtacggtacttggggtcgatgtccttccagccgcagcgcacgaacccgagcgcctcgtaaaagccgacggaatgcccgcgcgcgacgagccgcaggtcgggatgcttcttgagcgcgtcgacgacgagcgccttgcccacacccagtccctgcttgacgccaaagacgacgacggggttgatgttgtcggagccgtccggcgcgtgctcgatgcgtatcgcgccgaacatgacgttgccatcgccgatggcgacgcggatgccctccggtcccggcgcatccgggaaatcctgcgacgcgaacaggtagttgatcgtcggcatgtcgctttctcgcgcatcgcggatcagaaacggtggctttatcacggtaggtcggtccttcctcgactcacgcccagcagttcaggtgcgctacatgatgggcggcacgtagatcttcatgcgcgattgcgggatggcgcgctttgccagctcctggcaacccttcacgatggtctccaggcggttgagcggcacgcccatgtacatcatgtcctcgccgatgtcactcgacgcgcgcccgccgtagcagccgaacgagatgttgggctcgtcgttcatcatgggcagcagcgtggcctcgacgcactgcgcgttgaagcccgacgcgtggaagtcgtgacggtgcccgtcgaagtagctcatggacatcgacagccacatcatctgctcgggcgtgcccgtgaagacgaccacctcgggatggcgcacggtcttgccgagcggctgcacgagcgtcgcgcgtttggacttgggcggcagcgtggggcgctccgccaccatcttcgcggctgcctcggcgtcgacgaccttgtggaacaagacgtagatctctcccgtggcgagcttttcgggtacgcccgtcatgccgaagatcgacgtgccgtccgggcaggaatggcagtgcggcggcatgaggatggatgcgccgcggcgcgcggcgttcatgctctggcagtagcgcagcttctccttggggaagggcacatcgggcagcagctcgtctttgtcgatgatgcccaccgcgacggggtgccagcgcaggtcgagcgcgtccatgatgatcttttcccattcggcgtactttgcctgctcctccttggagatgggctcggcacgcggctcgtccttgtacgggtcgtactcagccgcgcccgaacgcgcctgaatggtgatcgctcgctgggggcactggcccgagcaggtcgtgcagccgacgcaggtctccatgtgggtggcgacgggcatgccgccctcccccacctcgaggcagtactgcgggcagaaggcgacgcacaggccgcagcctacgcagcggtcggcgtcgtggataaagtcgaactcggcagccatcgtcgttgctgctccttccagacaaaacgggcgcgcggcgcggcgcccgctccttacggttttcgaccatgataacccgatttcgccaagcgacacgtcactattagataacgtcggtcaccgcctgcttgcacccccatccacctgcccgtgcacgtcattggcgggcgtgcgttgccggaagacggggtatcatacgcgtagttgtctttcggaagggactgacgtgacacccgacaccaaagaatcgcgctacaaggagtacctcgaggcctacccgcccgagcagcgctacgcgctccccgtcctgctcgacctgcaggacgcttttggctacgttccggcacaggcgaccgaagacctggcggactacctcggctgccccgctgccgacctctacgccatcacgacgtttttgaaggtgctctccaccaagaagcagtcaggccatgtcgtgacggtctgcagcggcaccacctgccatctgcgcggaaagaaccagatcaggcgcgcggcagaagcggcgctcggcatcaagctcggcgagacgagccaggacggatcgttcaccctgcgggaagagaaatgcctgggaacctgcgccttcggcccgtccatgaagatcgacgatgcgtacttcaccgcactgacccccgagggcaccacgcgcgtgctcgagcgctacaaagacggcgaagaccccgaggacatcatcgcctcgacccccggcgcctacggcgagaggccgctgtacaaggcgcgcgagcacttcgacgcgcacgccgcgttcaacacgatgcagcagcgcgtcgtgttggcggggctcgatgcgaaagacccggtcagcgtcgaggaataccgtgcgcacggcggctacgagggcctttgccgcgcgctttcgatgacaccggaggcaatcgtcgcggaagtggagcaaagcggcatacgcggcaagggcggcgcgggctttccggctgggaccaagtggcgcaactgcctgaacgagcccgccgagcccaagtacctcatctgcaacggcaccgaaggagaccccggcgtctacgtggacggccccatcatggagggctgcccgcacgcgatcatcgagggcatggccatcggcgcgctcgccatcggcgccgaggagggcttcctgtacgttcgcagcggctacggcaaggcgcgcgagcgcctgcaggccgcaatcgacgccgcactcgaggcgggcatcctgggagattccgtcatggggtcgggccacaagctgcacctgcgcatcgtgcgcagcggcgggcagtacatctgcggcgagacgacggcgctcatgtcgtccatggcgggcaagctgcccgaggcgcgcgcgagctacaccatccacagcacgcagcacggcctgttcgaccagcctaccatcctcaacaatgccgagacgctcgccgccatcccctggatcttccgcgagggcgccgcggccttccgcgccatcgggaccacaggctcgacgggcacgaaggtgttcttcctcacggggcgcgccgccaaccagggcatcttggagattccattcgggacgaccctgcgccagctcgtcttcgacatgggtggtggcgtggcgcgcggccacagcttcaaggcgctgctccccggtgggccttccgacagcgtaatccccgaaaagctgctcgacacccccatcggcttcgacgagctggctcagcagggggtgcagatgggctcgggcggcatggtcgtgctcgacgagcgcgactgtatggtcgaaatggcccgctaccacatcgattttctgtgcgcgcagtcgtgcggcaagtgcacgccgtgccgcgagggcctgcgccagatgagcgcgattctaaagcgcatctgcgacggccaggggcgcgcgggcgacctcgagatgctcgagcggctcggcgacgtcatgactgacacggcgctgtgcgcactcggccaaagtgccgcgaaccccgtgctctcgagcatgcgaagcttccgagacgaatgggaagagcacgtacgcgaccaccattgccgtgcgggcgtgtgccgctgcgacgcgctgtccgaaggaggtgccgcatgagcgaggggctgacgatcaccatcgacggcaagccgtgcacctgcgagcgcggcgagtacctgtacgacattgccaagcgcaatggcatcttcatcccgaccatgtgcagaaacgacgagattcccgagcaccgggcgagctgtcgtctgtgcatcgtcgagatttcggaaggcgggcgcacgcgcatcgccacgtcgtgcgtctatcccgtgctccgcgagtgcgaggtgcgaacgagcaccgagcgcgtgaagagcgaccgtgccatgttgctcgcgctcctgcacgcacgcgctccgcagtcggatgcgattgcgcagatgaacgatgcgctcggggacccgagcatcgaggggttcgtgaccgtcgacggcgagaagtgcatcgcatgcggcctgtgcgtacaggcatgcgacacactcggcgcgagcgccatcagcatgatcaacaacgggacggaaaagcaggtggcaccgccgttcgacatggcgcccaaaccgtgcatcggctgcctcaactgcgcgcgcgtgtgcccggtcgatgcgatcccctacgaagaggacgagtacgtgcggagcatctggaaccgcaacttcaccatcgcctattgcgaaagctgcggaaaggcgattggcaccgccgccgaggtcgtgcaccgcgctcatgagaacggcgaggacgtgtgcttcctctgcgatgactgcaaatagcagcgccctcgcgcgagatgcgtggcattgccacgtttctcgcgcaatctacgccggatgcgtggcactgccacggtttccgcgcaattcacgtgggatgcgtggcactgccacgtttctcgcgcatgttacgtgggatgcgtggcactgccacggttcccgcgcatgttacgtgggatgtgtggcagtgccacggttttcgtgcaggcttgggctccgtgaaggcttgagcccctagtcctcgtggtagagctcgtcgccgggatgctcgaactccgtcgggcccgtcccccacatctcgtagagacgctcgcccgcagcgttggtcatctggtagctgcaaaacgggatgacgcgcccgtccttcatcgccacctgcatcgagcactcgctcatgcgctccatcgtcgcggtcatcgcatccatgtagtccatgatgatgaggctgatgcccttgttcaagtcgacgcccttcttgtagaggatatcgggcagcaccgaaccctgtgggctcgtcgggtcgaagtactcgaggtattcctcgcgcgtgagatcgcgcgtggcggggacgtagcccccatcttctgccgcgacgaggaaggtaccggtatcgcacatcgggtccgagcagccgagcggcatgatgtcttgcaccttgatgcgcccgttggtctgcttctcgatgtcgaagatggtgtcacccgccgtgtagtccgcgtaggtctcgggctcgaaacgacccgacatgaacgccggctgcagcgcgacgccaatcacgacgtcggagttctcccaggcaaagtcgatgacctcgcccaccaggtcgtcgttcacgcccttgacgatcgtcatgcacagcaccatctgaatgccgacctcgcggcagttctggattgccgccatcttgtcggcaagcatcgcgccgttgccgcagatcttctcgtacgggtcctcgtccacgccgtcgaagctcagatatatgcccgtgatgccggcgtcgacgagcttctggaggtactccttggagcgcccgatgacgatgccattcgtattgatctcgattccgacgaagccatgacggcgtgccatcatgacgatctcgtcgaggtcggggcgtatcgtcggctcgccaccggtgatctgcaggcccgtctcgggcccgaccttctcggcaagcgtcgtaacgaggccctcgatctcgtcgtagctgatgccgtgcgtcggaaagtccgcgctcatgaagcacaccgggcacttcgcgttgcagcggcgcgtgacctcgatctcgacgagcgtgccacggcgcagatggcgtttgcacagcccgcagctcttgcagcattcgccgacgatctcctggtccatcaccttcgggcgcgtgacatccgtgtgcatgctgcgcagccactggtaatggtcggcgttcggcgagaggtaggtcgtgaactcgccgtgctcggggcaggtgcgcatcatccagactttgttgtcctcatccgcatacacctgcgccggaagcgtcttcaggcagtgagggcaaagcgcgtgcaccttgtgaaggtctcttttctcggtcatgtagttgctcctatgaaaaagcgacccccgaactgacaaaatccgggggtcgcgtgtcagtgcctagagaatgccgtcagtcggctcgggcttgagctccgcgacatcctcgcccagttcctcggaatccgggtcgtccatgtactggcgcgggtcatggttgtcgtttggcggagcgaccgacctgatgcccaggtagtctgcccacgcgagcacgcggcgcggcacgtagatgtcggtctggaacttggacgcgcactcgagggcacgcgcgcacgaaagcgcatgcgcaaggtcctcgatctcgtcgacgtcggcgacgggagacaggtacgcattggggatgttcttctcggtgagcttctcgcggtagccgtccagcgcggggcgcccgtccatgttgtagtagatgccctcgtggttgatgggcgtgtcgtagctgaagccgacgagcgacgtgccgcactcctggcacggagcctgcacgaagcccggcgtgcccagaacctcgctgaagtagtcgagccactggaacgcctgcgtcacgtgcgtacgcggcagcgtgggaatgtcggcgccgatggagacgatggcctcgtagccctggtcgaagatctcctggaaggcgccgtcaaaatgctcgtcgaacgacgtgcccttgtcggacatgtagtggatctcgcgcggccacgggccgatctcgtcgagcgtctctcgcatgagctggatgttctttgccggcgtcgtggagatgaacaggtcgtagctgcgctcgggagccccggcgtcgcgctcacgctcgcgcctgttggcttcctcgaggtcgtccatgcaccagcaggcgagctcggtcacgtcccacaggctgcgcttgaagaactgcgccgcctgctcgtcggtgaatgtgccgccgcgggagcgggtgagcctggtcttgaccaggccgggaatcgggggcttggagaagatgagaatcgcgtacttctttttcacttactccctctctttctttctgatacggcagggaatgccgttgtagatccatgttccgatcaggggctcgggatccatggggaccgtccccctcgtgaggaggttgacgttggactcgaagcagcccgagtaatccggcgctccggccctccgctcagggtaccaccaaccgtactcggctgataccacgccatcgaccatattctcgaggtgcacatactgcacgatctccacctcgggggtgtcctggcgcgagatgagcacctcgtcgccctcggcaaggccgagtcgttccgccgttgcggccgacatgcccacggtcggcttgggatggcgcctgcgcatcgaggggacctcgaaatacgacgacgcccagtagggctgcttgcgcgcgcccgtgatcatggtcacgcagccatcgccctcgtcgcggtccacgtgcacgccgggcacggggaagaagcgcgcggtgcgccccgcgcccatgctggcgaggaacgggttggcgagctcgaccttgcccgattccgtcgcgaatccgcgcggctcgcccgtttcggggtcgatttcctcgtgcttgtagtagtgcgcggggttaccgcattgccccgtcaccgtgaacgcctcccagctcatgccggtcggcgcgatggtgcgtgcgagctcttcggtcaggttcttggctggccagttctcctcggcgtctcccatgcgcaaggcaagctcgcgcaagatgacgtagtcttccctgcgctcgaactgcggttcgcaagcggcgggaccgccatagcagaagtccgagacgccgcccatcgcctggaaggccgggtgctcgagagctgcggcggcgggcagcacgtagtctgacatctgggcggtcggagtcatgacaaactcgaagtcgacgatgaggtccatggcctcgaacgccgctttcaccagacgcgtgtcggcgtaggtgacgagcgggttcgcgccatcgacgatgagcgcgctcaccctgtagggctcgccggtcaccgcggcgttccacacgcgtacaggcagcgggctcgtcaggtagcgcatgggaagatgcctgccgagctttgcggtgcgcgcgtccgccttcgcgaaaccgcggtagctctggatgccgcagtcaggctcgttgaggccatgttcgcgcgactctcggctcaggcgcgcgctgccctcgagctccatctcggacaggaaggtcgggcgctcgttgagcagggtgccgccgggaacgtcgacgtttcccgtgatggcgcgcagcgaagcgagcacacggtgcagcggggccgtgttcggcccgatctggtcgacgccgcggcccgagagcaggccggcggggcaattggtcgcgtaggtgcgcgctgctgcctggatatcttcgacggagaccttcgtgagctcggacgcctcctcgagcgtgcgttcgaacgccgccgccttgaactcgtcgaaaccatagcaccacttctcgacgaactcgtggtcgtagaggtcttcttcgatgatcacgcgcgccagcgcataggcgagcacggtgtcggtgcccgggaaggggtgcagccagatgctcgcgcgagccgccgtcatggacaggcgcgtgtcgacgacgatgaggttgccgcctgcacgggcgtagtcggcgatgttgcgccagaacagcgagttgtccgattctgcagggttcgtgccccacagcacgaggcattgcgtgagccctggtctgaaatcgcactcgacggaccacccgtaggtcatggtgtccatccagatgcgtgggttccagcaaatcggtccgatgcccatgttgttgggactgccgataaaggtcatgaagcggtgcagcggccagtacacggcatgcgggccgccaatggcactcgcgaccgtccaggggccgtgctcggcgacaagttgtttgagtttggacgcaatctcgtcaagcgcctcgtcccagctgatgcgctcccatttgccggacccgcgcgcgcccttgcggcgcagcgggtagttgacgcgcgccgtgtcgtcgtagagcttctctaggttgagcggccagcgcacgcaccgctgcgcgaccgaggcgtcgtagggatagcgggtcggatctggcgtgagcttggtgactctgccatcttcgagcgtcgcgtcgaacgcgcacaggtagccgcagtaatggcagttcgtctttttaatctctgtagtcatagctggtcattttagcggactgagaggtggtttcacgcctcatcgaaagtcaaatcgatgttgtcgtcacctgtgagccgccagtactcgggatcgcgctcgagcgcgtcgaccgcatcatagaccacgttccaatcgacgtcgatgccaaagacaggctcgaggtagtgcttgaccggcgtgctgccgatgcttcgctgcagggagttgacgcacgagaaacacgtggagagcacgaggtccgtgtccgtctcgtcgacctccgcgaggcgcatcgtgcggcggtacacgcagtaatcgcgcgcgtagacgctcaccatgccgcccccgccgcagcacatcgtatcgcgcttctcgtgtgcgagcgggacaagctctgcgttggggtacaggtcacgggcgagctccccaaactcgccgtcgtagcggtcgtagcacgcatcgtgaaacgatatcttgccggaaatgccgctcgtcatgcttcgctcgttgagcagcttgctcagcttgactatctccacgtccatgccctcgagaagctgaggaagctcgtagccgcaatgcgggcatgtgatgatgaggcgcgtgatctcatgctctgccaagaacgcctgggcacgcatacggtagcgttcgaactcctcgtaaaaacccgagtcgtaaaacgtcgagccgcagcagaagtacagcgtgtaggcggcgagcttctccgcgcgcagccagccggagaccttctcggtaaggtcgggagcgtaggcgtacagcgagcatcccggaaagaacgccgtgtggtcagcctccccgcccagatcgggcgtgccggaaagatatgtgacattgtggatgtctccggatgcgcgcgccttgagtgcggagaacaggttgtacttgaggtcggtcctgaacttgcggtacaggggacgcagctcgtcatgctgcggcaacagcatgccacgcagcggcttgcaggcgtcgatggccttgaggccggccggacaatgggccgtgcagcggttgcacagcgcgcaggtgaaggggaaatgccgccaggtctcgtctcccgaaagaagcgattcgcagatgtcgcccaggttgggcgttccttcagggaagttcccacagtcggtccgggcgcacagcccgcatctgatgcacgtatctgaaaactgctgcaccgcagctcgtgggtcgttttccatgacatcctccttcgtatcaggacgtcttcagtttacacttcgctaaatccaccacaagggcagtcaggtaacggcttaatcgcctccaactggcccgccagcaaaatccatgccagaaccctggcatattatgtattacgtattacatgtttctacgtcaagaggaggagccatgaaggagacactcgtcagcgcgcgtattccccaggcgaaaaaggaagccgccacgcgcgagtttgtcgcacgcggaacgaacatgtcagagttcatcaaccgtgcgctcgacgcgtttctcgcaaccggcgaattgccgggaacgcccagcaaggcggacgctagagacacggcggagttttcgaagttcgtagagcagagcagtgctgtggtgcgctggtcagaaggctcagaaaattacaaagaccttctgagaacgggaaagcgagcagactatgaatctcttgcttgataccaacgtaatcatcgattatctcggccgtaaagagccgtttttcgaacccgccgaacagattgttgccgcaggtttctttggcgatgcaaccttgtggatgcccgctcagtctgctgcagacgcgttctacgtgctcagccactacctcgactctgctcacgtgcagtccttgctcgcccgcctgttcgaggtagttaagcccgtcgcgctctctgcagacgagctcttcgatgccacgcgtctccaatgggacgactataaagactgcctcgtcatgctggcagcattaaaggcacacgcagattacctgattacacgagacaagaagggcttcacgcgatcggcagtacccgcgctcacgcctcaagaatggcttgcgctccaggctaaacgcggcatcagctacacgccggcagaactctcccgctagccatcggcccgttcctacgcgccgcgttcctctcccccgccccaagacaacaagaaccccggctggattaccagccggggttccacaaggacttgccagtagacggcaattattgaagagggttactcagccgcagcagcggtcttgggctcttcggcagcagcctgggcggggttaacccacgtccagtactctcggccttcctcccagtagtccatgaaaggctcgcgcttctgcggaagacgcgtgtagaacttctcctcgccgttgtcgagacggcgctcgcaagaccacagaatcatgaagcggagcaaccagccgccgagcagcgccatgaccggagagacgatagcgccaaccgggctcataccgccgaacacgttgaagatcagcggaagaaccagaccgcaggtgaccatcaggccccagaaggtgaatgcccaggagccacggacccagcggtcggcgatggccttcgcgtacttgttggatgcgcagaactgcagcatcacatacagcagcaggaccagcagctcgagcacgatcaggatggcgtctgccatgtgcaggaagtgcttcatgccctcgatgagctcagcgccctcgatggtgttgaacggaatctgcagccactccatcggcagcgggaaagcgccgacgcacaggctcagcagagcagcgcccgtggacagagcggaaaccgtgaacagcacgggcagagcaggcgtcgcccagaagggacggcccttcagggaggcgatcatggtgccggtgtagaccatgaccaggaagcccgcgatgccggcgatgaccaagaagaagtccgccaggccctcatacgggatgaacggcagcatgctgaaccaggtgatctcccacaggatgaacagcacggcgaagatcatcgcgatggagagcagaacagcaccccatttgatgactgcggtccgcgtgacgaacgccctgtagaacaccttcggctgacccagctcgaagatgagcaggccggtgccgacggccagaacgataagtgcgatgaaaacgccccagacaagaatgctggacgtcgcagcacccgggtagacgatcaggtccaagaccatggcgaaggtgagcataccgccgccgagaccgcccaagaacaggtaggttgcaagttcccaaccccaaaaacgtttcattagccacgacctcccaagtcacgaatgtagtacacctgcggctcggtaccgagatcttcgtggatgcgctcggtcttgaatttgccgacgagcttgctgacctcgctgttggggtcgtcaaggtcgccgaagatacgagccttctgatggcacgtcttcacgcagtaaggctgctcgccctcgcgaacgcggtctttgcagaacgtgcacttgcgcatgaaaccctcggacttggtgtagtcgcgggcgccatacgggcaagcgtttgcacagaccttgcagcccatgcactgagtgggctctacccacacgatgccgtcgtcgtcctgacgagaagcgccggtcgggcaagccgggacgcatgcgggctttgcgcagtgcatgcagatcatcggcgtgaagttcatgtggacgttcggccacgtgccctctgcgccctcggaaacgaccggattgtagatgatgtcaatcgggagttcgttccaggtgcggcatgcgatcgtgcacgactggcagccgatgcagcgacgcgtgtccattaccattgcataacgagtcatgtaagcctcccctccttagttctgcggtgctgcaaccgcgttgtactgcatgtcgtaccaggcatcgccctggacgtcatggaggtagtcaacgccgttgacgttttcgtatttccagccgttggccacgtcgtagtacgtgcccgtcgcgtcgtcgatgacccaaccggagtcgccgtcgtagcggaagccggtcttgtcgtggacggtggtcagggtgacgggattccacgtgacgcctgcggggagctcggcaccggcgtactggggaccctcagaggggttgccagagaagtcgtagtacttgccgtttgcctcgtcgagcaggaagtcgccgttgtagttgacgtacttgaagtgcgtgccctgctgatagtaggtgccagcctcgtcgatgagccagccagaggggtcgagcgtcatgcccgtggactcctcgtagatgcggcgagtcttgtagtcccatgcgaagccctcggggacctcggtgtcgggctgcgcgaagatcggctcggcgaactcgcgggccatcttctgctcgtgcggcatggaatggacgccagcacccctggttgcgaactcggaacccgggatggagaactgagcatcctcgtgggtgaactcgtggtcgatggcggtgcacttgtacaccttgcacatcaggccgcggtttgcccagcagccggtcagcgggtcgcagtgctcgtcatcgacggacgtgatgacgttggtgttggactcgaggcagccgaagggctggtcggggtcattccagtcgcgctcggggaaccaccagccgcgctgggtgtagatggcgcgcggatcgatcgccggctcgacgttggcgcgctgcttgatgcggccacggcgggtctcgatccagcaccagtcgccgtccttgatgtccagcttctcggccagctcggggttgatggtgaagaacggatcgggcttgatgtagcggatgatcgggttgttgaagtgctcggagtggtggaacggcatgaagccgccgcccgtggtgagcacgatcgggtactcctcggcaacctcgggatcgtcgacctcgttttcgggggcgcccaggtaggtgggcattccgggatagccgaactcctggaagatcgtgctgttgagctcgaccttgccggtgttggtgcagaactggccgcgggcctcgtgcttcttgtagcggaccggcgggtagtacatgcggtatttctcgacgaactcgtcatagctgctgacgggcatgcccaaaggctcgatgacgtggaagagctcctcctcgagggagtcgtacggccacgcctccttgccctggccgcaggccaggccgagctcgcgccagatgtcgtagtcgctcttgcgctcgtacagcgggtcgatggcgcgctcggaggccacgatggagtcggtgacgccgtagttggtgtggacgacggggcgctccatagcaccggcaaccggcaggacgtagtccgccatgagggcagtcggggtcatgaagtactcgaggacaaccatgaactcgaccttcttgagcgcttcccagaccatcttggagtcgccgtaggaagagatcgggttggtgccgctgcagaacagcgcacggacctggtacgggtcgccggtgatgatcgccttgaagacggacgggccatgggcctcgcacatccactctgcggtgaatgccttgccccacttgcgcctggagatctctgcgaggcgctcgtaaccggggaaggtggtcagcttgtacttgtcggagccgatctgcttggacttgacctcgtcggggaggacgtcgttgcgctcgagctcctcatcggtgacgtaggctgccgggccgggcatgccgtcgccgccggggacgtcgaggttaccgcagatggcgcgcatgatcgcgcgggcctgggtgcctgcagatgcggagcggcccagctggtcccacgtgtctgcccactgcatgttgccggggcggttggtggcgtacatgcgggcggcctcgcggatctgctcggggtcgagccaggtgaggggcgctgcccattcgggagtgtagggctccatgtggtcgcgcagctcgtcgatatcggtgcaccagttctcgacgaagtcgaagtcgtagaggaactcgttcaaaatgacgttgagcatggcgagggacagtgcggcgtcggaaccggggcgcagcgggagccacaggtcagcgtgagctgcggtctcggtgtagcgcgggtcgacgacgatgagcttcatgccattggccttctgcaggtcgaagtagccatgggcgccgggcatggaagacgcgcccgggttcatgccccacagcacgacgcacttggaagtgcccaggtcggtctcgaacggagaccagccgctgatggcggtctcgatcatgaaggtcgggatccagcacagcagtgcgttgtggaagccattcggcgtgccgaagaagttgaggaagcggcggcgtgcccagtcgtcggtgcggagcgtaccggctgcagcagcaactgcctcggggccgctctcctccttgatctggttgagcttcgcggcaatctcggtcagggcctgatcccaggagacgcgctcccacttgttttcgcccttcttgcccgcgcgcttcatcgggtagttgatacgcgacggattgtcgacgaaggtcatggcctggttgccgcgagtgcaaaggccgccggcgttcgtcgggtggtccgggtcgccttcggcgtagatgagcttgccgtctttgacgtaagccaaaacgccgcagttctggtggcagaagtaacaggctgatttgcggacgactacgtcatctgcatgaaaatcaattttatctgtcactgtcccctcctttttctctctactgcaaagtccttgtgtaaatacacagccttggatagtacttcattccctttgaaaaatcatcagtttggcaacgggtatcggcaaatgtgaatatgcagcagcgcgagaagaatcgcacaaacgcgcaggtgaatatacaagtaggcaggcacccttataggagcctgcctacttatttttttaaagaataatattgctttggggcggttgctgcgccttagagcgtctccagcttgtccgcaacgcccttgtaccagtcgccctcgatgtcctccgccttgccggcgtcgacctctgcagagatcttcgggtccatgggaacgcgcgtccaggtatcgatgcccttgtccttggcgatggcctcgacctcggacttgccaaagatctcgtggcgcgtgccgcagtcaggacactcgtagtaggacatgttctcgacgagcgcgaccacggggacgttcatatggtcggccatgcggatggccttctcgacgatcatgttgacgagcacctgcggggcagttgccacgacgacgcccttgagcgggaactgctggaagacggtcatggggatgtcgccggttcccggaggcatgtcgatgagcaggtagtcgagctcgccccagttgatgtcgctgtagaactgggtgaggatgccgttgagcaccgggccacgccacaagaagggctgcgcctcgtcggacgtcagcatgttggtggagacgaccttgatgccagtcttggtgacagcgggcgcgagcatgccgctctcgtcaaccgacggcggctcgtggatgccaaacgaacgcgggatcgaggggccggtgatgtcgccgtcgaggatgccgacagaatggccgcgacgacgcagctcgcaggcgagcaacgcggtggtcagggatttgccgacaccgcctttgcccgatgcgatggcgataatcttgtcaatcttggtgccctcgtggacggcaagcttctgcggtgcctggcgcgaagcgcaccccgcatcgccgcaagccgagcaattggaattgcagctctcttctgccacggtatcctccactcttctcgaactaatctcggcgtggcttcccgcgcacttaagccggcgcttacttcagccactactaaatatatatgtaacgtccgcgattatctcacatggcgtcgaataagaaagtagcaggacaacaacgttcttcgcgagggtgcgcaaatcggctttgcgcagaaaccagacacgccaataaatgcagcttcggctctgggagaatgcgcagcattcgcaaggatgcccgacgccaacgacaaaggagccccatgttcgccatcgtcaccgacagtaccagctcgactcccaccgacgtgctcgaggggcagggcgtgcaggtcgtcccgctcaccatcagctttggcaacgagagctacgtcgagggcatcgacctgacgccaaagcagttctacgagaagatggccgcggggctcagaaacggtggcgacctgcccaagacctcctgccccgacccgagtgccttcgagcgggcgtttgcctgtgccctcgaggcgggagccgacggcgtgctgtgcatcacgctctcgtcggggctttcggggacgaacgcctttgccaacgtggcggcggcgaacgcagacgggcacgtcgaggtcatcgacagcaaggcggtcgccatggaggagagcttcctcatcgagcaggccatacgcatgcgcgacgcgggcacgacgctcgagcaggcggccgcgcacctgcgcgagatggcggatagcaccatcaccctgttcgcactcgacacgatggaaaacctcatcaagggagggcgcgtgggcaaggccacgggcatcgcggccggcgcgctcaagctcagggcgctcatctgcgtggagaagacggacggcgtggcgggcgccgtgggcaaggcccgcgggagcaagggcgcgctgaaaaagctcgtcgagctgacgcaggacttcatcgcgcagcacggcgattgcgaggtgcgcgtcatccatgcagacgccgcggaccgcgtcgtcgagctcgaagatgcgctggaagcggcgggaatcgcctgcaaccgcgagaaatcgggatggatcggcgccgtgatcggaacccatgcgggccgtggcagccgtctgctgccccaagagctacctggtctagcagatcctgccccgccagggctggcagctcgcgctggaaaggctagagctctccgcgctcgagcgcgtgcatgtcctctttggagatgttgtacttgcggcagtgatccttgtactccgtgcgcagctctgaccacctgcgcacgcgcgtgccgatgagcaggagcaacacgaacagcacgattgcgggaagcatggacgccaacatgttgtctgcggcgagcacgcctgtggccagcatgacgctgaacaccgtcgtgagcgcgaggccggcaacaaagatgattacgagcgcgatggtcgtggttctcaccatgtgctgcaggtcgatcgcctcgcgaacttccttgcggcgcttcttgcccgtgtgctgctgcgtcatacacatccccatatagcagtgtccatcgatttgttacgccgagtctagcagggagaacgccaaatggagccgcttcacaaaactccaaacgcactatcacacattattcataataggaaaggaggcgccaaggcgccccctctcgcgtgcggttggatgcgggcgaaaaggcttacgccttggcgctccacagaccatgcttgttgcagtactcgaatgcctcgaccggctcgacgccgtctgccaggacgaaggtcgcctggggcttgtcgcccggctgcaggcgcatcgtctgggtacccttggtggtgtgcagcataatgaactggatgtagtggtcctcttccatggggtgctcgacctcgccaaccgtgacggtgacgacgttgccctcgacggcgatgaccggaacgtgcttttcggttgcggcatcgacggtattggggacgagctcggtcatgggctggccgcagcagctgagcggagcgccggagtcgacgagcttcgtgacgatgttgccgcacttgtcgcaacggaagaacttgatatcgaccatgatgactctctttctctcgggaaatcctgagccgtattctatcgggtcgaagtggcaaaacggtgaacgctcggcaacaaaaggcacctgacggaaaaatcacttccgcaggccatcggcctccagatcacgcgggaacatgacgagcgccgccgcaaacgtgagcgccgcggtgatggcgccgccgaccatgacgggcacgaagcccaccgcgtcgatggcaacgccccagatgagcgcgcccaccccgacgccgaggtcgttcatgagcaagaactgcgcagatgccgcgccccaacgttcggataccgtgcacttgacgcacaccgagttgagaagcggaaacgagatgcccatggagagcccgaagaagagccccgcggcatagaagctccactccgatgcgccaaacgcgagcatgagatagaagaccacaccgcaggcgcagggcacggcgaacaacctgatgggcttgatggcgtcgatgaagcgcccgccgagcaggcgcacgagcgtcatcgtaatggccccgagcatgaagaagatgcccgggttgccgtagccgagctgcgtgccgtacagcgcaacgtagctggtggcgatgccggtggcaaacgtgttcaccagatgcggcagcgcccccgcccaggcggtcctgacgaacaggctcgaaagcaggccgcgctgcccttttggagcagacgcgggctgctcgcgcaggccgcgctcgcagcggaccctataggcagaggtctcgggcagcttttggggatgcgattcgtagcgcacggcaaacacgagcaccatgagcaccgccagaaccgcgctcacgcccaaaaacaggctctcgcggtagagcatggacgtgagcacgacgcccagcgtcggcccgatggccatgccgagcgactggccgagaccaaagtagccgatgccctcccccagcctgcgggcgggaagcacgtctgccgccgccgtcgaggaggcggtggtcacacagccaaacccgatcccctgcagagcacgaagcgccgcctgcggcgcgatgccgggcagcacgagcgcaccggcagtgcccgcgagcatgaaggcggcacccacgatgagcgggcgtctgcgcatgccgcggtcgatcacccggccgactacgatgcgggcgatccccgcgcacagcgagaactccaagatgagcacgccggaaaagccagtggaaccctcgtagtccttcacgtagatgggcgtgccgttgttgagcgcttggcacccgataaaggcgagcagcgagatgagaagcaagacgatgaagtcgggcgtccagagcctgggtttgtcggagggcacggcactacaccaccagatccacgggagtgatgtcgatgacgctcgcgagatcgtcaaacgacatctcgatctgcgtgccgatgcgcccgccggagaacagaatcgtgtcgaacaagatacaggtctcgtcgatgaaggtcgtgaagaacttcttcatgccgagcgggctgcatccgccgtgcacgtagccggtcaggtcgaacagctcgcgcgacttgaccatctcgatggacttctccccggctgccttcgcggccttcttcaagtcgagctcttcggcaaccggcaccatgaagacgtagtgctccttgctcttgccgatggtgacgagcgtcttgaagacgtgctcgggctcttcgcccagcatctgcgcaatctcgacgccggtcatggtgccgtcggcctcgaaaacgtgtatctggtggccgactcccgccgcatcgagtatgcgcatggcgttcgtcttggtctcctttttcctggacacgtcctactccccgtccgtctctggtcctgccgccgattcttccgtgggttcctccccatctgcgagatgggctccgggagccatgagcgcgcccgcgacttcctcgaaattatcggggtacgtgccctcgccctctgcccgaaacggcctgcagcgcttgccgccgagtttgtcgaacgtcacctcgagacgccattgcggcgcatcgagcacgaaggtcccctgcgccgggcggtacgtccgatgccagaaaaacagtccacgctcgacgagggcagacaggtacgcgcgtgcctgctgctcgtcgaggtctacctctgcaatctctgccaccctgtcgcgcacgcgcatctgggcgccgtccgcgcacctccgatacgccgcggagcgcggataagggaggtcggggcgcatgtcgatgaactcgatgtccgcgatgccctcgtatgtctggaactcagcagggacgccgtgctgctgcgcagcgccaaatggcaagcctggcatatcgtccgcctttcgttgtcgtgaaaacctgtacgcgcctagcgggcctgcgcccacgacgcgagctgtgcggcgccttgcgggttcaagacgcaaaacgcgagaagcgccgcgcacgcgaagacgccgagcaccggaagccaccggcgccgacgcgccttgcgcctgagaacacgcagctcggccccgtcgaccaggcgcacgccacaaggttctgcctgggcaatcgcgcccgccgtgaacctcgagtcggtgactacccacgcggcgcgcgtgccgtaatacgcctgcgccgcgaatgcctcctgcaccgccttgttgccaactggcttggcatacgacttggcctgcacggcgatggtcttgccgtgcttggtcagcagcaggtcggcgccatggtcgttgctcgcctgggtgcgttcgacgcggtagccgaggtggcggtacatgcgggcgagtttctcctcgaaatccacgcccctagacatgacacgccgccagggcgcaggccaagcattcccgcatcaggagagctcgtcggacatcgacgagtacaggcagccgttcgagccgtcgtcgagcttgaactcgcacgtgttgtcgacatggcagtcccccacgctcgacgcgcgcccgatccacgactgcatgacggctatcgcctgctcgagcgcctgggtgtcgacgacgtagtggacgtggcgcccatgacggaagcccttgacgaggcccgtcttcttgagcaccgtcatgtgctgggacacggcagactccgtgatgccgagcgtcaaggcgagcgaacgcgagcagtggtgcttgtccagcagcagctgcagaatcttgaaccgcatcggttccgcgatcaccttgagctgttcaccgagtttctcgtttgcctcgtccacgtccatctccttgcgggtacctctcttgcagcgaccattttagggccgcgcgcttacttagtgccgaagatcctatcgcccgcatcgcccaggccgggcgtgatgtaggcgtcttcggtcagcccctcgtcgagggcggcgacatagatgtccacgtccgggtgcgccttctggagcgccgcaacgccctccggggcggccacgaggttcatcatgcggatgtccgtgcacccgcgcttcttgaggttgtcgatggcgtcgacggcggagccgcccgtggcgagcatcggatcgaccacgatgatggtcgactcggtgacgtcttgcggcatcttgtagtagtactcgacgggctctttggtctgctcgtcacggtacatgccgatgtggccgacgcgcgcgaagggcatgagcgtgagcaaaccctcgaccatgccaaggcccgccctcaggatcgggacgatggtgaacttgtcctgtgcgaggacctggcactcggtcgtcttgatgggggtctcgaccgtctctgggcgcgtctcgagattgcgcgtcacctcgtagcccatgagcatcgaaatttcgttcaggagctggcggaactccggggacttcgtgtccttgtcgcgcatgatggcgagcttgtgggtgatcagcgggtggtcgagaacgtgcacttcactcatggttaccttctttcgaggctgcagactattggggcaattatagttgttcgccagacgcgatgcgtcttgagcttaaaaccgcgaaacgcttggtttatgatagggcagctgtcccaaaccagcacgtgcgcgccttatgcgaggcgccgcattttcgttaggagtgtttcatgcgcattttcggtctcggacttcccgagctcatcatcatcctcgtggtcatcctcctcatctttggccccggcctgttcaagaagctcaacaagcagctcaagaagacgggcgaagcagccaagaagggcatcgaggctggctctgaggctgccggcaagaaagtcgacctcgacaacgtctccaaagacgacatcctggacaaggtagagaacctgcaggacaagatggacgtgaagctcgacgagttcaattccgagatggacaaagtcgagtccgagtccaagcaagacgacaagcccgccgccaaataaggcgtcgcatcgagcatgagcgccagcacgcggacgtccgtctactcgagctacaaggcccgcttcttcaaactgcactggagcattgccgccaagagcctcctcgtggggcttttcggcggcattttggtgtctgcctaccgcattggcgtcgataagggcgtcggggcggcgcgcatgctctacggctttgcgagcaccgagccgctcgcgctggcgggcatcgtctgcgccgccgtactggcagggctcgttatctggaagctcatcacctgggagccgatggcatcgggctcgggcatcccccagacagagggcgtgctctcgctcgtcttgaagatgcgctggtggtcgattctcgtcgtgcgcttcctgggcgggctgctgggcgcgctgttcggactgtcgctcgggcgcgagggcccttgcgtgcagatcggcgcgtgcgcggggcaggccgtcaaggggatctccaggaaaggcgggctcgaggagagctgtcttaccacggcaggtgctgcagcgggcctttcggcggcgttttcagccccgctgtcgggcatcgtgttctcgctcgaggaggtgcaccgctcgttttcgccgtttctgctcatctccgccgcgaccggagccatgatgtcggcagcggtcgcgggcatcgtctttgggctgcatcccgtgctcttcttttccgagatcgcagaaatcgaactggtctcgtacgtgtggatgatcccgctagggttgatgtgcgggcttttgggcgccctgctcaaccgtatgctgctgggggcgcagaggctctgcgggcatctgcccggctgggcgggtcccgtcatcgcactgctcgtcgcgatccccgtcgggatgcttgtcccccaggttatgggcggaggcgccgacctcatcggatttgccgagaccgaacgcgcggggtttgcgacgcttctggcactgctcgtcatcaagctgctgttcacctgcacgagctttgggagcgggacccccggcggcatcttcatgcccacgttggcggtgggcgcgctgggtggggccgcgttttgcgcggcgctttccgcgctcgggctcgtggacagcgcgtatatggcggagtttgccgtctgcggcatggcgggcacgttcgccgggtgcgtgaagaccccgcttacgggcatcatgctcacggtggagatgaccggctcgctctcgttcatgctgcccgtggccatcacggcgtttaccgcgctgttcgtggcggacatgcttcgcacgaacccggtgtacaacagcctgctcgaccgctacatcgacaagcacggtaagcagtcctacgacgatgaccccgaccggctgttcgaggtggtcgtggaaaaggagagcttcttggacggcgcggaggtgagcgaggtcagctggccggagtcgtccgtgctcgtcagtgtgcacaaggcatggcgcacggtggtgccgcgctccacgacgcgcatccgctacgacgactacctgatcgcctcgcccgtcggcaaccgcgagcgcgcgaaaaacgacttgctcgcgctcgcgacgcggcagcccgcgcgcaaggctgtggccggaggcgagctggaggaagagacgctcgtgtagcggacgggtgcgagcgcccgcaggacgtgtgggatgtgtggcactgccacggttcccgcgcagggtggagaacatgcgggtggcccgccatggtgaagggccacaccgg

SEQ ID NO: 4023 - DNA, 16921 bp, Unknown
  16S sequences of unknown bacteria
acggaaccattcacgtcgaaagtatcgaaggtgtcggaacgagttttattttccggtttccgaaaatataaggctgcggtaatcttaaaagaattcagaaacagaaagaaggtttcgatggataaaacagaattgttcgaaaaaatgccggtacgaattgcggtaagaaagcagattgtaccggcaatcataagccaaatggtaacactcatatacaatttggcagacacgtatttcgtagggcttttgaacgatccggcacagactgcggcagtggcggtggcggcccctatttttttgatgctcacggcaatctcgaatcttttcggcgtgggcggtgcaagtacctttgcacaggcgctgggcagaaaagagaacagaacggcatcgcagatatcgtctatcgcattctggttcggtctgctggcatcggttctgtttgcatttgtcgtacttatttttatgagaccgattctgatggtcttcggagcaacaaccgaaatatatgaattggtgcgcagttacgtgatgtggacggtcatcatcggcgggccggggacggttctgaacatcctgctggcgaatctgatccgcggagagggcagtgcgggaatcgcctccttcggggtatccgccggaggattcttgaacatcctgctggatccgtttttcgtccttccgcagtttctgaacatgggggctgccggagccggacttgcaaccgcgatttcaaaccttgccacaaccttgttttttcttggttatgtttttagcagtaaaaataagacgctgctgtctgtttctccgtcgcatttgagatatacgcgggaacgtatcggactgattctctccatcggttttccgtctgcggtgcagtatgcgctgacggtggttgcggttgcagcgattacaaagtttgtgtccggctacgacacggcggcggtggcgggtttcggcatcacaaagaaaatcgatcagctgccgctgtatttttccatcggtgtagcaaacggcctgctgccgctattggcatacaactatgcggccggcaaccgagaacggcagaggcgggcgtttcaatacggctgcgggattgcagtgggtttttccgtactgtgtctgatcgtctatgaagcgtttgcgccgaatatcgccgccattttcatcaaggatgcggatacgatagactatgcagccgcattcttaagacgaatggtggtggccatgccgatggtggcgatcaattacccgatgattatacagttccaggcgatgggtaaaatcaaggagtcgctgatctgctccattctccggaaaggcgtactcgatattccgctgctgtttctgtttgaccgcatagctccgctgtatgggcttatgtgggttcagccggtggtggacatgatttccctgctggccgctgtgtatttctatacgaggattattggattccggcgttcatgctgattcggttagttcaggatttttccgtcaatgcttatggtgacaacctgccacggaatgaattttccgctgttttgaagcgctctttttgcggccatctcaagaccgccgcagcatggaacttccattctgacgatggtgacgctttgaatgttgttgctttgaataatcgccgtcagtttctcgctatagtccacctgatctaacttcggacagccgattaatgtcaccctgttccggataaaatcccgatggaagcttgcatacgcgtaagccgtgcaatcggcggcaatcagaaggttagcgccgtcgaaatacggtgcgttaatcggtgccagcttaatctgtaccggccagttcggacgctttggcatctgagcggctttcactgcttcttcgtcgtattccggtgcttcccgctcttcaaaggaaatggcgccggtaggacattccgggaggcaatcccccagaccgtcgcagaaatgctctcgtaccagttcggcttttccgtcaatcatatcaatggcaccctcgtgacaggcgacagcacaagcgccacagccattgcatttttctttatcaattcggataatctttcgtatcatttttagtacctccgttcatcgcatttcatgtttatttctgcttgaattatagtattataaatataacttgtatgtttgatttccaacaggaggaatacttttttggagaaatacttaccgattctaaaagtcagtcccttctttaaagggctttcagatagcgagattttgtccgtactgcactgtgtcaatgccgcaacgatttccaagaaacggaattcctatattctcagagcgggagattctacggaagtgatgggacttgtggtgtccggcagcgttctggtgattcaggaagatctgtggggtcatcggaacattctgtcaaagtgttgtgccggagatttttttgctgaaccctatgctgcaagcccggggtcgatactgaatatcagcgtgattgcggatgaggattgcgagattctttatctgaatgtgcagcggcttctggtttcctgtccggcggcctgcgaacatcatcagaaattaatccgaaatctggttcgcgtactggcaaataaactgctggttttcaacgataaaatcacgcatgtgggcaaacgcacgactcgggataagctgctgtcgtatctgtccgcagagtccgttcggcagtcatctttgagcttcgatattccttttaatcggcagcagctggcggattacctttgcatcgatcgtgcggcaatgtccgcggaattatcaaagctgcaaaaggaaggtctgataaaaacaaaccgaaatcactttgagttgaccgtacgcaatcaataagaataatgatttgaaagggtgattgagatgaaaagccggcagcggaaaccttgttccgccgccggcttttcagattgggagaattcgcgtgagctactctgcatttttgagggcttcatccattggaatccggcggattctgcggtattccagaagggatacaaccgtataggtgccgattccgatgaggaacattttcaggtagatcttcgggtcgatccacagagcaatccagccggaaacgctggagagcatcatctcccggaacaccacgcccatgattgctttctcaatgggcaggctcagcaggaggcagattacaaccacaatcgttgtggaccaaatgtacaatttgccgatttcaccgtttgtatagccgagtatctttgccatggaaatgggctgcgcattcttttcgatgatgattttggagagcaggtaaatcaagacgatgaaaataccgatggcaaatccgttaatcagattcatcatgccgcccatggatactgtcagctgccgggaaaccttggtcagtgcctccaggttcaccaccgagccgatatattttttgttgatgtcggtgattttcgaattggagaagtagccgctgaagtaatagctccccagatcgaaggtatcgttcagctgcttctgcggcataaacacgcagagggcaccgctgtaatcgtaaattccttttactttaaatgtgtatttcttcttatcgtacttttccttcagtgtgattttgtcccccggttccagctgaaatttttccgcatacgctccggaaatgtagacttcatcgctgttatcgaaatccacatcgatgtacttgctgtttttctcaattccgtacaaaagcacttcatcgatcttgtacttgctcggcagcgtgttcagggaataggcactgaatgtttccgcatcatcatttagcgtcttcgtccccaagtaatactgcaggagttccagcacattctccgaatcatcgccgctaaccgcactgaccggaacatccagcatgtattggtatttggcgagcatattgcttttaatctcctgctgataatgattgagggtggagggcaaaagcagcccgaaaaataaaagcaggttggcaaaaacgattccgacaaacagaacagcgtaattgctcatgttctgaaaaattacccgcagccggaaacggtgaaaaattcccagcttaggactgaggggaagcgctttgacttgctttttgccggataaatcccgacgcaggaatttcagcggcgacagccggagcttatgacacagtacgccgtaattaataaccagcataatcagaatcggcaccagggtggtcatccggaaggcatccccattccatattgtcacgtaggtcggaaggctatagcttccgtaatacatggaggcgcatacatttttcattaccgtgtatcccagaatattaccgacaattgcgccaatcagggtgacgataatcggaagtgccatgtaatgccggatgagttctttttttgtatatccggatgcccgaagcgttccgataacgcccgcttccttgcggatggtgttgctgatggtgactccaaagacaaacgccatgatgacgataatgatatagagaaggacgattatcattgcccggtcgctgtccatatcgttgccggtgaatttgatggcttggttctgatatcgcgggacaaaagcttccaggggaacctctttgccgagcgcttccatgaacttatcggcgagttttttctcctgccgctcgtccttctgcgctttatcgtagagccaggaatagctgtactgtaacttatcttgatttaaagtttcaaatgctttcggcgtcacaatggaaacgccgaatttcactgcgtcgaacatggagtcgttattgttctggaacaggcagctgtagtccgacagcgccaccagtccggttacggtccatctctttccgccgcttgtcagtacatcacccacggaaatatgattgttgtccgcatacatgcggtcgatggcgatttcatcgcttgttgccggaagtgttcctttcatcaggcagacccggttgacgtcttttctgttcttaaaaaaacgcatggtacttccgttgtccaccgcttgctcgatgaagaaattctcatacagggtcaccccgttggtcgtgatttctcttttctgggatgaggtgagttctttcttgacccggaaattcccgtcttcaatattgtacttctcaaaaccctcattgtaggcctgaatcatactgccgtctgccacgagaaatccggatacaaacccgatggtgctgatcattaaaatcaagaccaccagatattttccgaattccgctcggagctctctcggaatcctttttcttaaaggacttttcatgctaaaaatcctccttaccattccagttccgcggctgtaagcttatgttcattgcggtaattctttcgaatcattccgtcgcgaagcttcaccactcggtcggccatatccttaatggcatcgttgtgggtgaccatgataatcgtgtttccgtattttcgattgacggtttcgatgagcttcagaatttcttttgaagtgcggtaatccagtgcgccggtgggctcatcacaaagcaggatgtccggattcttcacgatggcccggccaatcgccgttcgctgctgctgtccccccgaaatttgattcggcagtttattgcggtgttcataaatctccagtgtccgcataagttcattcacatccagggaccgatcgctgaggtatgcgcccacctcgatgttttcacgcaccgtcaaattcggtatcaaattatacatctggaaaatataccccagatgctttcgccggtacagtgacagtttcttctccgtcatatcttccagctgttccccttcaataataatgctgccttcatccgcaacatcgattccaccgataatattgagaagggtggactttccggatccggacggacccagcagaacacagaattctcctttttcaatttccagattcaggcccttcagtacatccacccggctgtcaccggtgccaaaagattttcgaatcccctttatatctaaaaacatcgcactgctcctctccggcgagttaaatatatcaaactctctttatgataaatgttagacgcaactaatcaaaatgtcaatgcgtttttagccgtaaaagtatatttttttgtacacaaaatccgacgtatccgagatttccgtcatgcaatacgtcttgcaaaacaaaaggaatcgtggtataacatgactaacaaaagttagttagctctaaccacattgacacacgatgcggttagagcaatctaatattaattctttattaggaggaaaagattatggatttgaagaaaattggtttatttgccggtggtgtgttgttcggaacggccggaatcaaggcattgagcagcaaggatgcgaaaaaagcgtacactcagactacagcggctgcattgagagtgaaggacagcgtgatgaatacggtaaccgctgtgcgggagaatgcagatgacatctatgccggcgctcaggcgattaatgaacagcgtgccggagaagaatgctgcgctgtcattgaagatgcttcagaggaagcagaggaagatgcagaggaaacctgcgattccacagaggagccttgcgaagaagcgacggaagaatgctccgaaaaagcggagggaagcgaggcggagtaacgtatgaaatgtacgattttacatgatttgccgggacgtcttcgagtccatctgtgctgcggccgaatgacgctgcggcaggcggatgtgctggaatactatctgcgggctgtggatggtgtaaaatccgtcaaagtctatgaccgcacccgggatgcaattgtagtgtattctgcggagcgagaaaacgtcatccgtgcattggcgagatttgcctttgaaaaagcggaaaaggtggatctggttccggaacatacctcccgagaactcaaccgggagtttgaggatcagctggccggtaccgtcatgcgccggtgcatttcgaagatgtttttaccggttccgctgacatcggccatcgccgcggttcgctcggtgaagtacatcaaggccggactttccgcattgtggcatcgaaatctgtccgttgccgtattggacggcaccgcagttacagtatccatgctgagaggggattttgccaccgcaggttcagtgatgttcatgctccggctgggcgaaatcctggaagaatggactcacaaaaagtccgtggccgatctggcctccgccatgagcttaaatgtggataaggtttggctgcaaaaagaagatgcggaggtgctgaccgacatccgagaaatctgtcccggcgactgcatcgtggttcgtaccggcggcatgattccgttggacggtaaagtgctggaaggggaggccatggtgaaccagtcctctctcaccggagagtccatgccggttgctaagcgtccgggaagtcccgtgtatgccggaaccgttgtggaagaaggcagatgcgtcatcaccgtggagaaggcctccggaagcggccgttatgaccgggtggttcgcatgattgaagaatcggaaaaactgaaatccaccgccgaagataaagccgcccgaatggccgacaaattggttccctacacctttggcggtacggcactgacctatctggtaacgcgagatgtgaccaagatgctggcagtgctgatggtggatttttcctgtgccttgaagctggccattccgattgcagtgttatccgccatgcgggaaagcagcggacacaatatctccgtcaaaggcggacgctttctggaagtcgtggccgatgcggacaccatcgtattcgataagaccggaacgctgaccaatgcgacccctaccgtcgcacaagtggttccttttggcggacgagatgaagccgagatgctgcgtcttgccgcctgcctggaggagcactatccgcactccatggccaatgcggtggtggcagcggcaaaacagcgtggcttaacccatgaagagtatcattcgcaggtgcagtatgtggtggctcacggtatttccagcatggtcgaggacaaaaaggtcatcattggcagcgcgcactttgtctttgaggacgaaggctgccgcattccggaaggagaacagaaaaagtatgacgacctgccggctgcgtattcgcacctctatctctgcattgacggagaactggcggcggtcatctgtatttacgacccgcttcgcccggaagcacgggatgcagtccgagaactgcataactgcggctttactaacgtggttatgatgaccggcgataatcgccgcacggcggaatccattgcacaagaagtcggcgtagatgccgtgtatgccgaggttcttccggaagacaaggcggcctttattcgaagcgaaaaggagaagggccatacggttatcatggtgggtgatggggtcaacgactctccggcgctgtcggaagcagatgccggcattgcaatctccaccggagcggcgattgcccgtgagattgccgacatcaccattgcgtcggaggacctcttcgaactggtgacactccgcaagctcagcgttgccttgatgaatcgcattcacagaagttatcgcttcattgtgggctttaacctgtcgctgattgcactgggcgttggaggtgtgctgcagccgacaacttcggcactgctgcacaatggatctacgctgggcatcagcctaaagaatatgaccaatctgttagcagaaggtgaaaccgctcaaagtaaatagatgaacaggagagcagagggacaaaggattgtttctctgctctttccagctcttgcaggcagacggcattttcactcacatgatgcagctccagaaagagagtcaaaattggacgcttcgacgggcgtgaaactctttttacaaaaagacaataattgacagaaacctcttgactcgtaagtgactttcgggtttacattatactcagattagaggataatgcgtatgagaaggaggatgaattcatgcgtaccggcgaagttgagaagcttaccgcggttaaggaagcgaacatcaaattctacgagcgagagggattaataaatcctcggcgaaatgagaatgggtacagggatttttcggatgaggatgtgaagataattaaccggattaagacgcttcgaatgcttgacgttccgattccggagataaaaaaactctttgatggagatgttcagttaaaagcggttttggaggaacgcctgagtgagatgaaccttcaggcgaaggcattggataaccggatggagtcttgccggagaattataaaagaaggtatggagcttgccgacatttcaccggaggttctttcgggaaatcgagaggaatggttggaaaagttgcggcatatcgtcgatgaagatattgataaacgctttattctaaaaggcgttgcttttaccacagcgtttgccgtttgtgttaaatttacggtggtgctaatcatgggtgggttctcgcagcaagacacgcagcaagacacagtgttctgtttttttggcggaatgttggcgattttatgcggatttgtgtatatttttgcggaagccttgaccaagcaggatttcttgtatgcgtggggcaagaactggggagggtccggaatgggcggactggccaattcgtattcaattctcggcatcggggttggtttggccggaaccacgtggccgctctggggcggcctgctgattgcgtgcattgccctttctgcaattatccgaatggtgctgatgcatgtaataaaagaagcagagcgtcagaaatgaaagcgcggcaattgaatatgatgagaaagaggcgaccgggtcgtctctttttcttttcgtagaatgaggaataatgttacaaaatgcatcgaataacatcggaaaaatgttgcaggttctgccgtgaaatgaagaataatgttacaaaatacattgaaaagtgtcgaaaaaatgttacaatgctagtattgggaggtctgtgagatgctagaaaggaacattacggagaaattaatctcgtggaaaaatcaaaagaataagaaagcactttgcattattggtgcgaggcagattggaaagacaacgacaattcgagagtttgcgaaggaacaatatgaatattttgtcgaaattaactttatactggataaaggcgcggagaagatttttgaaggaaaactggatgcagatacgatcattgagaatctcacggcatttaagctgcaggaattaaagccgggaaagacactgattttcctggatgagattcaggaatgtccgaatgcgagatgcgccattaaatttcttgtggaagatggcagatttgattatatagaatccgggtcgctgttgggagttcggtacaaagaagtaccatcatatgccgtgggatttgaagaaatcgtatatatgtatccgatgaaccttaaggaatactttattgcgaatggcgtgcagaaatcgacgttcgagatattacaaacatgctatgaaaagcacgaaccggttccacagacgatacatgaaacgttgttgaagttgtttgcgacctatatcgttgtaggagggatgccggacgttgtgcagacctatgtgaactcacatgacatcggaaaagtaattcagctccagagaagcattttagaattatacagacaagatatctccaagtactcatctgatacagaaaagataaaaattaaagctatttttgatagcattgcttcacaattagacgataagaacaggagattttttctgaatcggattgataaaaatgcaagaatgaatcggtatgaggattcaatcctatggctgagtgatgcaggtgttgcacttccatcttataatgtgacagaacctcaacctccactgcagcttaatgtaaagagaaatttgttcaaattgtttatgggagatacaggtcttctgtgtgcttcttgtatggagaacatacagtttgaattattgcagggaaacatggacgtgaatatgggaagcattctggaaaatgtattcgcacagatgataaaggcgaatggattctctctgacatattttgaatcaaagaagtatggagaattggattttgtgattcagaatgggatgaaaatcgatcttcttgaaattaaatccggaaatgattatcaacggcacttggcactggataaagttgctgctgtaaggaattggaattttggaagaaagattgtattttgcaaaggaaatgtaacgaaagaatcagggattgaatatttcccatggtatatgagtatgttttatcagccggagaaagagccgaagaagtatatatacgaggttgatttatccggattacaacaatagaaataaagaggtctgcaatggaaaaaagtattatatcggaacttactgcatttatcaaacacgcgccaacggcatttcatgcggtggcggaattaaagaatctcctgaatcgagacgggttcgaagaactgcatgaatccgagcggtgggagatcgaacccggaaaaaaatattacgttacaagaaacaattccagcatcatcgcggtccgggtcggaaccgacctggatgattacagcttccatgtgaccgcatcccacagcgattctccctcttttaagctgaaagaaaatgcggaaatcgaaattgcaaagagatatacgatgctgaacaccgaagggtatggcggaatgatctgttccacctggttcgaccggcccctttcccttgcgggaaaagtaatggtaaaaaacggaaatcgattagagactcacttggtgaaagtggatcgagatcttctgatgattcccagcctggccattcatatggatcgaaaaatcaatgaaggccggcctctcaacaagcaggtggacatgctgcccttattatccggcagcgtgaagggaccgggtgccgttagaaaactgattgcggaagagctgggcgtgtcggaagagaacatctacgggatggatttgtttttatataaccgaatggaagcggtacgatggggccatgacgatgaattcatcggatgcccgagactggatgacttgcaatgtgcttttacctctatgaagggattcctgacggcagagaacgatcggaatatcaatgtctatgcctgcttcgacaacgaagaggtgggatcgggcacaaaacagggagcagcgtccacattcctttatgatgttctgtggcggatgaacaaggcgctgggcaaggacgaagaagaattccgccgtgccgtggcgagcagttttatgctgagctgcgataacgcccacgcagtacatccgaattatcggcagaagagcgatgaaacgaaccgcgtctacatgaacgagggcatcgtgatcaaatcccacgccgggcaaaaatacaccagcgatgcggtcagcgtggcgatttttaagatgatttgcgaaaaagcagaggtgccggtgcagtttttctccaatcggtcggacgaagcgggtggcagcactctgggcaacatagccatgtcccaggtgtccatgaataccgtggatatcggattgccgcagctggccatgcattcggcgtacgagacagcaggagtgaaggatatggagtatatggtaaaagcagtgacggaattctacgcatcgaatatccggacggattccgacggaaattatcggatttagcggcggattgattttcttgtttacaacgaataaacgtataaggtatactcactttgttatgttcattgatttattaagagatgggcttgcatattctatgtacaatttaatggaggcttagatgaaagcagaaagacgtgtaggtacggtttcccgtggaatccggtgtccgattttccgggaaggagataatctggcagaacaggtagtggagagtgttctggaggcagcggaatccgatgggttcgagattctggacagagatgtaatcggtattaccgaatctgtggttgccagatgtcagggaaactatgctagtgtgaacgacattgcagaagatgtaaagaacaagctgggtggagagaccatcggaatcgtatggccgattctttccagaaacagattctccatctgcctgaagggcatggcaatgggcgccaagaaggttgttgtaatgctcagctatccgtccgatgaagtgggaaatgcactgcttaccatcgatcaggtggtggatgcgggaatcaatccgtattccgatgtgctggatgagaagaaatacagagaactgttcggcgtgaacaagcatcagttcacaggcgtggattatgtggagttctacagtgaaattattcgggaagccggtgctgaggcggagattgttttctccaacaagccggagacgattctcgagtacacgaacaatgtcatcaattgcgacattcatacccgattcagaaccagaaataagctgaaggatctgggcgcaaatgtttacggcatggatgagattctgaatgcaccggtaaacggaagcggcttcaacgaagagtacggccttctgggaaccaacaaatccaccgacgacagcgtaaagctcttcccgagagattgtcagccttttgtggatgaggttcaggccatcatgaagaagaaaaccggaaagcaggtggaagttctggtatacggagacggcgctttcaaagatccggtgggcaaaatctgggaactggcggatccggtggtttcgccggcatatacggaaggcctgaacggaacaccgaatgagctgaagctgaagtatctggccgataacgaatactcgaatcttaccggagatgagctgaaagaagcgattaagcaggccatcagcgataagccggaggagagccttgtgggaaacatggcatcggaaggcaccacgccgagaagactcaccgatctgattggttcgctctgcgacttgacatcgggatccggagataagggaacaccggtaattcacattcagggatactttgataattacaccaccggaatgtaaatgaaaaaagagcggaacggaggtctggaggatgagtaacaggcgaaccttcttttattacgtaatcccctccgtgttgtccttcgcactctccggcatttacgccatcgtggacggtttttttgtgggcaattccatcggggatgcgggtctttccgcaatcaacatcgcgtatccgattactgcggtgctggttgccaccggaaccggaatcggcatgggcggtgctgtcaaatactccatactgaacgccggcgggcacgaagaaagggcgcgggattatgccgctgaagcgatatggatgatgctgttgttcagcgtgctccttaccggagctttctacgtgttgtcggaacggcttctttccgcgctgggggcatacggcgagctgctggtcctgggaaaagagtacacgacggtgatcatcctgggaaccgtgctgcaggtattcggcaccggaatggttccttttatgagaaattacggcggcgcgatgtgggccatgatcgctatgatatgcggttttgccaccaatgtgatattggattacatcctcgtatgggtgctgaaccggggaatgaccggtgcggcccttgcgacggtgatgggacagggagtcaccatggcggtggcgctggtttattgtgctgccaaaaagaaattgtttttgaagatgacgtccggcgatatgagggtacgagcgctgcaaatcgtgaaaatcgggctggcgcccttcggattgactctcgctccggaaatttcccttgtgattatcaatcgcttttccgcttcctacggtggacagcgggcaatcgcaacttatgcctgcatttcctatgtcatctgcattatctatcttctcttgcagggcgtaggcgacggcagccagcctcttatgagtcaattctacggagcggggcagggaaaaaatctgaaggaaatcaagaagctggcatacaaatcatcgatggccatcgcggtaatcggcgggattctgatgtacctgcttcgaggccaaatcggtgtgttattcggtttgtcaccggaagtcaatggggaaatcataatggtcatgccgatttttctgctttccctcccagccgatgccattacaagagtgacatcggcagctttctacgcaacggaaaaaagcgtgtggtcctatttgctgattctgtcggagccggtgtttacgttggtactggtactgattctgccgccgctgttcggaggtcagatcatgatctggtggagctccgttgcggcaaaaatcgttacggtagcggtgggcattgcgctgtctgtttttataagaacgcagaaatgacgtgttctttataatatacaaacaaattctccaaaagacttgattagaaattacgaaaccgttatacttttgtcagaaattgataaataaatatcaagttcaaaaggactatatttccggtactagaggaggaaaataaaatgcaaagatttactaacccaagagacatttatcatggcaaaggtgcactggaagtgctgaaacaatttgaaggaaagaaagcggttatctgtgtgggcggcggctccatgaagcgcttcggtttcctggataaagcaaagagttatctggaagaggccggaatggaagttcgtgtatttgaaggaatcgaaccggatccatccgttgagaccgtaatgaagggtgcggcatttatgcaggactttggtccggattggattgtagcaattggcggcggttctccaatcgatgcggcgaaagcaatgtggattaagtacgaatatccggaagtaacctttgaggatatgtgcgtggtattcggactgccaaagctgcgcaccaaggcaaaattctgtgcgatttcttccacatccggaacagcgacggaagttaccgcattctccatcatcacagactacgaaaagggaattaaatatccaatcgccgactttgagattactccggacgttgcaatcgtggatccggagctggcagagaccatgccgaagaagctggtagctcataccggaatggatgcgctgacccatgcgattgaagcttttgtatccacggttcacagcgatttcaccgatgcaccggcaatccgtgcaatcgaactgattcaggagaacctgatcgattcctataatgaagatatgaccgctcgcgacagcatgcacaacgcacagtgccttgccggcatcgcgttctcgtccggcctgctgggcatcgtacactccatggctcacaagaccggtgctgcatttgcggactacggttcccatatcatccacggtgcggctaatgcaatgtatctgccaaaggttatcgcttacaatgcgaagaatgaagaagctaagaagagatatgccgtaatcgcagactacatgcaccttggcggaaccaccgaagatgagaaggttgccgctctgattgaatacgttcgcggaatgaacgacaagctgaacatcccgcactgcattaagaactacggcggcgacagctatccgaccgaacagggcttcgtaccggaagacgtattcctggaaagactcccggaaatcgctgcaaacgcaattctggatgcctgcaccggttccaacccgagacagccgagccaggaagacatggaaaaactgctgaagtgctgctactacgacaccgaagtagatttctagagtgcatcgtacaattcaagacaacctaattcaaaatagtcactagaagaaaagaacctccgcattgcaatccaatgcggaggtccttttcttctattatcacttataaaacaaaatgcactcgtttcgggtcgaaccgatcttcctgagggcggacgtttcccggctttaccccgataatatcacagatgacaaatttttggggtcttcactttttcctcggggatggattttttgcacggggaatagacaggaat

SEQ ID NO: 4024 - DNA, 4442 bp, Unknown
  16S sequences of unknown bacteria
atgatgccgaccacggtcggactttcctcacgatacgcggagaaacgcaagcgcggcagcgcccggcagtgccgacacacctcggacagcctcataccgaaacggcataatccgcagccccgatccggagattagccgcgaaccggcataaatacaaacaaaagagaaggcagagcaaatttgctctgccttctctttaagcattcgcttaagcagtcgattcttatcgatccgttatttcggaaattttacctcacattcttccgatactccgccgacacgggcgaaaacggaaatcgcgtttccgaccgggcgggatgcgccgaaagtgctcccgtcggcggtcatgtccgccatccgttttctcccgtcggcaaagcatccggaagctttcttcttttatacctgaatttttatataccctatgacgaccgacgcgctcttccgagacggcgttttccgaatttcatgccgctcgccgaacacgttcttcgtcggcttttcgtgtgaacatcttaattgctttatgcttcataattgatacatgacttatgccgagattactccgtctccccggaacagcaggcagaacccggttcggctcgtattttcggctttcgtctctgataaatgccgtgcggcgctccgtcaacccgccgcaccgccgtcgggcaaagctttctcaggaatggagccagcttgccgtgagcgaagcaggaacgctcgagatcgccgtggactgtccgagatcgatatcccaatttgcaacgaccttctgaacgagttcgttgtcggcctcgtcgatcacgccgtcatggttgacatccgccgcaaggagagcggctccggtcagcgtcttctgaccgcttatgtgcttcaggattgcgatcgaatcggatatcttgatctctccgtcgccgtccacgtcgccgaacagcaccacgaattttgccttgtagcagcgtccgttggtgttgctgaaggttgcgaggaccataccggtcgcgctctttacggaggtatcggttatgagcgttccgtcagcggtgtacgggcggacggtatatccgctgattttctcggatgctatgagagaagaaagcgtggtctttgcgcccgtgattcccgtgagtacggaagtgctgtagtatacggctttcgcattgctgtaggtttcgcttacggagatcgagcctctttgagctgccaggcggaacgtcgtctgcgaaccgagcgcggtcgccgggacattgataaccataacatcaacactgacaccgaacatttcgcttccgtctacctcatatgctgtgtttcctacataaagtgtagcttttccgaagaatcccggataatacacatcgatgtttgtgcttctcgcatcagcattggcacggtatgtaatgtcagtcgtgaatgcgctgatatacagatcatattccccggtcgtagatccataagcggtgacctttacatagtatgtattcccctttacaaggctgtacttgattgcaaagttgatcccgtcgttgtcgtcgttgtacgcaagctgcgcacgggatgaattgtagagataacctctcgtatccgtcgttccctcggtgtaaatgaggaaaactccgcttttcgtagcggtaaacttgaagtaatccgcatctccggaagtttcaagttcgccgtatacgaagaaagaattcactgttcctctcggctcaagggtcgtcgcggtatcaaagcttgaaccgtaatcaccgctcgccgaagaataaaccgtgaacaccgagcagagcatcactgccgccagcaaaatgccgacaattctttttccgagtttcatttttccatttcctttctttgatttcttattttgcctgctgacgtttccattatacaccaaataccattatatgtcaataggttgttttaattttgaggaaaatattttaaaatatttcataacagtatattttttactgtaaatcggcaaaaaagccgccccgccgtaaacgccgccgagacttagccgaacacagcacccgagaaacgcgaacgcattcggatgcacgggaaatcccgcagagcatccgagcgcaccgaagcacatatccgccgcacaccgtgttcccgcacaccgcgcattttccaacgcacaccccatacccgcgtacagtccgcatgtgccaagccgccgtgcgcatcccgcacaatccgtatacccccgccgcacgttacctgccgtcttaacatcaaccgccacgctgttcgcactgtcccgaaatcgcacacatccgcccaagccggacacgccgcagatacccaacgaatcgcacacgtccgccgcacccgttttctctcctcggatattgcccccgcgtccgatacccctgccccgaccgccgtccgccggaatgcgaatccggaatattgacaagaaagcctctttgtgttataataccgaaagagcagacaaaagcgcccttgcccggcgttcgcacaataccgatgggatatggtgtaacggcaacacacgagactttgactctcgctttgcaggttcgagtcctgctatcccagccatgatgacaagtcaatttagatccgaacgacggaaagagccgtttggcaagccaaacggcgggaaaacgggagatttcgagagatttctcccgttttttcgaccctgaatttttacggaatttcatagatcccttttgcccttttcgatgctgtgtccggacccggactcacgaaaagggctttttgcgtcttcccaaaagcaatcggttctgcggcgagcttcggatttgcgaaggcggcggacagcgcaaaaagtcctgcgttcgaaaaagccccgggatgtaaagagatttcggatagatttgaaccggcgaatataacacagaatgataatttttctctccgaatgcgttatttgtttctcgacttttctgtggtataatgtagacgtcgacaaaagagcagccttgcagggcgataacacaaaaggaggaaaatatgaaactcacaataggtgaaaacatccgtaatttcagaaagaaaaacgatttgacgcaggaaacactcgccgatcgcctgggtgtaacttatcaatcggtcagccgttgggagaacggcattacctatcccgatctcgagctgattcccgccattgccgaggtgcttgccgtgactgtcgatgagctgctcgggatgccgcaaattgaaaaagaaaaacgtgcagtaaaaacatttgacgagcttcgccgggaatgcataaaacaggattatgatgccgataaaatcgtcgagcttctccgcgacatacgaagaaattatcttgacagcgactctgcatggcgtccgtggtgcgaggggaacggcagagcgttccgagaccctgcaatacttcccgaggtacgcttacttgcagaagcttaccttgaacgccaccccatgtttccgcacacaatcaaaacaatggcgcaaatcgaggatgaagagcatctggaagactttttggctaaatatacgacatcctttgattgttccgcacgcgcactgttgtttgacaggtatttccgactcggtgatacggaaaaattcgagccggagcggagatatcagttgtatcaggcattaaacacattactttgcccattctatcttctgaagcagggagaaagcggtgaatccggacaggcggcggataagtttatggaagccctgctttcgctgattcgctgtgataccgaggatgatcgccccgatatgtggacattggatcgtattgaactcgggcttaaatccgcggaacgatcaatatctgtcggcaatcagaccgaagctctttcgcagatagatactgtggtaaaactgttagaagatgcaatgatgattacggatgagattctgctgccgacttcatgctgtttccttgacggaatggaatggcgggcaaaagaggattggacgagccgtaataatgatcccgacagtccggaagagagatttatccatatagccacttatatgaatgacatgattacctgctattgcctgttccccggcatttattacgatatgctcaatgaaaattcgtttgaccccattcgtaatcacccggatttcgaaaagctttgtgagagagtaaaggcgcttacggtaacaaggtcaaaagaaaattaaaagctgcataagtccgcctgcaggcatggctcagcaagcccgaaagacagcggtcacttgcaagcccccgtttcaccgaggaagaaatgtaccatcgcggtgcatcaattcggctgacgcaaattcggcatctgaattgacctgcagacaaaaacctcccgcacaatagctgggtgtacgtaagacagtattgcgccgagatcgacgaagcggcacgaaaccgcatggagctgatcgtgcggtcactggcagagcaa

SEQ ID NO: 4025 - DNA, 32759 bp, Unknown
  16S sequences of unknown bacteria
ctacgccgcgccatcaatctgctgggcgcaggcgctcttgtcgcgcactttaacgaaagaaaccggaaaaacaggggctgaaaggcccttgctttttgctttttcagacgatttgtgttaaaaatggacaataaaaaagtctgaaaaccgtagttttcagacaaattgtggtggaggtgaggggaatcgaacccccgtccgaaagcatgcccacacagttttctccgagcgcatccatggttttgggattcccctcgccgcacgccccatggcgggcttgcggctacggtagcttcatttttacgggcagcgcctcaaagctttggcgtgctcgttccccgcttcaatgacaccgtttgcctgaccagcgggcggtcagggacggcgcgcggcattacgccgcgaaagcgtattcgctattgtcagttattgtttttccccgttgttgcgcggtacagggtccgcggctcgcttaccgtgcattcattcactcccgtcgaaaccagaacacccccatgtggccgcctattcatgctggcgaagagcacgttccatctcccgcttcgcatcgcgcgcggcggcggcgtcgcgcttgtcgtgcaggtgcttgccccggcacaggcccagctccagcttcatccgcccgtccttgaggtaaaccttcaggggaatcagcgtgtagccctggcgactcaccaggccgctgagcttgcggatctcgcttttatgcaggagcagctttttgggacgaagcgggtcgctgttggagaaactgccctgctcgtaggggctgatgtgcatgccttcggcaaacacttccgtcccacgtaccatggcaaagctctccttgagattcacccggccctgacgcatgctcttgacctcggtgcccttgaggcaaaggccgcattcgtaggtttcctccacgaagtaatcgtgatacgcctttttgttctgcgctacaggcttgatcccccgctggtgcggcatggcggaaacctcctttcccggtccttcccacaggatgctattatagcacggccgcgcatcaaagtgcaagcacttgccaatggcaaagcggtggcatataatgttcctattccgattggaaggggaggattccgtgccggacacgattcaaagcatggcgcggcgcgcgcgcgaagcgtctttttcgctggcgggagccagcctggaagcgcgcaaccaggcgctggaggcgattgcgcgggaaattgaaaaccatatggacaacctgctggccgtcaatgcggccgatgtggaagccgcaacggcggaaggactgagtgcaccgctgttgagccgactcaaactgacccgtgccaaatgcgccggcatggcggaaggactgcggtctctggccctgctgccggacccgctggggaaggtacagtatgccagggagctgtcgccaggcttgaacctgtaccgcgtaagctgtcccatcggagtggtgggcgtcatttttgaaagtcggccggacgcgctggtgcagattgcctcgctgtgccttaaaagcggaaacgccgtactcctcaagggtggccgtgaggccgcgcggaccaatgaggcgctggccgatctgattatcggggcagcccggcagtgtggcctgccggatggctggtgcgccctcttgcattcccgcgaggatgtgcaggaaatgctgcgtcagcatgaatggatagatctcatcatcccgcgcggcagcaacgcctttgtgcgctacatcatgcaaaacagcgaaattcctgtgctgggacatgccgaggggctgtgccacgtttatgtggacgacccctgcgacctcaacctggcgctgcgcgtgacggtggacagcaaggcccagaacctgtccgtatgcaacgcagcggaaaccctgctggtgaatgccggggtggcctccgcctttttgcctgaagtggcgcgcgcgctgcgtgaaaagggtattgttctgcgtggcgacgagcgcacgcgtgcgctgatcggctgtgacccggctacggaagaggactgggccacggagtatctggatgcaatcctctccatccgtgtggtggacagcctcgaggaggcggttgcacacatcaaccgctacggctcccaccatacagactgcatcatcaccacggaccgcgcgcacgccgaatttttcatgaaccgcgtggatagtgcggacgtgtttcttaactgctccacgcgctttgcggatggtttccgttatggtctgggcgctgaagtgggcatcgctacgggcaagctgcacgcgcgcggccccatggggatggagggcctgtgcacctacaaatatcgcctgtacggaagcggacagaccctgtcgcagctggatagcggggaaatcaagctcacgcaccgtccgattgaacccaagctcccctgattttcccctatgcaagaacaaaagcttcgcgcgccgggtgcatgccggcgcgcgtttatggtgccgcaggaaacccgggcgctgtcagcaagcgcctgatttatgctgcccgaccggctaacgacctttctccatgggacacgggcgcgcagaaaacaggtatcatacggcccgccgcttccggaggtttccgtttgatggaagcatgcccacccactttttcgtttgaaatccggtttgccgatccatcaccgatatggccccgtcacgctggtctgagtgcgccggaagaaacccatgtttgcccgtgaggaactgttggcggacaacgggcacgatgctgcaaaaaagaagcatttcttttgttttatcccttgtttcaccaaaggggaaatggtatgataattcggttgatgatcagaggaggggggccgtcatgcgtacgggattcgatcatgatctttatacgcggatgcaatcggataacattcgcagccgcattgccgcattcggcggtaagctctatctggagctgggcggaaagctgtttgacgattttcatgcatcgcgtgtgttgccgggtttcaagccggacagcaaggtatccatgctgctcaacctgaaggatcaggcggagctggtggtggccatcaatgccgatgacattgaaaaaagcaaggttcgcggcgacctgggcatctcctacgacgccgatgtactgcgtctgatcgatgcattccgcggcatcgggatgtatgtgggcagcgtggtgctgacccgctggcgcgaccagcattcagccgtcatgttcaaaaaccgtctggaaagcctgggcgtgcgtgtgttccgtcattttcccatcgagggatacccctacgacgtggagcagatcgtcagcgatcgcggcttcgggcgcaacgaatatgtcgaaaccacccgcccgctggtgctggtcaccgcgccggggccgggcagcggcaagatggccgtatgcctgagccagctataccaggagcaccagcgcggcgtgaaggcgggctacgccaagtttgaaacctttcccatctggaacctgccgctcaatcacccggtcaacatcgcctatgaggccgcaactgccgacctggacgatgtgaacatgattgatcctttccacctggaagcctacggggaaaccacggtgaactacaaccgcgatattgagattttcccggtgcttcgggctgtatttgaacgcatctatgggcaatcgccttacaaatcgcccacggatatgggcgtgaacatgattaaaaactgcatcaccgacgacgaagcctgccgggaggccgcccgtcaggagatcattcgccggtattatgccgcgcgttgcgggcaggtccaggggcgcaccgagcaggcggaggtggaccggctgaagatgatcgtgcaaaaagcgggcctgggaccggaggatcgccccgtaatcgccgcagcccggaagcgcgaggaggaaacggcggctcccgccctggccattgagctggcggacgggcgcatcgttaccggaaaaaccaccaacctgcttgggccctctgcggcgctgattctcaacgcgctcaaggtgctgggcgggatcgagaaaaaagatcagctgatttcgcccaccgtgatcgagcccattcagacgctcaagtgcgactatctgggcaatcggaatccacgcctgcacagcgacgaggtgctcgtggcgctgtccatctgcgctgccaccgacccaaaggcagcgctggccatgcgccagcttccgttgctggagggactggaggcgcattccacggtcattttgccgcaggtggacgaaggcatcttccgaaggctgaaggtcaaccttacctgcgatcccaagtatcaaagccataatctctaccacaagtaatcgaaaccgaacggatatgtggaaaggcggggtatcatggatcccaagtttatctttgtaaccggcggcgttgtctcctcgttgggcaagggcatcacggcggcgtccctggggcggctgctgaagtgccggggactgcgcgtatgcattcagaagtttgatccgtatatcaacgtcgatcccggcaccatgaacccctaccagcatggcgaggtgtttgtgaccgacgacggcgcggaaaccgatctggacctgggacattatgagcgctttatcgatgaaaacctcacccaggccagcaacgtgaccagcggacgcgtatacaaaaccgtgatcgaccgggagcgccggggcgaatacctgggcgccaccattcaggtgattccgcatatcaccaatgaaatcaagcgaaatatccttgctgtggcgcgcaccgagaatcccccggatgtgattatcaccgaaatcggtggaaccgtgggcgatatcgaaagcctgccttttctggaagccgtgcgccagatgcgcgccgaggcaggcaaagaaaactgcctctatcttcatgtgacgctggtgccatacctcaacgcggcaggcgagctgaaaaccaagccgtctcagcacagcgtgcgcgagctcagctccatcggcatttcgccggatattctggtgtgccgcgccgaccatgagctgccctacgatgtgcgcgccaaaatcgccatgttctgcaacctgccggtaaactgcgtgttccagaacctcaacgcccgcagcctctatgaagtaccgctcatgctgaaccgcgagggcctggatgagcaggtgatcaagatgctcggcttgccgcaggggcgctgcgatctgagcgagtggagcgacatggtggagcgtcagcttgccagcaccgacagcgtatgcgtggccctggtgggcaagtatgtggaattgcccgacgcctatctgagcgtggtagaggcccttacgcacggcggtatctaccatggcgttaaggtaaaaatcaagtgggtccctgcccaggacgtcacgcccgagaacgtgggagagatgcttgcgggcgcggacggcgtgctcgtaccaggcggctttggcgctcgcggactggaaggcaaaattgccgccattcagtacgcgcgggaaaacggcctgccgtttttggggctttgccttgggatgcagatggcggtggtggagtttgcccgccacgtgctggatttgcgtgacgcgcacaccagcgaggtggacccgcacactacctatcccgtgatcgacctgatggaggatcaggatctgggcaacctgggcggcaccatgcgcctgggcaaataccgctgcctgcttacccccggtacgatcagtgaaaaagcgtatggaaccagtgagatctgggagcggcaccgccaccgttatgagttcaacaacgcctatctggaccgctttacggcgggcgggatgatcgtcgcgggccgcaaccccgaccgcaatctggtggagatcgtcgagattcccacgcaccccttctttgtggcggttcagttccatccggagctcaagagccgtcccaaccgtcctcatccgctgttccgggaatttgtaggggcggtcctgcagcatcgcgacggacgcacagagtaaggcgactgtgggggagagcggctcatgcggcgttccattcggacaagctatacccataccattctggcgagttatctgggctatataacccaggccgtggtcaacaacttcgcaccgcttttgttccttacgttccgttctcagatggggctgaccctggagcagatcacgctgctgaccacgctgaacttttctatccagctgctggtggactttctgtcggtcaaggtggtggataggatcggctaccgtccatgtgtggtggcggcgcacctgttttcggcggcgggcctgtctgcccttgccttcctgccccagctgctgggcaacgcctatgcggggctgatgctggcggtgacgctctatgcgatgggcggcgggctcatcgaggtgctcgtcagtcccattgttgaggcctgccccacggacaaaaaagaagcggccatgagcctgctccactcgttctattgctggggccatgtggcggtcgtgctgttgtccaccgtgttttttcagttggccggtaccggccgctggcggaccctggcctgcctgtgggcgcttttgccgctggtcaatgcgctctatttttcccaggtccccatccgccgcgtggtggacccccagcgtcagctttccgtccgcagtctgtttgggcaaaagctgttctggctgcttctgctgatgatggtctgcgccggagcggcggagcagggcatgagccagtgggcgtccgtctttgcggaatccggtctcggggtgagcaaaacgatcggcgatttggccggcccctgcggctttgcgcttttgatgggcacctcgcgcgcactttacggaaaattcagcgaacgcttgccgctgcgcgcagcaatgacagccagcgccgtaatgtgcatcgtctgttacgccatagcgtcatggagcggctctcccgtgctcgcgctggtgggctgtgcactttgcgggttttcggtaggcatcttctggcccggcacattcagtacggcggtgcctgcgattccgggaggcgggacggcgatgttcgcgctgatggcgctggcaggtgactttgggtgtgcgggcggaccgaccgtgatcggatttgttgcgggggcggcgggcggcaggcttactgccggactggctgtggggatggtctttcccgcagcaatgctgtgcggcatgctgctcctctcaagggtggcctcgcggaaaaactgaatcctcatagaaaaacggcccccttccattttccaggaagggcggccgtttcattatgcatcttgtcagcccagcagcatccggtcactggcaagcgcctgtccgctggctttctcaaacagcgccagcaggtcctccaccgtcaggcgctgcttttcctctccgcttacgtccaccacaatgcgcccgtcgtacatcatgatgagccgatttccgtgggcgatggcgtcgcgcatgttgtgggtgatcatcagtgtggtcaggtggtcgcgttggatgatgcgctccgtggtttccagaaccttggcagcggtcttggggtccagggccgcggtgtgttcgtccagaagcaggagctttggcttttgcagcgtggccatgagcagcgtcaacgcctgtcgctgaccgccggaaagcagacccaccttggtggtcagccggtcctcaagccccaggcccagaatcttcagcagctcgcggtaccgatcgcgctcggcggctgtgattccggcacgcagcgtacggcgcttgccgcgccgcagcgccagggccagattttcctcgatctgcatggtagcggcggtgcccatcatggggtcttgaaatacgcgtccaatgaactgggctcgcttatgctccggcagacgggtgacgttcaccccgtcgatggaaatggtgcccgaatccaccagccaggtgcccgcgacggcgttgagcagcgtggatttgcccgcgccgtttccgccgatcacgctgacgaagtctccgtctctcagggtgagggaaacaccgtccagcgcggttttctcgttgacggtaccgggattgaaggtcttgcgcaggttgatgatttcaagcatggttcgcgcctcccttgctggcgggccggtccagatagcgtgccttccaatagggcacggccaggaacagcgccacgatcatggcggaaagcagcttcagatagttggaattgatgccgctgaggctgaccactgcctgaatgaccacatagtagatgatcgagccgatggctacggccaggagcttcagggcgaagttgcgaaagatctttccaaagatgacttctccgataatcacggcggccaggccaatgacgatggcgccgcgtcccatattgatgtccgcaaagctctggtactgcgaaagcagcgcgccggacagcgccaccagcccgttggagatcatcagccccagcaccttattcaagttcgtgttgatgccctgggcgcgggccatgttggcattcgcacccgtcgcgcgcagcgagcagcccagctccgtgccaaaaaaccagtacagtacggcgatgatcaccaacgtgaacagccctgccacaaagatggggtgctgccaaaagccgcgcgtccccttggtcacatcctgcagatagcgaagcgacaccagcagatcatatttgttgacgttcagcgactgattggccttcatgcccataatggccaggttgaccgaccacaggcccagctgcgtcagaatgcccgagaggatggccgggatgccgcacgccgtgtgcaaaagccccgtgaccagtccggcaagcataccggccaggatggcggccaggagcgatacccacacgttgcagccgcttgtaatcagcactacgcccacggcgcccccggtgcagaaggaaccgtccaccgtcaggtcggcaatgtccagcagcttataggtaatatagagcccaatggccataatgccccagaccagcccctgggaaatggcgccgggcagcgcgttgagaaaacttgacaatgtattttcccccaattccgcagcggggcggcccgccgccggtattttcaaaaaaaccgcaaaaacgggggaaaaggcaagccttttcccgccgtttttttcaagcgctccggcgcttattcaataggcgtatatccctccggcatggcgatgcccagcgcctcgccaatgacggtgttgaacttgggggtaaagttttcggcataggcgatgggcatggtggagatgtccgcttcacccgtgagaatctgagcagccatcttgccggtggttacgcccagatcatagtaactgatggacagggtggccacgccgcagcccttgcagatgccctcctcaccggcgatcacaggtacgccggcgggctggcagatattatccacaatgccggtgttggcggccacggtgttgtcagtgggcacgtagatcacatcgctggcatctgccgctgtctgcgtcaccgcagcagcatcattgctgtcggcgaaggggtagagagtgcaggtgtagcccatctcctccaggtatcccttgacggtatccacctgatactggctgttggcttcagccgagcagtagagcaggcccacgttcttggcgtcggggaagagggtttgcaccatggcggcctgctggtccagcggggccaggtcggaggtgccggagacgttgccgcccacggtgccggtaaagtcgtcaatgtccagcgctacgccatattcggtgacggaggtccccaggatgggaatgtccgccgtcgcggccacggccgcctgcagcgcagcggtggcgttggccagaatcaggtcaacatcagcggccacaaaggaattgacgatagtggagcaggtgttggaatcacctgcggcgttttgcacatcaaaggtgaccgcgtcgcccagctcctcggtcagcgcgtcaataaagccctgggtggcggcatccagcgcgtcgtgggtgaccagctggcacacgcccacggtataagtctgtccctcggccaggaccggtacggcgcagagcagcagcactgccgccatcagaatggaaacgagtttcttcataaaactacctccctacaatggtttccaatgattttcaaacgggcttggcccggttgaagcgttaagaaaagcagaaaacgcccctcattcccgccccgatggggggaaaacaaagggcgcgtcgtcgcgcggtaccacctctgcttcgccgaaagcagcttccggcctcatgagcaaccggcattgctcacagaatggtaacggatctgacccggcccggcctacttgcatggttcagccggacggctccggagcggaatccaccgcctttccgcaccccctcgcaccacccgggggctctcttaagcggagcatacgcggccacgtcactccatcgacgccttgtatgggatgcattgtatacctcaaacggccggcaagtcaagtgccaaaatgtgcggcgcaatttcaaaaaagccaaacagcaacagagacgttgttttttcaggatttcgggcactgtattttccgtgtttcccgattgttacaaaaaatagataacaagggtgtcatgtttttcttgtgcacttctcatgcgtgagggttgcactttgttgcggtaaagttatataatgcttgcaaccccaatcactgatacaggagggaaaaacgtatgaaaaagatcgtagccatcctactggcggttctgatgatgattccggcgttcgctttgggcgaaaacgtcgtcaagatcggcgtctttgagcccgcttccggcgacagcggtgcgggcggcaagcaggagatgctgggcatgcagtacgccaacagcgtgcagcccaccgttgagatcggaggagagacctacaccgtcgaactcgtctatgccgataacggctcttccgccgacaaggcgccttccgccgcgcagcagctggtcagcgagggcgtgagcgtggtgctgggctcctatggctccggcgtgtccatcgcgggctctcagtacttcgcggatgcgggcatccccgccatcggcgtgacctgcaccaacccgcaggtgacggccggcaacactcactacttccgcatctgcttcctggaccccttccagggcacggtgctggccaactacgcttacagcgagctgggtgccaagactgcctactgcctcgccgagctgggcaacgactacgacgtgggcctgtgccattacttccagcaggcgtttgaggcgctgggcggcacggtgatctccgataccttccccaccggcaacagcgatttcacttcctacctctccaacgcgaccgccatcggcgcggaagtgttcttctgcccggtgtccatcgcctactccacccagatcatcaaccaggctgcgggccagaacgtgacctatcccatcatgggcggcgacacgctggactccaacgtggtggtcgaggcggccaagggtaccaatgtcaagctctacatcagcaccttctatcaggagggcggctctcccgagtttgacgagggcttcaaggcctggctcaattccaacagcgaagccctgaccaacaacggcggcaacgacatgatcgcagctgtgtccgtcatgggctatgacgcctacttcgtagccctggaggccctcaaggctgccggcagcaccgacagcaaggccgttaacgaggcgctgtgggatgtgacgtatgacggtgtgtccggccatatcgccttcgacgagatcggcgacgcggcccgtgactccgcctacatcaagaccgccaacaccgaaaccggcgcctgggatttcgtgacggtgcagacggtggaataatccttcccgttcccagcccgaccaagaaagtccgttttcgcggcgggggcccgatgccccccgccgcgaatttcgtaaactgccagaagggggctcgttttccatgatgagcacggttttgccctatctgctctccggcgtgagcgtcggcgggcagtacgccctgatcgctatcggctacacgatggtgtacggcatcctgcgcctgatcaacttcgctcatggcgacgtattcatggtagcgggcattctgatggtctatatctctgccagcgggctcccgctgtatgtgtcgattccgcttgtgctggtccttaccgcatttatcggcttcctgatcgagcgcgtcgcctacaagcccctgcgctccgctccgcgcatgagcatcatgatttcggccatcggtgtcagctatacgctgcagaacctggttctctacatcaccggcggcctcaatcagtactatcccagcatccccttcatctccgaatccgtgaccatcggcacggcgaccaccaagatggtcaccatcatcaccccggtgctcacgctggtgctggttatcgcgctggtcatgctcatcaaccacaccaagatcggcatggccatgcgcgccgtgtccaaggactttgaaaccagtcagctcatgggcatcaagatcaaccgcgtgatttccgtcacgtttgtaatcggatcgttcctggcgggcgtggggtcgctgctctactttaccaactataccaccgtgattcagacctccggcgccatgccgggcctgaaggcgtttgtggcggcggtgttcggcggtatcggcagcgtacccggggccgtggtgggcgcgttcatcatcggcatctgcgagaacatcatcaaaggcctggacgtcattctcatcaaggccggcctgagcaagcagatgctggggctgaccaccttctccgacgcgtttaccttcgcgctgctcatcgtgattctgatcgtcaagccgacaggtttgtttggcgaaaagacgaccgacaaggtgtgaggtgagcatcatgaccaatgtacagagcgtttcccgtatcaaaaggccggaccgcggcgtgattctgaccgccgtgaccctggttctgatctatgcgctggtgtttgtactggagcagattctgccgcctacctccatgctctttacggtgctgaagaaaggcgcgacctacgcgctggtcgcggtgtcgatgaacctgctcaacggctttaccggcctgttttcgctgggccaggcgggcttcatgctcatcggggcctacacctatggcattctgaccattcctgtggcgcagcgcgcggccgtgtatcagtactatgacggcggcctgattcagtttgccatgccggtgattccggcgctcattctggcgggcatcgtggcggcgattttcgcctttttgatcggcctgccggtgcttcggctcaagagcgactatctggcgatcgccacgctgggcttcgcggagatcattcgctccatcttccagtgggataaactgggcgcggtcaccaacggttccaacatgttgcgcctgtttcccacgttcaatgatttcaacatcaaaaacgcggagggagaggtgacgctgtacctgtccatcttggtgccgttcctgatcgcgggcgtgtgcattgccctgattgtggcgctgattcactccagttacggccgggccttcatggccattcgcgacgatgaagtggccgccgaggccatgggcatcaacctggcgcggcacaagcagtttgccttctgcctgagcagcttctttgcgggcgttggcggcgcgatgctggccatgtaccagaacagcgtgcaggccaagagctttacctcggccatgacgtatgagattttgctcattgtggttatcggcggcatcggttcggtcacaggcagctgcattggctcgttcctgtttgtggcctgctcggaatggtggctgcgtttcctggaccagaagcagatgatcggcgagtgggaggtgccgctgctgcgcaacggtttccgtctggtggtattttcgctgattattatggtggtggttctcttcttccgtcagggcatcatgggctctcgggaactgccggatcttttccgtaaaaaagctgtggcaaaagccgccggaaagggggcggggaaatgaacattgtcgaaaccgtccttgagctggaaaatgtaaccatgcaattcggcggcgtagtggccgtggacagcttcagcatgcacgtagaccagggcgagaccgttgccctgatcggccccaacggtgcgggcaagaccaccgcgttcaatgtcatcaccggcgtgtacgcgcccaccaacggttgcgtcaagctgcgcggcaagatcattgcgcagggtcatcccaccggcaaaatgcgcaagctctacgccggcacgcacatcggcgagtacaaccacctcgtctccaacacgcctgataaaatcaccgagatgggcgtggcgcgcaccttccagaacatccgtctgttcaagaacatgtccgtgctggaaaacgtgctggtggcgcggcatatgcggctgaaggcggggctgtttgcctccatgctgcatgtgaaccagcaggaggagcggcgtatccgccaggaatcgctggatctgctggatatgctgggattgggcgacgtggcgcaggagaaggcctcctccctgccctacggcaagcagcgctacctggaaattgcgcgagcgctggcaaccgagccgcggctgcttttgctggatgaacccgccgccggcatgaacccgcaggaaaccgacgaactgagcgacttcatccgcaagatcaaagaggacttcaagctcaccgtgttcctgatcgagcatcacatgaacctggtgatggacatttccgaccgcatctatgtgctggacttcggcaagctgatttccgagggcacgccgcagcaggtgcaggacgatcccgccgtgattgcggcctatttgggggtggatgaggaatgagtctgctggaagtgaaggacctggtggtcagctacggcggtatcgaggcgctcaagggcatttccttcagcgtagacgagggccagatcgtcactttgatcggcgccaacggcgccggcaaatccaccacgcttcgcgccatcaccggcatcgttccggtcaaaagcggcacgatcctctataacggcgaggacatcaccggcatggatacgcaaaaggtggtggaacgcggcatcgcactggtgccggagggacggcgcgtgttcgccaacctcaccgtccttgaaaacctgaagatcggcgcgtatctgcgcaaggataccgctcagattcaaaaggatatcgagtacatttacaagctatttccgcgccttgaggagcgcagctggcagctggcaggtacgctttccggcggtgagcagcagatgctggccgtaggccgtgccatgatgacccgtccccgtctgattatgatggatgagccttcgctgggcctggcgccgctggtggtcaaggatatctttggcatcatcagccgcctgagcgcggatggcatcaccattttgctgatcgagcagaacgccaacgcggcgctgcacgcggcgcactacggctacgtgctggaaacaggcatgatgacgctctccggtacgggtgaggagctgctgagcagcaagagcatccaggaagcctatctgggcaggggaaaaaaggcaaaacatgcctaaaggaagcgcctttcgaacggcaaagaccgctcggaaggcgctctttttatgcgggtcaggcttcggctttcgcagcatggcgtcgtgcaaggcccgtcaaaagccacaggtaggccgccgttatcgccgccatggctggcacctccgaaagaaagcgcggtccatcgggaagcgcccgggccaccgccaacagaacgaccgcggcaagcagcgccctaagcgccacgcgcagcgcgccgggggcgcagcaccggcatgccacccagaggagaaagccgtaaaaacacacggcggacatggcctgggccgtgcttggagtcaggcgaagcagagcaaagccatgcgctccgggcagccgctccagcgccatacccagcagcagcgccgccgccagattgaccaccacaggcagccgtgcgctgtccctcgggagcgccagcgaggcgcccagcgtaaccagcgccatggagagcggcttcgccagccatccgcacacgtcccccaggcacggccataaccggcggagtgatggcaacgcgaaaaggtcgtgaaaatccgcggccagcagcagtgcggccacaatggccgcgagaatcagcacgcgccgtctcgtcatacgcgcatcctgtcctttctcactcacaggcggaatagtcacactttttccatccagcatgataccatattccgtctgctttgaacaggcaggaaaaagtccgaaagcgtagaatgtactatcacaaaccgccaagggaggaagacccatgtacaggacgggcgtttacttcggccgatttcttccgccgcaccgcggccatttgtaccagatgatcgaggcatccacccgctgtgaaaagctgctggtggtcatttccgacaacgccgatcagacccgcgagatctgccgccgggacggcattcccgaaatctcctaccgcctgcgcaagcagtggatttcccagcagattcaggacattacccacattggtgtacgggtattggacgagacggatattcctgtctatccacagggatgggaactgtggagccggcgcatgcgcgaagtggtgggggagcccatcgacgctttttttgtaggcgatatggaatacggcgaaacgctggccaggtatttccccgaatcaaaggtcgtgctgtttgacccagcccgtacgcgctatcccatctccgcaacagatatccgcagcgatatcctgggcaactgggattatatcctgggcgctgcgcgtcccttctttgccaaaaaggtgctcatcgccggcacggaaagctgcggaaagaccacgctgaccaagtgcctggccaagctgtacaatacttcctggtccgaggaagtagggcgctactatgcgcgcgactttttgggcaacgatgaaaccatctataccgacgtggatttcagccgcatcgcgcatatccagtacgagcaggactatcaggccctccgcacggccaacaaggtttgcttctttgacaccgacgccacctatacagactatttcagcgagctttacatgggtcattccaacgagcttgtggaaaagtacatcgacccggaccgctacgacctgctgatctatctgacgccggatgtgcgctgggtgcccgacggccagcgtctcaatggcgacgaggaccggcgcaggatgctcaacgaccgcctgtgggacatgtacgtggcgcacggttttaaagacaagatggtggtggtcagcggggactattcacagcggctggcgcatgccatccggctggtggacgagcttctgggcggctcgcagccatagggtaaggagattctggacaaattccctgccgcacgctcttgacattgcaccgggcactcactataatggttccagagcctcctgaagtgtgcgccagggccctgtttttacccacatttcataaaacggagtccgggttcggcgtcggatgtcatgcccccgttcttgtgaacgtcaggggacggcagaagtcgtcgacagggcaccggcctgcttaacatagcgggtgaaaaaacgggtacagcggcactttgggttctcaactgagctttctgccttatggagaaggctctttttcatgcaaccgcctcaaaggcgcgcatggccctatgcaagaagcgccgtgcatgctataatgttccatatgacagggcgaaggagggcaaagccgctatggattatcaaaccactgcgggaagccgcgacgtggccagggctgcgattgagctgagcatgacgcaaagccgtgatgaggaacaacgctggcggcagaccctgcgcgagcagggggttatcggcgccgctgcggattttggcggcgattttctgacggggattgtgcggattgtggaacgcgcggtggttgctgccaagcgcgagcaggtgattggcgattcccacctggaggaaggcggcgtggccggcgctgcgcgcgaggcactcaaccaggtcacccccaaggcgctgggcatgagtgtgggcggaaaaatcggcattgcccgctcgggagagcatgtggcggtggccgtgttttttaatatcggcctgggacatctggatgaggtgtgtatcggtctggggcatcgggccatttgaccgatgagcaaaaaaggggatggaaacatggttctgaccattgcgatggacggccctgtgggtgcgggcaaaagcagcgtggccgacgaggttgccagacggttgggtattctgcatctggatacgggagcgatgtatcgcgccttcgcgtggcaggcgctgaaggaaggcatcgatacgaacaacgcccaggcgctggcagcgcttgccgagcgcatgatgccggaggtccgctttgagaacggcgcgcaacgcacgctcattggcgggacggatgtgacggactgcatccgcacgccggaaatcagcatggccgcaagcgtggtttccaccgtgccgcaggtgcgccgggccatggtcgcccgccagcaggagctggcgcagcgtcaaagcatgctgcttgatggccgcgacatcggaacccgcgtgctccccaacgccaccctgaaaatctatctgactgcctcggccgaggtgcgggcgcgccgtcggtttgaggaactgaaggccaagggggacccctccacctacgagcaggtgctcgcggatgtgcgaagccgcgatgagcgtgacaccacgcgtgaaaccgatcccctccggcccgcggaggatgcgcaggtgctcgacagctcggacatgacgcgcgagcaggtggtggaagacgtgctgcggcgcgtggcgatccggcaggggcatgccctgcacgccgaggaacacctcacccccatgtacagagcggcgcggggggtggcggcttttctgctgacctgcctgtcgcctgtaacctatcaccatttggaacgcgcccagctggatgctccctatattctcatttccaaccacaactcgctgatggaccctctgcttgtggcctggaagtgctatcggtaccagatccgctttttggggaaaaaggagctggtgaaaaaccctctcttgcgctggctgttccacaagctgctgatgatcgatgtggaccgtcacaatatggatatggcggcgttgcgtgcctgcctgaaaacgctgcgcgaaggtcatccgctgggcgtgtttccggagggcacccgtcacaaggaaggcgtgatggagcacatggaaagcggaattgccatgatcgccctgcgcagcggcgccaggcttctccccgcgtacatcgcaggcaagccggggctgttcaggcgcacgcatgtctattatggggagccgtttagcgtcaaggatattgccgcgcgcggtatcaaccgggaggcatgccaggaggttctggagcgcattcaggacgtttatctggcactcgaacaggaagatgcggccgtgaagatgtaaataagttgaaatttttctatggatattgcgcagaggcaaactgcatacctgtttttcttttgcaccgccaaaaggaaaatgatggctgaaagccaatggctgcaagactttttgcactgtgagcgatttccttctcaagccgccggggcgaaagaattgtcaattattaattctttataaaaagaaggataattcacgccggacggcgaatagccatcatgatatgcttaggaggacggttttatgccggtttcggtggcacgccacgcgggcttctgcatgggagtcaaacgtgcggtggatggggcggtcaaggctgcgcaggaaggaaagcccatcgtttccttcggcgagctggcccacaacccggaagtcatccggcggctgaacgccatgggcatatcggtcatccacgaagtggaacaggcgcgcggcaaagtggtgcttatccgtagccatggcgtggctccggaaatcaccgaagcccttcgccgcgtggcggacgaggtgattgatctcacttgtccgtttgtcgcccgcctgcatgacgtggtggcgcgctacagctccggcggtctgccggtgattctggtggggcagagagatcatcccgaagtgatcggcaccatcggatacgggcgcggaacggtctacaccgtccacgaccccgaagaggcggccgcgctgccgcaaatggatcgcgcgctggccgtttcacagaccacgtttccccatgagcggtgggaggaaatcctgcctgtgctccatagccgggtaaaaaatctcaccgtgcaggacaccatctgcactgccacggcccttcggcagaatgaagcgcgcgagctggctgcgaaggtggacgccatgctggtggtgggcggcctgggcagcgccaatacccgcaagctgtacgaaacgtgcaagcgcatttgcgggcgtacccttttggtagagcgtgcggcggatataccgccgggctttgcgaatatccattcggaatccattggaattaccgccggcgcgagcacgccggattggtcacttaaggaggttgtcacacgcatgactgacaaggaacaattggaccggcaggtttccaccgaggaggcggaaaaggacagctttatggctgatgtggaagcgactctggtcaagatcaggcccgggcaaaccgtgaagggcaccgtggtgcagatcaccgacgacgaagtctgtgtcaacatcggtttcaagagcgacgggctgatcaagcgcgaagacctggtgacggaggatgtcaaactgggcgacgaaatcgaagtggaggtcgtcaaggtaaacgacggcgaaggcaacgttttgctgtcgcagcgcaacatcttgaaccgcaaggccttcgcggagcttgtccaaaagtacgaaaacaacgagtatgtcgagggtgtgggcaaggaagtcgtcaagggcggcctgatctgcacggtcaacggcattcgtgcgttcgtgcctgcgtcgcagctctccaaccgctacgtcgagaaaatcggcgacttcgtgggccagaccctcaagctcaaaatcattgagatggacgagcagaagcgccgtattgtggccagccgccgcgccgtggtgcgcgaggaagcggccgcaaagaaggccgaagcctgggcccgcctgaaggagggcgaggtcgtgcacggcatcgtgcgccgtctgaccgacttcggtgcgtttgtggatctgggcggcgtggatggcctgattcatgtgaccgacctgagctgggctcatgtcaagcatccttccgagattgtttctcccgatcaggaagtggatgtcaagattctcagcctggacccggagcgcgagcggatccagcttggcctgaagcagcttcagcccaagccctgggatatggctcctgaaaagtatccggccggcgctgtggtcacgggcaaggtggtccgcatcaccacgttcggtgctttcgtggagcttgagccgggcattgacggcctggtgcacatcagccagtgcgctcctacccgcatcaacaaggtggaggatgcggtcaacgtgggcgatgtagtcaatgtgaaggtgctgagcatcgatcccgaagccaagcgcatcagcctgagcatccgtgcgctgatggagcccgaacccgcccccgtggaggaagcgccccagcctgcttacgaggatgacggtgcagaggctgtgcccgtggacatcgaggccgtgggcaaggcgctggaagccgaggccgctcagaacgaaaccaacgaataataatcggacacgtttccccgcatgctgcggcatgcggggattttctatgcgcaaagtagtcggcctttttaggaaaaagattgcaaatcgttgcggcctgtgatataatacgataaactgatggtcaatcaggtctatctaagctgtccaaatccgcctgagtgaaaagaggttcttgtgcgctacgcgatgcttttgaagccgcatcctaatgttcgttatcgccaatccctgcaaaagctggcattgatcgaactggaatgcatccttgatgcttggcatgtaacctgtgaccggccaaggatagcgtatctggcgaacgagccttttttagtgtttgaagcgcaggagctgaacgaggcggcatgggcggcgatttcaagacattcggccatctgtttggctgcccagctacgggacgacggcgctttacagcccgttgcacgcgcatgcgctggctggctgccggaggatctgccccatgtgctcaaatacaaaggcaaaaccaatgcggacttcacgtacctgatgctgcactgcgccagggctgcgtctgcttttgcacatgagccgggacctttgcgcatattggaccccatgtgtggaaagggcacgacgttgatgtgcgctctgtgtgagaactgtgatgcggtcggtgtagataccgatgcaaaggctatccgggaggcggaaagctatctggagcggtcgctgaagctgcatcggatcaagcatcggcgtgcgtcgggtgcgctgacgctgccggatggcaaaagtgccagatggagtgaatacgcccttgcgccggacgcgcaaatcatgcgcacaagcccgctttcccttcgtatgatccatggggatgcagggggactggatgcgttgattcgcccacaaagctgccatttggcggtgtgcgacctgccttatggcgtacagcacgcaccccgggagaacggcgcgatgtcctccttgtcacggcttgttgagcgcgtcttgccggggtgcgtccgagcgctcaagcccggaggcgtggtggcgtttgcctttaatctcaacacactgcgccgtgcggaggttgccacgcatatggagagggcagggctggaggtcatgagcgagccgccgtatgatgatttttcccactgggtggaacaagcggtggaacgtgatgtggtgattgcgcgcaaagcgtgaccccggcagcctgccggagtagaccaggtttccgttaactgtttaaggagggttcatattgcagaacgcacagctgcaagcgatgacggttgttcagctgcgaaagcttgcgaaggaaaatggcgtgaaattgagcgctggaattgataaatccggaatcgttgcgcgcctgtcagaggcgctatccgacgagccgactgttcagccgtctccgccggaacaggcccaagcgctgcatgagccggctccggagcccgaacctgccccggaagcgccgaaagaggacgcaagccctgcccagacgcaggagaagttgcaagaagcgcctctttcggcggatgtaaccgcggtgtcccccggaagttcgggctttcgtccctggaacaacccgcaggagcagggcggcttccgtccggtctaccggcaggcatggcaagcgcgcagcacgtcgcgcgataccgcgcagacgcccgcttggcagcagcgtgctgcgggtacggtcaaccgctttggccctcctgcccgcacatcccccgccaggcaggcagaaccccaggagccgcaccggcagacaggggagtataccgcacgtccggctccccaggaaaacgtgcccaagctggatggataccgcctgggatatcgtgcggctccgcagcgtacatcctatcagaaccgcggagaatatgctgcgcgtgatcagggatacaatggctatcagcagcgtggtgggtatcagcaaagcggctaccggtcctctggcagcagctatggatatcagcagcagcgcggctatcagcctccttcctcggaggtccactacaacgacgcactgtaccgcatgccgcgcgacccgcaatttgcagcccaggctgaggaaggccagattcccgacctgttgaaagtgcaggaaagcgaaccggccagcggcattctggagattctgccggatggatatggctttttgcgcgggcatacgctattgcccggcaaaaaggatatctatgtttccatggcacagattcgccgcttcgggctgcgcacgggtgatctggtcgagggcacggcgcgctcccagcgtgacagcgataaatttgccgctttgctcaccgtggaccgcctcaacggccatgagcccgaagaaaacccggaccgtttatcctttgaccagctggtgccggtctatcccaaccggcgcattgtgctggaaagcgagcaggatcacgaggatatggccattcggctcgtggacctgattgctcccatcggatttggacagcgcgcgatgatcgtcgcgccgccggacagcggacggctgctgatgcttcgggacatctgtcgtgccatcaagcgcaacgatgccgacgcggaagtgctgatgctgctgattgacattgctccggaagaagtgacggaaatccgcgaatcggtggatgcggaagtattcgcctccaccttcgccgatgcgcccgatacgcagacccgcgtgagcgaaacgatgctggaacgcgccgagcggctggtggaggatggacggaatgtggtgattcttctggacagccttaccaagctgacgcgtgcctatcaggcggcgttggtgcagggagggcgtccgatgaccaacactgtcacccctgcggcactggttcgcccaaagcgctttttcggtgcggcacgcaatacccgcgacgccggaagcctgaccgtaatcgctactatcgcggtggaaaccggctcgcgtgtggatgatatcatctttgaggaattcaagggaacggcgaatatggagctgttcctgtgccgtcatcaggcgagcgatccggtctatcccatgattgacttgcagctcagcggcaccaaaaaggatgatatgctgctgagcgacgagcagaaggaaggcctgcgcgcgattcgtaaggtgctggcctccaccaccaatggggaagccgtggtacagttgatcgacatgatgcagaaaacccactgcaacgcagacctgctcaatcgtctgcaggattggattaccctgtgggaaaaaagcggctatctcaagcgctgaacacgatcggtttttccgtgcccccgccagactgttttggcggggtgttatttttacattcccaatgtgggtgtattcttgacgcaatgcggagaaaatgctattgtatgaagctgggtacaactttttatcccgaaggtaacgaggtgtaagaatgacggacaaccattccggcacaaggagccgcgtccggcgcagcgaacgggcgcagcatttctatgcggcgcggacgttttcggacgaagaaatcaaaaacgaggagcagccttccaatgcacaggccttggataagaaaagcgtctccgagtcttctgtaaccgcgccggcgggcgaagcctatttgcccaacgagccgcttgcatcccagaaagaagcgcaggaacgctatacgcccaatgacatttctgcaccggctgacgagacggccgcagaaggaaatgcgccccagattgatttttctgcctactatcgcagggacggttcggcgtcggagggcgacgggtcggagcctgcctttgcgccgcccatcaagctggatttttccggttatgacgatcatccctggaatgaagggccgcaacaggaaccgcaaagcaacgtctaccgtccgcgcgaggccacctgggccgataccgcccggcgtgatgtgcttgcggcggacggcgtgggctatcaggtgcaggaaagtgacgcgccgggcagacgcagacaccgccggaacatgctgcgaaacacgctgattgccctggttgcgcttgtggtgctggccggtggcgcctgggtgttccgcgagcccataacggaatggctgggtcaaagcggcatcgtatcccctgccagtgaagagccgtttaccgcggtggtcactccccagcccgtggaaggatatgacgcggcgcctgccgtggagattgcggacagcacgcgcacagccatcagcaagttaagcggaactgtgcagatggacatacgcgccgttacggatacccatgtgctcaccagcaatctgcggccggatggcacctatgatttttatctttttaccgcttccgaagggcggttgttatgctattttgatggcctgtcgaaggacggaatgtttcctcaggcattcggcggcttttatgtggatcaggagccctatctggtagcggccaacgggtctgctctgattcggctggatgatcttgaggctacctacggacgggagctgcgtctgcatcccatgtataacggttggtccatcattgaaggagtcgaggacggcagcaccaattacataagcgccgccggtcagatgctcagcaccctgtggtttgcccgttcatatcctttcacaggacagtataccgcggcctatgtggataccggaagcacggccgacagcgatcagcggtatctgctgtatgtgctgggtcaggatggcaccatgagccgctggttggcaacccccgacatggacgagctggtagcctcggcatgcggggtagcctatatggcttccggcgaaatataccttttgccggacacgtccgcaccgatggccacctcgccgcaggtggacgcctatctggattgcgacgcgctggtggtcaaggacgcacaaaccggcaaatatggcctgtttgtagcgggggaacagcattacgatttcatttacgatagcatacgcccggtcgaatgcgatattgagtgggccgaaaaggccatcagcggcccaggcggtacgttcaccgttcatgcggtgacgggagcaacctatcctcagccgctttcgcattcgtttgtgctggaaagagacggccagtccgaatacgtggcgctttccacccagtcgtgctatcccatccggttggaaggcgagttttgaaagggaggtatccgtcgatgaaacggtttgcggcgctgctgctggcgcttgtgatggcgctgggcacggcatcggcacaggaggccgaaatgaccgcgcagggcgtaacggtcgtgcgcaatcatgtggaggaaacggtgggccaccagcagattgtggtggattatcccacgttcagctgcgatgatccccagctggaactatacctgacggaccggatcacggcaccgattcaggccctgcagcgcagggggcagatggcgcaggatgacgcctatgccgatggcgggctggatgaaatccgcggaggctataatgtgtcactggattttccgggccttctgtccgtggaagccacggtgcgcaatcgtcccgtcgatgcgcaggaagctacgacggagtttttctatctgctggtagacctggacaagcagcaaagcgtgacggtgaatgatctgtttgaagaagacgccggcacggtgaacgcagcccttcaaagcgccgtatacgcccgtgtaagcgcacaggaagggcttgcgccaatcgcatcaaaggcggatgtgcctatgcccaaatcctattttgtggcgtctgccgcgtttcgcctgctctatgcccccggtcagcttgccgatgaggccgtcgtggtggacattccctggtcggagctggcgcttacgccctcctcgcttatgacgggagaggagactcagcctgctgcaaccgctacgccgcaagtgcagcagacggccacgccgctggccaccgttacgccggcgcctccggctacgctggaccccaacttctccctggcgccggtggttacgcccacgcccatgccgctggcgggtaatgatgccattaccgtagacgtgctcacccacggcctgtggaagccactggggaccgatggagaggtttactatcagtttaccgcggacggcaagctgcttaccgtcactgtgactgactacaccgtgaccgacggtgtacttgccagcggcgtgcttaacggcacgcttgacatcggcagcgacagcgcctttactctgcacggcgaaaacggcgagctgagcggctatgtgctcaaccgtcagggcgaaagtgtggctccggaggaatttgtgacgcctacgcccacgcccatacctacgcccacgccgagtccgaccccgacccccacacccacgccaacaccaacgccgacgcccagccccacgcctaccctgtcgccctatcagcaggcggttcagcaggcgcctaacctggcgaatctgagcgacgccgcatttgaaaaggcgcagacgctcccggtgtattgcgctccgggcgaagaaacctatcgcgtggatggcgcgcaggtagacacggacgaaaccgtgcttatctacggcgtggaaaacggatgggtactggttagctacaccattggcaacggttcgcgcgggcggatcggctatatcaagaataccacgctggctgatgcggaaaacgtggcgaagctgggcttctgctcggtgccgcttaccttggccagcgactgcgagggcacggacgatccgctctacggcaaggagccgctgacctcgcttcaggcaggcgacaaggtgacgctgctggctttcatgggtgatgaatgggcctatgtgcagattggcctggaggggcgcgtatgccgcctgttcatcccacgttctgcgctgtcgcaaaactgactgccatttgccagagaggaatgacgcacgtggaccgcaaggatgagatcattcagctgcagatggacgtgatcagccagatgacgcagagcaacctgcgccgcattgccgatgatctgtggagtagcggaacggccaaccctgcttccgccattccacagcctgaaacagccgcttccaaacgtgaggaggaacagccgcctcccgctgaaacgctggatgacctgcgccgggaactggaagggtacatcggccttgcagccgtcaagcgcgaggtggaaagcctgatcaatctggtatccgtgcagaaactgcgcaaggaaaacggccttcccgtgagcgagctgtcgttgcatatggtgttttcgggcaacccgggcaccggcaaaacgatgattgcccgtctagtggcgcgcgtgtaccgttgcctggggatcttgtccaaaggccaactggtggaagtagaccgtggcgggctggtggccggttatgtagggcaaacggccattaagaccggtgaggttcttcaaaaggcaatgggtggtgtgctctttatcgacgaggcctatacgctcaccgaccgtggtggcagcgattacgggcaggaagccgtcgataccttgctcaaggccatggaggatcatcgggaggacctggtggtgatcgtggccggctacactgagcccatggagcggttcatccattccaaccccggtctggaaagccgttttaaccgttttttgcattttccggattatacagcacaagagctggcagagatctttgaattgcgctgcaaaggcagcgggtacatactggcaaacgacgcaaggccctttcttctgcaacttctggaacaaggatgccgcgatcccagaggctttggcaatgcgcgcggcgtacgcaatttatttgaacgagcggtgagcgcacaggccaaccgtctggcccatgagccgcaggtaacccgcgagaccctcatgctgctaacggtcgatgatctctgcgcaggtgggggagaagcgcatgctccttccgaaaatgcataaatacagcctgtttcgcgtgcaagctttatcgcacgcgatttttaacggcaggaaaggaagaatatttctctggagactgccaggacgcatgtggtgggggccggaattggtggagaagaagcttcctccaaagcggtgagagaatcgagacggtgtgtatctcagaaaagcttggatcttcacggtgaatgtattcccattttccgttatgacggggcatataggaatggaggagattgtggtgcccccagttctctggctccaaagggggcgaaatcacagcagctgccggaaaaacggttggtgaacgaaagccgtgcccggagcgtttaaaggcaatgcctccaatacatgcaacaatctcgcttggaaagtccacggaaaaaccggtgccctgattcgcttaagtacccagaacgcgaaagcgggagtaattgtgcagggtggtgcatgagtacagcttcagctgcggaccggcgatgcagcgccggggtataaccgtcacatcgagctcaacaagccgcctggaatgctgccctgctcataaggtttggacttgttaggctttcaccccacagctgttgctgtccaaccctgccttcgcccccctgcagactttccacgtctgggttcccgcgctttcggatttgggcccacagcttcataatgcccagggcaggatctagccggtgcataccggaaatgagtttgtagtcctccttggcatgctggttggatggctgtggggcaggtgggactgggcaggccggggatgggcgggacccatcgtagcggccatgccagaagcagatgtaggattggattttgttgcccttacggcttgaccggcttatgtcgtatttctttgtgtgcgccatctgggaaagggtacttcatgtcctgtgttatactcctgatgagacctgggtgttttccttcgttattgctgaaaatcaacgatatcagacagggttgaagtctcctctttttttcctactctccaatatgtttgacaaatctgcaaaactgggaattagacattttttgtttaccttctttgattgcaagggacctcttaccccgcgcccgcatatcatggcgcagggggtggcacaatgagaaacggttatgacgaagcggcggccgtggcttacgccaggcgctgggccctgctgcgcaatccggcctatctggacttccacgggctgggcggggactgcacgaactttgtatcgcaatgcctgtacgcgggcgcgggcgtgatgaaccgcacgccggtgtatggctggtactacctgacgggcaacgaccgcaccgcgtcctggacgggggtggaatacctctaccgctttctgacggccaacaaagggccgggcccctacgcgcaggaggtcggccgggaggatgcggtccccggcgacgtggtgcagctgggggacgcaggcggctatacccacgccgccctgatcgtggatgtgcggcagggcgaatgctacgtagccgcccacacgctggattcgtggatgcggcccctgtccagctaccgccagcccgcgcgcaggtttctgcacattctgggcgtgcgcggcaggggataggacccgcttgcgcagcgcgtcggaaatatggtaagataacacgcccgcgcatgcggtatgcgccatccatacagggaaagaggaacgcgctttatgcggcgaaaaaacgaccttggcagagacccgatcggaccgctcgttttgagaattgcgctgcccagcatgctggcgcagtttgtgagcgtgctgtacagcattgtggaccgcatgtacatcggccatattcccggggtgggcgatctggcgctcgcgggcgtgggcgtatgcggcccggtggtgacgatgatcgggtcggccgcctcgctgatcggcgtgggcggcgcgccgctgatgagcatgcgcatgggcgagggggagacggagcaggcccgccgcattctggccaactgctttttgatgctctgcgtgctgtcggtggcgctgatggcgctgcttgcgcccatccgcgagcccatgctgatgctctttggcgcgagcgaagccacctttccctttgcgggggcgtatttttccgcgtatctgtgcggaacgcccttcgcgctgctctccacgggcatgtgccagttcatcatctgccagggatttgccgggcaggccatgctgtcggtggtgctgggcgcggtgatgaacattgtgctggaccccgtgttcatctatgtgctggacatgggcgtgacgggcgccgccgtggccacggtgatctcccaggtcggcagctgcgccttcgtgctggcgtttctgttcggctcaaagccacatgtgcgcatcaccttttcgggctatgatgtccgcgtgatgcgaagggtactgctcatcggctttaccccctttgccatcatcgccgtggacaacgtgatgatcatcgccatgaacgccgtgctcaagcgctatggcggcgcggcgcagggcgacatgctgctcacctgcgccaccatcgcgcagagcttcatgctggtggtcaccatgccgctgggcggcatcagcagcagcacgcaaaccatcctgagcttcaattatggcgcgcgcaggccggaccgcgtgcgggaggcgcaaaagcgcgtctttgtgctgtgcgccgtctatacgggcctgatgatgctggtcgcctggacgtgcggaggcgttttcgcgcgcctgttcaccacggacgccggcatggcggaccaggcggtgtgggccattcgcgtgtgcagcttggcgctgctgccgctgggcattcaatatgaaatcgtggacggctttaccgcgctgggacaggtgcgctactcgcttccgctgtccttctggcgaaagctggtctactttgtggcgctgtttgcgctgccggcggccttcggcgcgcgggcggcgttctttgccgagcccgtgtcggacgtgctgggcccggcggtttccatcgcggtctacctgctggccatccgccgcattctgcagcggcgggggagcggcccgcagggcgtatg

SEQ ID NO: 4026 - DNA, 3704 bp, Unknown
  16S sequences of unknown bacteria
attttccgccgcaaaaatcgccccgtccccgccgtacacgccgccggggacgattgaagtacgaaatggctttgtccctctctttggtttttcgacagtctgcgccgcgctttcctaggcgacgctcagcttgtcattcgaacaaattttgcctcctcccaagcgggcccggccctggcaatccggcgttgccagcgccgggccttttttgcctcaaagcccagcgcgcgcggggatttttagcttcgcttaatgttgggcgtgtatcatacaaagaaacagccccccgcggcagaagggagagaacgacgcgcatgcgcattttgctggcagaggacgaaaaatcgctggcccgggcgatcgtcaccatcctaaaaaagcacaattacgaggccgacgccgtgtacaacggcgaagacgcgctggcgtacttgcaatcgggcaattacgacgcggcgattttggacatcatgatgccgggcatgagcggcatcgacgcgctggtgcgggcgcgcgagagcggcgttacgctgcccattttgctgctgaccgcgaaatccgaggtgcgcgacaaggtcgccgggctggacagcggcgcgaacgactacatgaccaagcccttcaatccccaggaactgctggcgcgcatccgcgccatgacccgcagccccctggcgaaggagcccaaccgcctgagcatgggcaatgtttcgctggatctggcgagctacgagctttccacgcccgcgggcagtttccggctcaccagcaaggagttccagatgatggagatgctgctcgccaacccgcgtaggctgatccccacagagcgctttctggaaaagatctggggctacgacaccgaggcggaaatccacgtggtgtgggtgtacatctcctacctgcgcaagaagctggcctcgctgcaggcgaacgtgcagattcgcgtggcgcgcaacgcgggctattcgctggaggaaatcccatgattcgcaaattgcggcgcaaattcacgctggtgtgcatgctctcgctgctggtggtgctggtggtgattctgggcgtcgtcaacgcgctcaactaccgggaaatcgtcagcgacgcggatggcgtgctcgccatgctttccgccttcgccggggaagcgcctgccccgccggaggatttcatcgattggcaggacgcgggcgggcgctaccgttcccccgaactgccctatgaaatccgctttttctccgccctgctggacgaggatggcgcggtcgtttccaccaacatggagcggatcttcgccgtggacgaggccgccgtggccgactatgcgcgccaggcctatagcggcggcgcgtcttccggctttgtgcgcgattaccgctttgcccggcacgagggcgaagcgggcacggtgatcacctttctggattgcgggcgcatgctcacgggctttcgcagcgtgctggtgagcagcgtggtgatttccgcgctgggcatggccgccgtgttcgccctggtgtgggtgttctccggccgcgtgatccggcccatcgcggagagctatcaaaagcaaaagcgctttatcaccgacgcgggccacgagatcaaaacccccctcaccgtgatcgacgccgacctggagatcctgcgcatggagcagggcgaaaacgagtggctccaggacatccaggcgcagacggcccggctggccgccctcaccaacaacctgatcagcctctccaagatggaggaggaagacaaccgcgcgcccatgatcgaatttccgctttcggacgcgatccgcgaaaccgcggaatccttccaggcgctggccaaggcgcggggcaaggcgctgcgcgtgcgggtggagcccatgctctcctttgtgggcaacgaaaagaacctgtgccagcttacgggcattttgctggacaacgccatcaagtattcccccgcgggcgattccatcgagctcacgctggaaaagcagggcaaagccgtgcgcctcagcgtggagaacggcgtggaacacttctcccgggaagtgctggacaacatgttcgaccggttctaccgcgcggaccgttcccgctcctcggattcgggcggctatggcatcggcctttccatcgccaaggcgatcaccgccgcgcaccgggggaaaatcgccgccagcgaaaccggcggccgcctgaccgtggccgcggttttgcccatggagtgaagcgcgccgcgttccctatctgcgttcgcgctcgacggcgctatacgacatgtgcgccgggtcgaacagcaggcgcgtcaggcccgtgtgcccctgccgctgcttggccacgctgacggcggtgtattgcaagcccttttgcgcgtagtccgcgaagaagggccggtcgctagggtggacgctcgcgtcgcccgcctcttccgggcggtgcaaaaagaggatgctatccgcgtcctgctcgatctcgccggaagaacgcaactccgccatggtgggcattttgccctgcgcgctgcggcccacctgcgccagcgcgatcaccacgatgtgcaaatccagcgcgatcgccttgagcgccttgctcacgtggcccacgcgcaaatactcctcctggaacctttgcgccgtttgcagcagttgcaaatagtccaccaccagaacgtccagcgcgcccgccgccttcaaccgccgcgcctgggcgcgcagatcctccacggcgctcaccccgaacagaaactttagcggcagcgcgcccaactccgtcatggcatcgtcaaggcgcggccaatccccgtcgctgagccgccccgtgcgcagggccatgccgtccaggcccgagatccgcgccaacagccgctggccgtattgcacgtccgtcatctcgcgcgagcacacgcacacgctcgcgcccgcgcgcgccgcgtggagcgcgatgtgcatgccaaaggcggatttgcccacgcctggccgcgcgccgatcacggtcatttcgccggggaacatgccgcccgtgagggcgtccaactccgccacgcctgtcatgacgggtttttccaagccgtcatgcaggcgcgaaagaaaaacgaatgtgttgctcaacgccgcgtcgatgggcatggcggcgtgcgcgtccttctccagcccatccaacgactcgcgcgtgccatcggcgacgcccgcgacgttcttcgcccggtcgcaggcctgggcgcgcaaccggttcgccaaatccaccagttcccgccgccggcccaactcgcgcacgatgttcacatactcgtccacgttggctccgcaaggcgtgccctgcatgcactcgatggcgaaatccgccgccgccggcccatagacgcccgctctttcgctcaccgtgatgaaatcgatggcggcattctccgcgcgcaattcctgcaccgcgcgcagcacgaatcgcgcgttttccaggcaaaaatccgcttcgcgcagttcatccgcgcgcgaaagcgtctccggaaagcggatgaggatgccgagcaccgccttttccgcgctgtcgttcaccaaattgcaactgaccgcttccagatggttcacgcgcagcaccccgctttctcagcgcttgcatcgccgagccaggcggcaagcgcttttcgatagctcgcctcgctttctgcgcgctcccgcgcccgccgcgccgccgcttgggcgcggagccgttccaccgtct

SEQ ID NO: 4027 - DNA, 10814 bp, Unknown
  16S sequences of unknown bacteria
ggcggaagaaaatttcgattgcagccgccgcgccaaaaggaagacgtactgttattcgctctacgtttcggagagggaaatgcccttaaaggaacgctatgcggtgcgcctcgaatccgcgcccgagcttgcggcgttgcggagcgcggcgaaactctttgagggcgagcacgatttcaaagccttctgcgcctcgggctcctctgtcaggaccaccgtaaggacggtatatttcgtgcgggtggaggaatcggagagctggggaagcagggatttgaaaatttacgtctgcgggaacggatttttatataacatggtgaggacgatgacgggggaacttttagaactcgcctcgaaaaagcgggaagtacggagccttttcgaagcgtttgaaacgggaaaacgggaacttttgggtaaaacgatgcccgccaaggggctgacgctcgcgggcgtggagtacggggaggatatgtctttatgaaagcgaacgatcgatataatcccaacagcttcaacgcgctgcacgcgggtgtggcgtttctcgccttttgggcgatgaatctggggctttctttcctttttgcggcgtttgaaaaaaacggcgtccgcatcgaagacgagtacgcggagatgtgtctgcaactcattctgatggcggcgggactcgctctgatcgttttgatcatgagcctcgcagccaggtcgaacgcgataaacggaggcggctttctcgtccgaaagggctgcggaacggaaattttgatggctttcgttctcattttcggcttgtgctctctgcttatgccgcttgcgcagtctttcgcggaaaattgcgattttatccgtttccgcgggaacatacctcatgtagaccctcaggcgcaggtagatgccgaagacgtgagctattatccgcttctcctcatcgtgctgatgcccgttttgcctgcgatcttcgaggaacttttgttccgcggcgtcattttaaagggattgctgcaattcggaaaggtaccggctgtggtgctttccgccttgatgtttgcgctcgcgcacggctcgtacgaacagtttatctatcagttcatcgtggggatagtcgtcggattcctctttgtggaaacgaaaaatattttcgtttcgatggcggcgcattttgctaataattttttcgcttcctgggtattgggcatcaatctgctggcggcgggagagggagcaaacagcgccatttatcaggccgtcgtacaggtaatgttctatctcctcggcgccgtatgcatcgtggcggcgttcctctatttcggaaaacggatgctccatatgcgcagcttccccgagaacgcgcgcggggacgtcgccgcgtcctttgtggtcaacgatatggtgtcgggaacgctcgtcgagagaaaagcgtggtacgcctgcggcgcgttgctgcaaaaaaacgccgagccgaaattttttgtcaataaaaaaggcggcagaaattctctcaatcgcaaatcgggattcgttccggcggcgatcgtgctcgggatcggtcttgcgatagccgtaggcttcctcgtcctgtctttggtcgtcgtataatacgtacatagggtgtgtccttgaaattcccgaaagcctgtttaaatgtttcggcgtaaaggtacggggagagaggaccgttcttttgtgcggcgcttcccgaagggacctcccgccgcaggaggcgcgtttgaagttctttcgcgcttgcggcaaagagctttcgtcttttgttaaagtaagctttatcttgtcgggatctgtgcacgggacgcgaaaatcaagcttttggcggcttttggcaatacgccgctgcccgtctgtcgaatacgtccgcgtgttcgcccgactcgcgccccgccttacgcaaaaggactcttaaaatctttgatttttcgtttgtgcggcggcgccgcgcagaaatacatactcggggaaaacgggagaatttaaaaaatgaacggggaaaatcggagcgggtatgagaacgtccgagcgggcgttcgggagtaagaatggaaattttcgaaatttatcaagtggttttgtttttcggactcttgtttgcgaaaggcgcggtgagcggccgccttctgtatggctgtgttttcatcgggctggggatctggctggcgctgtttgtcttgcagggcgtaggtatgtataagatggcaaaaaacagaagcctgaaaaacaaatggctggcgttcgtgcccttcgtcaatatctggtatatgggaaagctggcggggacgtgcaacattttcggcagaaagatgaagagggcggggctttataccatgctcgcccaaattctggcggtggtggtctgcgcggcgacggtggcggcggaaatcatgctctacacgacgtatgcgggcgacatgattcagaacgaatcgggcagtccgcagtggccgggtctgacgggcttcgccatgtacgttcgcaactattactatttcagcgatttcatcgtttccatcgcccagctcgcttacaccatcatgctctttatcctcctgatggggctttacaagaaatactacgcgcggggatacctgctcatctcctggctggcgctgttagttcccgcttcgagatacgtcgcggtgttcgtgcttcggaataataaggcgatagactacgacgcctatatgcgcgccaagcgcgaggaatttatgcgccgtcaacagcagaatccttacgggaatccgtataaccgcggaccgtacaatcaaggaccttacagtcagaatccgtacgggggaaatccctacaatcaacctcctgacggctacggacagaataataacccgtcgggcgggcagaagagcgcgccggacgatcccttctccgaatttgcctccggttcctcgtcggggaaaaattcttccgacaaagggaactccgcggacggcacaggcggctcgaatccttcggggactagcggcggctcggggggcgacgacttgttcggctgagagaaagacgagtttttttaaacggaatagaccaaaagacggaaataagcgaaagttataatttccgtctttttttgtgcaaaaggggcgcgaaatgatttacagggcaaaattagtgtgatataataggattaattataaatttcagttataactgctgttagaaaaacgaaaggacggacgcgatcgggaggcggcgtttatgcttgaagaaaatatatctgctattgccactgcgccgggaaaaggcggagttgccatcgtccgcgtcagcggaaagagtccgctttccatcgcggaaaaaatgttctctcccgcgggaaaaaccgcggtttccgatttcgagccctatcgcctctatcccggcacgatcgactgcggcacgtttaccgattacgggctgtgcgtctatttcaaggccccttacagctatacgggcgaggacgtggtggagtttcagtgccacggcggggagagcatcgcgcgcgggattttgaagcgcaccttttctctcggcgcgaagagcgcgggaaagggggagttcaccaagcgcgcctttctcaacggcaagctctctctggcgtccgccgagggcattgccgacatgatcaacggcgagtcggaagccgaggtcaaagcgggctatctcttatacagcgaaaaactcacggagaaagtccgcgccctgcaagcggaattgaaagagcttctggcgggaatagacgcctccgtcgactatcccgaggaggatctcgaagagcgggaaattgacgaacttcgcaaagggcttgcgaagatacgcgccgaggtgtccgtcttggcggcggggtacgcgaagggaaaaaagataaaatcgggcgtcacggtcgccatttgcggcaagccgaacacgggcaaaagttcgcttttaaacagattgctcggctatgagaaagccatcgtgtccgaaattgcgggtacgacgcgggacgccgtggagggagtcgtcgagatcggggggacaaaattcaatctctacgacacggcgggcgtgcgcgagagcggcgacagaatagagtccatcggcatcgaaagagcggaaaacatcgtgcgcggcgcggacgtcgtcgtctttgtcgcggattcggcggcgggcacggacgaagaggacgcgcgggttttggaactcgcgcggggaaagccgctcgtcaagatcttcaataaaatcgatctgaccaaagacgaaacgcccacggacgcggacgtgctcacttccgccctcacgggggagggcattgccgaactgaaagagcttttatacgaaaagagtttcggtccgcgcggggaggacgccgcgtttctcgtcgaggagaggcattacgacgccctcaaacgcgcgggagaggcgttgacgcgcgcggtcgccgcctgcgggaaagagccgctcgatctcgtaggcatagacgtaaagacggcgtgggaaacgctgggggaaatcacgggagaaacggcttcggaagcgatcatcgaggagattttttccaaattttgcgtgggtaaataagaaaaagaatcgaaaaaacgagagaaaataacgagaaaaacgagagaaaagtttgtccgaggcgttttgaaagagggctttaaaacgttttacggcgggaaaaacagaggtgtagtatggcgaatctggaactttacagggtattttacacggtggcgaaatgcgggagtctgacgaaggcggcggaggaattgtacatttctcagcccgccgtttcgcagtcgataaaacaactggaaaatcagctgggaatttcccttttcaaccgcacgcatcgcggtatggagttgtcagcgcaggggggaaaactgatcttttccaaagtggaacaggcgcttttcctcttggaggaagcggaaagcatgatagagcaattgaacacctccgccacgggcaccattcgcatcggcgcttcggatacgattttcgaatatttcctcgcggataaaatcgtggaatatcacgagaaatttccgggcgtaaaaatagagctgttatccgatatttccccgcgcacgctggaaggactcaaaagcaacaagtgcgacatcggcttcgtcaatcttcccatcgcggtggatcccgacctcagcgtatacggcaactgtatgcgcctcaccgacatattcgtcaccaatgaaaagcacctcgaactgaccgagggcgtcgttcccctcgcaaaattgcaggaatatccgctcatcatgctggaaccgcacacgggcgcccgccgttcgctctccacctttttggaaacgatcggcatcgatttgaagcccgccatcgaaatcagcagctgggatctgatgaaacgcctcgtcatccgcggcatgggcgtcggctgcatcccccgggaatacgcgctgcaccgcctcgcggacaagtccatgtacgaaatcaagaccgaccccgcgctgcccgcgcgttccgtcggcatggtgctgcccaaaaacgcgcagattccctacgcgcttcgggcgtttatcgagctgtttaatctcgacgtttaaaaagaggatttatcggcgctttacggcgcggcaacgctttcgtcgggggaagagtcgggcaaagcgctttttcttcgccgagagccttttaaaggcgtttaaacgcattttggaaaataattccgaacgtatgtttgtataaaataggaaacattatggcgaaacccaattcgaatctgagaaatttttgtatcattgcgcatatcgaccacggcaaatcgacgctcgcggacaggctgatcgagcgcacggggcaggtgtccaaacgggatatggaggagcagctcctcgacagcatggacatcgagcgggagcgcggcatcacgatcaagctgactcccgtcaggatgtattatacggcgaaggacgggcaggaatacgagttcaacctcatcgacacgccgggacacgtggacttcacctatgaagtcagtcgttctttggcggcgtgcgagggggcgatcctcgtcgtggacgcgacgcagggggtggaggcgcagacgcttgccaatgtctatctcgccctcgaaaacaatctggaaatcctgcccgtcatcaataagatagaccttcccagcgcccgcgtggacgaggcgaagaaggaaatcgaggaagtcatcgggctggacgcgagctatgcgccctgcgtttccgccaaagagggcacgaatatcgacgaccttctggaagcgatcgccaaatatttccccgcgcccgacggcgatacggaaaagcctttgaaagcgttgattttcgacagctattacgataattacaagggcgtcatcctctttgtacggctcaaagacggcaaagtgaaggtgggggataaaatcaagacctttttgtccgacgtcgtgtacgacgtcacggaagtgggggcgttcgcgcccggactcctgcccaaggcggaactcgcggcgggcgaagtcggctatatcgccgcttccataaagtccattcaggacgtcgcggtgggcgacaccgtcacctttgcgctccgtcccgcgaaagagccgctgcccggatataaaaaggtgcagcccgtggtgttctgcggcatttatccgctcgacggcagccgcttcaacgatttgaaggacgccattctcaaattgcagctcaacgacgcttcgctcatcttcgagccggatacttccgtcgctttgggcttcggtttccgctgcggctttttgggacttttgcacatggagatcattcaggagcgcatcgagcgggagttcaatctcgacatcatcaccactgcgccgtcggtgagctatctcgtgcacaagacggacggcagcgagttttatgtggacaatccctcccatctgcccgatccttcggatatcgagtatatggaggagcctatcgtcaaagcggaaatttataccccgcccgactatatgggacccgtcatggatttgtgcaaggaaaaacggggggtgttcaagaacatgacctatctcgacgagcggcgggtgaagctggaatatacgctgcccttaaacgagatcgtctacgactttttcgacggactcaaatcccgcacgaagggatacgcgagtttcgattacgagatcgcggggtacgagcgttccaaactcgtgaagctggatattttgttgaacggagagatctgcgacgccctctctaccatcgttttcgaggacagagcttacgagcggggcagaacgctctgcgagaatctcaaagaggccatcccccgtcagatgttcgaggtgcccgtgcaggcggcgatcggcggcaagatcatcgcgcgcgaaacggtgaaggcgatgcgcaaagacgtgctcgccaagtgctacggcggcgacgtcacgagaaagcgcaagctcctcgaaaagcagaaagagggcaaaaaacgtatgcggcaggtgggcagcgtcgaggttccgtccgaagtgttcatggagattctcaaaacaaataaagattaacgcccttaaaaatggcgggggcaggtatgcggctatggcattatacggtcgtgccgcggcgggaaacgaagggaaggggagcgcggaaacgctcggaaaatacggaggaaaaatatgtcggagtcctttttcgggcgcgtatacgcgcttttgaaacaggtgccgtacggaaaagtggttacgtacgggcagatagcgatgatgctgggcgccccgcgcatggcgaggcaggtgggatacgccctgcacgtcaatcccgagcccggcgtgattccctgtcaccgcgttctcaatcgcttcggcgcgcttgcgcccgcgttcgcgttcggcggcagggaaattcaggcggctatgttgcaggcggagggaatcgaggtgaaagaagatttcaccgtggatctgtccgtctatcagtgggacggcgaaggcgccgccgtcgggttttgagcgacggaaaacggcgcgaagaggcgttcgcgttaaaagtgagatgcggcgcgcaaaaaggcggtaaaagagccgagaaacattcaaggagaaattatggcggggatttatatacacgttcccttttgcagacacaagtgcagttattgcgattttgtgtcctttcccgataagatcgaatacgcggaagcgtatatggcgtgtctttacaaagaattgaaaatgcgcggcgaggaacttaaagactataccttcgactccgtatatttcggcggcggaacgccctcgtacattccgcccaaactcatcctcggcgcgatgaatcaggtgaaaaagtgttttcatctcgcgaaaaacgcggaagtgacgctggaactcaatccgggcaccatcggcgaaaataaggtgaagacctatcgggaggcgggcatcaaccgctattcgatcggtttgcagaccgccgtagacgaacagctggaagatttggggcgcattcacaacgcgcgggattacgtctatgcgaccaaactcctgcaaggggagaatttcagcaccgacgtcatgctggggttaaaaaatcagaccgcggacgacgttaaaaaaacgatagaacttgcggcggcctgcggctccaaacatatctccatgtacgcgttgaccgtggaggacggcacgcctatctataccgattatctcaacggcgaactgcccgactccgacgaggtggcggatctgtacgatttcggaagaaaactcctgaaagaaaaggggtacgagcgctatgagatttcgaattttgcccttcccggatacgagagccggcacaacctcaactattggcgccgcggggagtatatcggcgtcggcgtcgcggctagttcgttcatgaaaggaaagcgctttacgaatacgtttgatctcgacgaatacatgaagtgcctgatttccggctttttccccgccgtcacctgcgaggaggtatcggaagcggacgccaaattcgaatttatcatgctcgcgcttcgtacaagatacggcgtttctctcgcggaatacgaaaaacgtttcggaaaaacgttcggggaagatttccccgtggctctgcaaaagagttcgcgctatttagagcgggaggaagatagtatccgcatcaaagaggagtatctgtacgtgcagaactccgttttaatgccctttatggaagagccgcgcctcagagagtaaaggcggttagaatagggcagggttgcgacgaataaaaaaatcgcgggaagtcgggaagaaaacggaagaaaaaatgaagaagaaaacggaagaaaaaatgaaatggaaagaggcgtaagggaagaaagggcctgaaagaagcacaaggcgggaaaaggctcggaaaaagagttttgaaaagagtgaaaatagacgcgagaggaatgagaacgcgtggaaagaaaagcggggaagagaaggggcaattctctaaaaaagacgaacaaaggcgcagggcgtgagaaaacggaggggacaggaaaggagaaaaggggcgtaaaagcgaggggcggcgcgggaaagaggaacgaacgcgcgggaaaagcataccttcgggaagagaaaaacgctcggaaggcgtgcggaaaaacgcagggacggaacgactcgcctctgcgattgcgggcggaagaaaaaataaattacgcggcgaagaaagcgctcgttcggggggacccgacgggcgtttttgctcctcaaaaaatcggaggtgaaaattttgggaaaaagaggaagggaaaaaaatccgaaaatcgaaaaaataaaatcccgattccgttgcaaaacattttcggatatgctataatgccgataacgacggggcgaaaaatgtccgtttctcaaaagaaaagcgtgcaacacaaaggaggaaaaaatatgatttgtttaaatcaggcggggggggggtacaaaaatgattacctctaatctgcttttttgcatcaagcattcttatgaggacgattatttcggagtggaacattctcatccctgctatgagatcgtttattactgcgagggggaaggcgccgtatcgttcagcaagaaggagtatcatttcaaaaaggacacttttatggtctgcgcgcccgacgtgaagcacatcgaacacggtaaaaagggaacggaagttctgtatatcggattcgaactgtacggcgacatcgcgctttcggagggattgttcgacgaggcggattacggcatacaggagtatctcgaaaagatttattacgaaaccaagcactggacgaccttttcctatcagctgatcaatctgttctgcacgatcattgccgtcaaactcgtcaatcgcagcgaaatcagcaaggaagtcgccgtcaatcataatttcgacaatatcgtgggctacatttccgcgaattaccgggagaatatcaacgtcagaaagttggcgcagatggcgggatacagctacgaccactttcggaaaatgtttgtcaaaaaattcgaaatgacagtcaacgattttattctgcaaaagcgcatcgacgcggcgaacgatatgctcaaatcgaacaaatatctcatcaaggaaatcgcggcggactgcggcttttcctcggtggcgcagttctgcacgaaatacagggaagtgatgggcattacgcccaagcaaatgcagcaaaagagagcggaggacgcccgggatatagaaaaagataaattttcctgaccgaaaaacagaattttccccgggcttttttcgggaaaatcgcatagacaaacgtacctcaaacaaaggcccgccgacaaaaagaggcgg

SEQ ID NO: 4028 - DNA, 32759 bp, Unknown
  16S sequences of unknown bacteria
agcgaggagccgatggtctatgaacttccggaaacagatcgtttttgtaaggttctttccatggatccggtcacattttttaataaggccaatgagttgatggtaaagaattctccggcagctgcagataaggaaatgcttgaaaaaatagcagctgtgaatataggtcctggtatggaatttgacacttctgttcttaccggtgatgttgcagaaaactggaagacaatgctgacagaaattcagctaaagcttatcaaagagggccagaaattctcaaaaaagcttggtcagtgggactattttggtgaaccgatcggagatttcaatacagaatatgcttatcgtgcactggtagctcttgcagggcttggtgccaatacagttgaagttgcgctgtatccaaagatagagcaggatgcggatggaaatcctctgacaggagaaaaatcatatcttctccatttcgaaagctatccgcaggttcttgaagggggcttctggtcagtgactgcatacggggacgatgatttcctgattgataatccgatggatcgttactgtatcaataaccgttccggtttgaaaatgaacgatgacggttctgtagatgtgattctgtctgaggatgcaccggaggatacgacaaactggctgcctgtaggtgatggcttccatctgtttatgcgcatttatacgcctgatatggatgcactggagacgtggacggcaccgaccattacagagattgatccctaaatataattattttccgggtgatcataacagagggaggtatgactggaaagctacaattcgtgctgtttttagacgtttcgtgccaaagcgattgaaaaagaatgtgttttttttataatgaagccagaaagaagaagttacatgaaacaggtacctgaaaaatctctgggacaaaaggttttaagggtacataagaagaaaaaggaggaggaacgtgtaccggatcagtgtattggcggagaacaggcagaacggattaatctatgcggatcggatcagaagattttgcatggaaaatggtatttttcctgaagtgaaagtgtatgaaaatcaggaacatttttttgaacagatccagatgctggagccaaccagtgtgctgcttgcgctgcatggagtaaacggactgaatgcagcagaacatcttcgttcactatatccacggtgtgggatgatctggtgcagcgaccttgatttttctcttcatgcgtttcgccttcgtgcagaatatttttttatggaacctgtggaagatgaaaaatttcgagagggactttcgatctggctggagcgcagaaaaaagtccggttgtatcagctggggtaaaaacagcagacgggaatagctgtcttaatctaagaaaggaagaaaaatatgaagaagagaaatgaagtgatagcaacaatacttttttgtgcgattatgacggtaggaagcttttcagtaaatgcggagcaggaaagtcagaatgaagcaggcagcagtgtgtcagtactgccggtaaagaagcttacagagaaatctgttgatgaaaatccatttatggcgaagggtgatacgaatatacatcatgactgttataatacggatacgacagatgcggtactgccgcttggtatttatccggagattaatgtttcctatgaaaaagtaaatgccaatgcatctccggccatcttttttgattcgtgcggtcatgcggttgtaccgttgcttggaggacttgcaattcgggatatcaacgcagaggaaacgcagacaatcggttacttttcaccgacacagcatgatggaggcggctatatgattcagagctcgtattcatttgtagatgagagcgaccgcctcgtgtgtccgacaagcaataatcatatcctgattctgaaaacaatggatgaagaaggaaatgtattgccggaatttgaaaaagtgcttgatattgatatcaaagcggcagcagaggaaaagcttggtaaaacacttgatcagaatcttttgtcggtagtgttcgattatgatggaaatctttggtttgcgacgggaggctttcgaatctatccggagcggaagcagcagggagcggtcggttatatttcgcacactgcaattcaggcaattttgaacggcgaggatacggagctgtcagatgcagtatttgtatatgaactggagccgggcgaaggggctgaaaatggtattgcgtcagcgaaggaaggggcaattattctgaccaatcagaattgttatctgttccgggctgaggatgcggtgaaaaaggtatgggaaacaccgtatgaaagtgcaggggcgaaagacagtaaggagggtgatgagacgactggcggaggacttgcctggggcggtggatgttccccgtctctgacaaagaatctggtaatgtttacggataaccaggaaacggtaaatctgatcgcattggatataaaaactggtgagaaggtggcaagtcttcctgtgctcgatgaacttccggacggaatgcaggtatcggttgagaattcagcaattgtatatgatgatggagagggtacggtcagcacgatcgtctgcaactggtttggagcaggaagcgcggatctggcaaaagcggacagcgattcttcaattcagagttatgcaaatatttatgacatcggctggctgagccaggggaacagtcggattatgccgggggttgagcgcgtagacacgattaaaacagagagtggatacgagatgaagagtatctggtgcagagaggatctgagggatacgtcgatcctgaagctgtctacggcaaccggttatatttatggatacgtacaggatctcaataccggcatgtggcagtatattatactggatttcgaaaccggtgagaccgtattttccatggatgtggcgaacaaatacggctataacaatatggcaatcggcatgtatgcaggaaacagcggcaatgcgctttattgtccgacgggatatctggaagtactaagacttcaggatcgatttgtttatttgccggaaatgccgtaccgagaggtggatctggaccaggcagagcggacagtacttgaacaggaaagatttgagacagacggcggagtcggagctgtggcaggatggcttgatacggttacagttgaaaatgtgcatccgaatacaacggtagcactgcgcatgaatggactctccggggatgcggatacactgaagttatatgcatacggtgcagatggagcattgcaggaggtgccgctggaactctggcatattcaggaagaggatggaaatataccggaaacactgaatgaagagacactgtatgaagtacatgtgaccgtggaagacgggggcagctttgatttgtgtgatgaggaaaagaaaatcacaatttcggcagttaccggaagataaaaggtgatctgcatcctgcgttcatgagcaagtagcgaagcggattgcgaaaaatacgattacgaatattacagaacccctgggattattttgtggtaatcccaggggttttatctgtttaaccgagtcgagcaagtcccctgcttcaattgcgaatatccgctttgatcacttcagttatgtggaatacagtcagctttgccatgtgtctgcaagcaaaagcaaagtgcagatgccgctgtgctttaccctccgatatactccgtgatcacaccggtcagtgccggcaggatctgctgctttctggaaagcaagttttcctggaaggaatggtcctcgccatcggcatttggaaaggcctctgcggcccacggtgcacggctgccgccggcatagatgacggagccgttttccagaatgctcgtaaagacaagaacagcaagatcgatccgctttttctgggcgaagcggtcaagtgcagccaggatctctcttgagtcggtgcgcgtttcttttgcagagggtacgattacctgggagatggagagcttgcaggagaaaagatcgtagatcttaagatcctgattgagcatatcactgaagctcattttttcctggtttgaggtaatgcggaacatttcttctgcaaaggtatcaatgtcgaggtctgcgatcgccgccagaatgttggctgtctgaatatcgcggtccgtggtggtcggcgaatggaaatccatggtgtcggataagacggcaccaagcagaagtccggcaagcgccggaggaatcgggatctggttttcccgaaagatggtggcaacaattgtggcggtagagccgacaatctcatttcggaaggccaccggctgtgaggttgagaaatcgttgatccgatggtgatcgatgacctcaagcaccgttgatttttcaattgcatttacggactgtgaaaattcattgtggtcgacgaggatcagccttcgcttcggggcgttcatgatgtggtatctggaaacatagccgaaaagctgctcgttctgatcgacgaccgggtaggcccggtaacggtttcgcagcatttttacgccgacgtcctctgccagctcattggtgtggaagaggacggggctttttttcatgattcgctcgacagacggcgcaaagtagagataacgcgaggtattcatcgtgccgtgtccggagcggatgatcgggcagtgatgtttttttgcctcttcgatgacggactcatcgacagtatccgcccatacgatgatcagcattccggcaccgagttgaatgcattttttctgtgccatcgtatctgcgccgacgatgacgatccgtttctcgacctcatagcggtcgaggtgttccggataagtcatggcgataatgctgactttgccgttgactgcgacgttcggatcgtcatagacaatacttccgttgattgtttttcggatgttttcaaccggtgtgtgcgccagaatgtcgatggacctggcggtatcatcgagtccgacaacggagaaatcggattttgtgaccatgccgagcacgtggttccgggcatcgacgacgccgcagtaggcgaggttttccttctgcatgatctgcatggtttcgtagatcgtggtttccggcgtgatggagacaggtggatccatggtgatctccgaaagcttcatccgcgcgtcctgtaatagctgcggcggttcaaaaccgaaacggttcagcagataggaggtttcggcgttcagggcgccgagccggcatggagtggccggttgtcccatcgatcgtttgaaaaatgcaaaagcgatagccgaggcaatcgaatccgtatccggatgccggtggccggtgatgtagagtggttctttttttttcatattcatgagttaacggcctttcaaatctaaggaaatgtttatgctcttatgtgaaatatggctgactcgggccaaagcagatattcgcaatccgcttcgctgttcggttaaatcgcatcaagtgcctgtgcgatatctgcgatcaggtcttccttgtcttccaggccgagactgatacggatcagctctgccggaacaccggcttcgatcaactgctcatcggtcatctgacgatgggtggaggtggccggatttaagcagcaggttcttgcgtcggctacgtgagtttcaattgcgccgagctttaagtgctgcatgaagatggaggcagcttcacgtccgcccttcaggccaaaggatacgacgccgcagccgccgtttggcagatatttctgtgctctttcataatatttgctggacggaagtccggaataattgacgtaagctaccttcggatgcgactccagaaattccgcaactgcctgtccgttttccacgtgctttggcatgcgcacatgaagagattccaggccgagattcagaatgaaggcattctgcggtgactgcatacagccaagatcgcgcatcagctgagaggtgcattttgtgatgaaagccccctcttttccgaatttctctgcgtaggtgatgccgtggtagctttcatccggtgtgcacagccccggatatttgtcggcatgcgccatccagtcgaagcgtccgctgtccacaatcgccccgccgagtgcggcgccgtggccgtccatgtattttgtggtcgagtgggtgatgatatctgcaccccattcaaacgggcggcagttgaccggtgtggggaaggtattatcgaccataagcggaacgccatgagcgtgagccacctttgcgaacagctcgatatcgagcacggtgagtgccgggttggcgatggtctcaccaaacatcagctttgtgtttggacggaaggctgcgtttaattcttcttccgtggcatccggggagacaaaagtagcggtgatgcccattttcgccagtgtgacagcgatcagattgaaggtgcctccatagatggaggaagaggctacgatgtgatcgccgcattcacagatattgaacattgcgaggaagtttgcggcctggccggatgaggtgagcatagcagcagctccgccctccatcgctgcgatcttggctgcaacaaggtcattcgtcgggttctgaagcctggagtaaaaataaccggaagcttcaaggtcgaatagttttcccatgtcctcgctggtgctgtatttgaatgtggtggactgcacgatcgggatctggcgcggttcgccgttgcccggagtatagccggcctgtacacattttgttcccattttataattctgataattttccataataatctccttattcatacaagtgtggaataactgcacgtctgactgcatttttggccctgcctgtaaagctttgataccaaacgtatcgtaacattttcaatgcgctttgtaaagcagaggatcgatgatctggctgcagaaaagaggatggatacaggggcttgcaaaagggggaagcagggcatataatcagcacacaatgataaaatcagagtaactgttcagagccaacctccaaaatgctacgcatttcgtcggtgtggcgtatccgccaaataaaatttcaaaaacaggcttaaaaatgcaaacattttccgcctgttttatgaaattttgcttggctctgaacagttacaaatcagaaaaaatggagagaaaacgattatgaagccaacgactgtagagggaagagaaaaaacaaaaaacggaattacaaggctgatcttttcggcactgtgtattttgctggaagtcgtgttcattcttttgctgtttacgcggctgaaccgctatgcagaagcgatcaatctgtttacgcgggtgctcggcctgagcattattttacatatgtatgcatcgccgatgacagcaacgatgaagatgccctggatccttctgatcctggtatttccggtgatggggcttactctgtatcttatggtcgggttaaacggcggcaccgggaaaatgcggaaacgctatgaggagatcgatgctcagctgctgccattgcttccggaaaatgaaaaagagagggaagcactggagaagaaaatcccgcgtgctgcaaatatttcagtctatattaagaaaaatgcatggtatccggtgtaccagaatacggacgtgacgtattacgatgaggcggagaaggggctggaagcacagctggaggatctttcaaaggcgcagcgctttatttttatggaataccatgcgatcgaggatgccgaagcgtggcagcggatccagcgtgtgctggaggagcgggcgagggccggagtcgaggtgcgcgtattttacgatgatatgggttcgatctggtttatcaatacggatttcatcaaaaggatggaagcgcttggcatccgctgccgcgttttcaatccgcttgcaccgggcctgaatttctttttgaacaatcgggatcaccgcaaaatcacggtgattgacggaagggttgggtttaccggcggttacaatctcgcaaacgaatactttaatctgacccatccgtatgggcagtggaaagataccggcatccggctgaaaggcgatgcagtccgttcgcttacggtgacatttctggaaatgtggaatgcagtcagcgataaagaccagaacgatgcggatttcacaaagtttctgcctgattatccgtacgcagcgaagcagacgggatttatccagccgtatgcggacagtccgatcgatcatgagcatgtcggggaagaggtgtatatcagtatggcgaataaagcggagaaatactgctggtttatgacgccatatctgatcattacggatgagatggcacatgcactttcgctggcggcaaagcgcggtgtggatgtccggattatcacgcctggcattccggataaaaagatggtctacagtgtgacgcgttccttctatcacgggctggtgcgcaacggtgtgaaaatctatgagtggacgcccggcttctgtcatgcgaagatgagtgttgcagatgactgtatggcgacctgcggcacgatcaatctcgattaccgcagcctctatcaccacttcgaaaacggatgtttcatggcggactgtgacgcagtgctcgagatccgccgtgatctggagcggacgatcacacagtgccgcgacgtgacggagaagtacaaaagcggcagaagcgcatacctgcgattttctcagctgcttctgcggctgtttgcggagctgctgtaatacaaaacggaaacaccctcgacggcttgcataaaccttcggaatcggataaaatagaggaatcaatagtatgaccggagtcgaaagaagatgagaagagagaaaaggaaaacagagaaaaaagcagagtacgttatccgtgtcgggatgacagtattaacggcgattttgattgcgctgtttctctggatcatggcacttgtgggtaagatacagggtacggcacgggtgataaattatgccggactggtgcgcggtgagacacagcggatgatcaagctggaaaatgccggatatccgcaggacagaatgagcgagacgatccattcctatatcaaaggactgcgcgagggcagcgatgagctgaactttgtccggctggatgatgcagaatttcaggataaaatgaaagagctggatgattattttcagatcctgaaggaagaggtgtcactggttcgtgaaaaggggtatcagcagacgaatatcatcgaaaagagcgagaaatttttcaagatctgtgacaaagcagtagggagagcggaagtgtattcccagaggctggcatccgctttggatcgtctggagaggatcgtgatcgtggatatcgccggtctgctgatcctgatcggcatggagctgatcaaggcggtgcgttatgccgcgcagaaccggattttgcagagtaaggtctatctggatgaggcaaccggactgccgaacaaaaacaagtgcgaggagcttttaaatgcagagggcagtgccctggaaaatggtatttcggcgctgtgtgtatttgatctgaacaatctgcgcaggatcaacaacaatctcgggcacgataaaggagatgagtatatccggagctttgcggtgcagctgcgcggtgcagtaccgccggagcagttcgtgggccgtgacggaggcgatgagtttcttgtgatactgcgcgggctggatggcaaaggagtgcgcatgtgcctgcagaatatctgtgagcagacggaggaatattcaaaggaacacccggagatgccgatcagctatgccgtcggctatgcgatggcgcaggattttgaggaatgcacgatgcgcgaactgttccgctatgcagataaaaatatgtatgtggataagaaccgtgctaaaatagaggaggcggcgcagtaccagcagctgaaattccggctgctcgatgagattaaagcacagaatctgcagttttcagactgcctgtactgtgatgccttgcttgatcagtacagtgtgctgcgggcaaccgcagatttttaccttgcggaggaaggaagctattccggtgcggtagagaagatcgtggaagagctttcctgtccggagacacgcagagagctgtggcatgcgcttcagctgccgcacttgcagcaggtcctgacgagaaatgcccggaagcttgagttgccgtgtcaatacgaagaagacggaaaaatgcagagaggacgtgtgacactgctgtttacagacactgcgaagaatggcagactgcatcactttattcttgggtttgagcggttccacaatgaggatcacaccgcggaaacggaaaaaacacagctgatgcgctattatgaacagatgaagcagtcgattctggaaaacgagagctatgtggatgcgcttcttgggacggctgagtcggtgtacacagttgatctgacccatgactgcctggaaaagattttctatcacacgcaggagcaggagctgcctgtgaatctgaagcttccgtgctcctacgatgcatattgcgaggtacagaagcagtatattgcggaagagacactggaaaattataggattgtggattcctcggaaaaactgctggatcggtttgcaaacggtgaaaagcagatcacggtggaatacagggtgaaaaaatcagacggcgtcatggcctggatacagaagatggttctgttttccagggagacaatgtatgacagcagaacaggacaggaaagtgcaatcatccatgcgattattctgttcaaaaatacctcttccttccatgaaaaggaggaacaggaaaaggaacggctggaagcggcatttcaggaagcagatctggcgagccgtaccaaaacggaattcctgaatcggatgagccatgatatccgtaccccgatcaatggaatcataggaatgctcgagatcataaaacggagccggacagatgagagaaaggtggatgagtgcctggataaaatacggatatcgatcagtcatcttctggcgctcgtgaatgacgtgctggatatgagtaagatcaaggatgaaagtacgacgctggaacaagagaagtttgaactggagcagctgatggaagaaacagatgccttggtaagtgcgcaactgctggatatggaaattacatatcacgcacatcgggaaagggcttgtcatacaatgctggtcggaagtccgctgcagcttcggcaggttctggtgaatctgctgagcaatgcgatcaagtacaacaaaaagggcggaaaaatcgatacgtatacgaaggagttttctgtggacggcgatacggtctggtatgaattccggattacggataccggtgtcggcatgagtgaaaaatttgtaaaagaagagctgttcaagccatttacgcaggaaaaatcaggtgccagaacacagtataagggtaccgggcttggcatgtcgatcgtcaaaggactggtagagaaaatgaatggcacgatcgaagtacaaagtgtacctggacagggcagtacctttacggttacgcttccattccggattggaaaagctgagccatccaaagagcaggagacagaacagaagcaggagaaattgctgacggggaaacggatcctgcttgtggaggacaatgaaatcaatatggagatcgctcagttttatctggaagacggaggtgctgcggtggatatcgcgtggaacggagcacaggccgtgaaccggtttgcagcttcaaaggaaggctattatgacatgatcctgatggatgtaatgatgccggtgatggacggactggaggcatgccgccgaatccgcgcactggaacaggaaaggagggagcatgtctgcatttatgcgatgacggcacaggcatcctctgaaagcgagcagcagtgtctggaggcaggaatggacggccatatcgcaaaaccgatcgaagcggaagagcttgtgaaaacgattcttactgtgaccgggaaagaggtttcagacacacgctgaaaaaggtgtgcaggcgggtaaccaaagtgagcgagtcagctttacggctggaaaggaactatatgaaaatattaaattttggatcgatgaatatcgattatgtgtatcagcttccgcatatcgtggagccgggtgagaccattacagcaatggggttaagcgtaaacgatggcggaaaaggactgaatcagtcgatcgccatgagccgggcagggcttgaggtctaccatgcaggaatggtgggaagcgatggagcgggcctggtggagacgtgccggaagaacggagttcacacagaatatatccagacagtcgaaaccaggacgggaaacgcgatcatccaggtcaatgatgctggacagaattgcattgtgctgtttccgggggcaaaccgtgcaaatacgaaggagcacgtggatgaggtactgagccattttggaaagggcgatgtggtcgtactgcagaacgaaatcaatctgatcgactatatcgtagaccgggcgtatgagaaagagatggtcattgcgatgaatccgtctccgttcgaccaggcagtgatggactgcgatctgacgaagattacttacttttttgtaaatgagatcgagggggaaatgctgaccggagaaaaggatccgcagaaaattatggccggtgtgcttgcgaaatatccgatgagccgtctgatcctgacactcggaagtgacggggcatggtatgcagacaaagacggacgctgctaccaggaaatctgcaaggtaaaggcagtcgatacgactgcagccggagatacgttttccggttattttctcgcatcggttcttggcggaaagacaccggcacaggcgctgaagacggcgaccgtcgcatccgggattgctgtatcgagaaagggagcagtgccgtcgatcccgacggcagaagaagttgcacagaagtgcggggagatggaatagcagtcatacgcggagcatgtttgtgctccgctttataatgccagaaagatggttgatgttatcaagggagatatgggcaatccgcttcgctgtttgcaggatcataagggatccaggctcgtaaggaatccctccttacgagattccgcaagcgggtccttccttatgatatttcataacagagtagctgctttgcagcttgactcagttaaaaaacagcaggctaccggacgaaccggcaacccgctgcaaaaagaggcaggatgaataataaaagggcaatccgcagctgcgctgagggcaacagagcagctgcggaagagaacctgatctgacggattcagactcaggaaattctttatccctgataagatgcggaaaaactcttgtagtattctttgaaaaactctctgattgatttgatagccttcatgatgaaatcctcctttaatccgcttattctgcttattctatggaagttctgcggttctgtttaccgcttttctttgatgacattactataacaggttgacggaagtttgtaaaatacatataataaaggtgttacgatacctgacaggtattgcaaaaaagaaagtctgatatgcattccgtttaatgttagaaaaaattcaggtcaaaaatgccagaaggtaaactattgggaggcctcgcatggaactacgacacatccgatattttctcgcggttgccgaggagatgaattttacacgcgcagccgaaaagctgtgtatcgcgcagccgccgctgagccgccagattcaggagctggaggcagagcttggaacaaagctgttcgtgcgaaagccgcatgcattgcagctgacagaggaagggattttgttccggcagtatgcgcagcagatcgtcgatcttgtgaagcgttcggcggaggatgtcagcgagatggagaagggactgcagggcatgatttatctggcgtcggtggaaggacaggcgcctgcactcctctcggagtggattgcaggatttcatgaaaagtatccgcatgtgacctacagcatgtggaatggaaattctgatgatgtggtaaaccgtgtcatgaaaggactgtgcgatcttgcggtcattctggagccgcacaatgcagaaggtgtggagtctgttccggtttatcaggagccgtgggtggcgatgattccggaagggcatccgctggcgctggagcaaaaagagacgatccgcatggaagagctgcttccgtatgagctgattattccgtcgcgtgagtcaaggcttcaggagatcaacggctggtttggagagggagaaaagcccattgtccgctgccgtattgcgcatatgctgaatgcgtatgaactgacaaagcgcggagtcggaatcacgatctatccggcggcggccgctgaccttgcggagcattctggtatctgcatccggaagatcacggagccaaaggttatggcctcctacgtactgatacgaaaccggtcgcgtgcgctttcaagggtcgcgcaggaattttttaattatgtggaggagcggacggcggcgaaccttgttcagaaataaaggacacgtgggagaaataagccatagaattttgtaagaaaaagattgctattttgccgtttttttgtaataataaaaccactgtgtcgatgggctgcgcattttggcattacagagcagccccaatataccgcaaagtggggcatgcagattgcggaaatgatttttcagacacgctctgggataaaaaagaagaagaggagaaaatatgcaggatattattgacggcttttttcataaaaagcatttctggtttcgattgtgcgcggtagtcgcggcggtgatcgtgatgggtttttgtctgtcgtggcttttgctggtcgacctcgggacggatccatgtaccctgatgaatgtggcgattgcagatacgatcgggatgtctcttggcaactggcaggcacttttgaatacggtacttctgatgattgtggtgattttcggcggacgcaatctcggtttcggtacactggcaaacatgtttctggtgggatattcgatcgatttcttttcgtgggtctgggcaaaaattcttccggtggatctgttttccagctggggtgtgcgcgttgcagtactgataccggcgctggcggtttttgtgctggcggttgcggtctatatggatatggatatgggaacggcaccgtatgatgcgatcccgattatcatttcaaagtatgtgaagagattttcattccgcacgattcgcatggtctttgattttacggtagttgtgatcggaatgtgtttcggcggacgacttggcattgtgacatttctgatggcattgacgcttggcccggtgattgcatgggtcggtgatctgatgaagaaaaaatttgagtttctgcaggactgaatagagcattaacagttgctccgggattcaataaggttatttgactgtctggaagaacagatattaagtctggatacgatgccggagcgttatcgaaaatatgaaaaagaaccgtggaaaagccgcggacttcgtgtattaccagtataaagcagtctttcgtttatgatcgactgcttttcttatgccccgattccggcgaactgcataaaaaaccccctttaaaataaaaactaccaccctttctgcataaaaacattatgctataatagtgtcagaaaaaagaaaaacgcctgaaaaaagaaaaaatgcagtataaaagcatacaaaatgacgggactgccgcacgaaaaggcataaatagtaaagtatccgcgggatcggcacaggaaagattttacggatacatcagaaaaaagggagggtggcgaaatgggtgaagttattgtctccatgagcagcatcagcaagacatttccgggtgtcaaggcactcgataatgtaagctttgagctgtgctcaggagaagtcatggcgctgctgggagagaacggcgcaggtaaatcgacgcttatgaaaatattgagcggtgtctacaccagagacggcggcgagatgaagatttttggaaaagaatacggcgatctgacgccgaaacaggcgcagcagatcggtgtggcgatcattcatcaggagctgaacatgtgccgtcatctctcagtcacggaaaatatgttcctgggacgtgagaagcagggcgggctggcactggacaaccgcgcgatggagaaggaagcgaagcggatcctcgatgatctgaagatcgatatcgatccgagacagaccgtcggtgatcttccggtgtcaaagcagcagatggttgagatcgcgaaagcgttatcgacaaatgcaaagatactgattatggatgagccgacatcatcacttacatcgaaagaaatcgatgatttattccgcattatacgaaagctgaaggcggagggctgtggtatcgtttacatatcacaccgcctggaggagctggcgcatatcgtggatcgcgtgacgatcatgagagacggccagtttatcacaaagggcaatttcagggacatgaccatggatcagatcatcacaaacatggttggccgcgagatcaaggagcagttcccgcgggtagagtgcaaaaaaggaaagaaaatttttgaggtcagaaatttaaatgcaggccgcatggtacggaatatcaatttttcggcatatgagggagagatcgtaggattcgcaggcctgatgggtgcgggacgtaccgagacgacgcgtgcaatcttcggagttgatccgaaggagagcggtgagatctgcgtggacggaaaggaagtccatattcgctgtccggaggatgcaatcaaaaacggcgtcgtgctggcaccggaggaccgcaagaaagacggactttgcacgaagctgagcatccgccacaacctggcacttccaaacctcgatcttctgtgcaataagcttggcgtagtcagcagcaaaaaagaagacgagctgtgcagaaaagcagttgcagacctgaagatcaagacaccgaatgtggagatcgattccggaaatctttccggaggaaatcagcagaaggtcgtagtcggaaaatggctggcgcgaaattcaagagtcgtgattttcgatgagccgacaagagggatcgacgtcggagcgaaggttgagatctatcatctgatgaatgaactgaagcagaaaggaatcgcagtcatctttgtttcttcggaaatgccggaggtcatgggaatcgcggaccggatcatcgtcatgtgtgacggccggatcaccggtgaaatcctggcgaaggaagcgacgcaggaacagatcctgacgatggcgacctcttttgaaaacaagaaaatttctgcggcggaaggagaagggaaatgaacagtaaaaatcaaagccccgtaaagaagcttcttggcatccggggaatgggagcggcgctcacggcattcgtgggactggtagtaatttacattgcattcggtatcatcaaccaggcagttttctcaggacagaatattcagaacctgctgcgttcgatgtcaaagtacctgctgatcggtattgcacagagttacgtgctgatcaccggaaacattgatctttcgatcggaaccatggtcggtatgagcgccatgatctccgcgacactgatgacaagaggcgtgcatccgatcgttgcgatcctggtcgcacttgtaagctgtctggttgtcggcgtggtaaacggctatctcgttggaaaattccgcctgccgccgttcatcgcaacactgggtacgatgtttgtgacaagaggtatcgcctacatggtgaacaacaaccgaaatacggacgcgattgcgaccggcatcggcaaagaggcggcagaccgattccagaacttcttctactatggaaagacgtttggtgtgtataacaccttttggatcgcacttgttgcatttatcattttcttctttatcctgtcaaagacacgctccgggcgtcacatttacgcgatcggttccaatatcgatgcagcgaagctctccggtgtaaacgtagtcctgacgacgaccaagacgtatctggtcagctcgatctgctcctgtatcgtcggactgatcctctgcgcacaggcaggcatgggtaacatggaagcaggaaacatgtacgaaatgtacggtgtagcagctggcgttatcggcggcgtatccccgcttggcggcaccggacttctgcttggaacgtttgcaggtgcagctgtatggcagacactggaaaatggactgaacatgatcggcgcacaggtcggcatccagcgagtcgtaatcggtgtcattgtagtaggtgcggtgcttctcgatgtcgtagtaagaagcggccagttcggcaagaaaaagaaagcataaaagaaaaaaagaaagcataaaaagaaagacagcggcataaatacaaaaaggacagacttaaaaaggacaggcttaaaaaaagaaccatactgtgtcaggcagacgcagatagggatagaaatcacaaaacaaacacaaaacaaacaaagaaatcaaatttcaaggaggaaattcaaaatgaaaaagaaaatgtttgcagtactcatggcagcagcaatggcaggaacgatggcaatgaccgtatccgcagcaggcgagaagatcgctctgatcacaatggattccatcgatcagcactggatcagcctgaacgagggcgcacagaaggcagcagaagagcttgacgcagaagtgaccttcatgtccccaaatacaaaggacgacgcacagcagatcgagtgtgtaaacaacgcagtggcaggcggctatcaggcaatcctcgtagcagcaaacggaccggacgcgatttcttccgcactgaaggaagcatccgatgcaggcgttaagatcgtatacgttgactctccggcaaacgtagaggcagaagcaacgttctcaacagacaacaaggcagcaggaacgacagcaggcgaagagatgatcaaggcacttgaggagaagggaattacctccggcaagatcggtatcatcaatgtaaatgcggcaaccgattctactgtaaaccgtgaggaaggcttccgcgcagcatttgacggaacggatttcgagatcatggaaacacagtacggcgaaggcgatgctgcaaaatcacagacaatcgctgagaactacatcacacagggcgtagttggtatcttcggatgcaacgaaggttccacaacaggagcaggaaatgcaatcaaggcttccggcagcagcgatatcgtaggcgtaggttttgataagtctgatgcgatcctgaacttgatcagcgacggatatcttctggcaacgatggctcagaacccggacgtgatgggttatgagggcgtgaaggcagcagttgcagcaatcggcggcgagtcccttggcggagaagtaactgacacaggcgtttctgttgtaaccgcagattctctggcaggcgcagaggctgagactgaggcagtgaccgagtaagataggcgggttaagagatattatgagattctggagcggactgcaaacatccgcattaccagatagtgagccataacatgaagaagaggcgggcggatgtcctgcctcttctttatagtgtgcaatctcatgatgccagagtcaaaagcctgaaatcacgatatgtttgcacaggagtggttttatggcttaatgacccgtaaggcatcttttgaccttaacatcatctcataagagggaaaattgcagctttctttatggcggatactgtgaatttgaggtatgataaaaatacagtaactgttcagagccaacctccaaaatgctacgcatttcgtcggtgtggcgtatccgccaaataaaatttcaaaaacaggcttaaaaatgcaagcattttccgcctgttttatgaaattttgcttggctctgaacagttacaaaatacatttataaagccggacatgttctggtaatgcaagaaacagctgcgcatataagagcatacaaaaacagaacggaaaatgagaaaccatgggggatgaaacgatgataaaggtagtcattgcagacgatgaggtgcggatctgtcagctgattctggcactcgtcgactgggaagcgcttgggctgaaggtggtcgggacggcgcacaacgggctggaagcaatcgcgatggtacgaacgctgcagccgaacattctgattacggatatccggatgccgggatgcagtggtcttgagctgattgatcaggtaaagagggatgatcaatccctggagatcgtgatcatcagcggttatgcgcattttgaatatgcgcagcaggcgatcaaatatggggtcggtgattatctgttaaagccgatcagcaagacggagctgaccgcgacgcttcaaaagcttgcgggacggatctgtgcgcagagaaaaaatgcggaggatgaggcacagcagaaagaaaagacgcagaaggatgtggctctgctgagggaaaacctgatcagcggcctgctggaccagaaaaacaggaagataagcatcggggagctacaggaacagtacggcctgcaggtgcaggacggcgtatttcaggcctttcttttgaaaatggactgtggcagagaagaactcagcccgacggcatcggtacttctgatggagaaggcgcaggagggactgcagcaggcggtcggaggcagatgcctggagtttgtatcggcggtgcagggctttgcctgcgccggaattttaaattatgcaccgcagaaaaaagaggaggtgcgccgcgcactgaagagctgtatcaatcagctggagctgcagaagagcctgttccggccggtcagcttttctgtggcgcttggaagcggcaaaagtgcaccggaggagctggatgtatcaatgaaggaggcgctgacgctgattgaggagcggatcgtatacggcaccgggcggctttatgaacggatgggaggaccttctgcgttgatgggaagtggtgcactggagcgctatctgcgtgacatgacgcatgcggcggagatctttgattctgatctgcttggcacggtgacggatacgctgtcaaaagaatgccgcgagacaaaggatgtccacgggtatgagatccttgaggcggtcagctctgctgcggaggtgtttgccgtgcggacgcagatggcagagcgtgcggaatttctgcaagagctgcgccggcaggtaaaacggtgcagcgaagccgcacaggtatttgactgcctgaaagaattctgctgcggttatcttgccagacagagtgcacagcaggagagcgagtcagtacggccgatccgcaaagcaaaacagtatattcaggagcattacagcgagccgatcacccaggaagaggtcagcggcatggtgggcttaagtcctgcttatttcagcgtgctctttaaaaagacggagggcgaaggatttgccagatatctgatcaatgtgcggatggagcaggccaagatcctgctgcgtgagacgaacagtccggtgttggaaatctgccgcctggtggggtacaatgacgtaaagcattttacacatacatttgagaaggcggcaggtgtgaagcctgctgtgtaccggaagctgtacgggtgagacgatgaactggagagaaaagtggaaaaagaaatggaaatatatatcaaaccgtgtgcaggtgctcggtgttctctgccttgcggcgctttccatatcaggggcggtgcagcttgcagccgcaaagacaggggcagatgtgctttttacgacgggatgtctgacgctgcttgccggagcggcgcttgcagcagcattttggggttgggtggtccggccgtaccgggagcatgagaaggtcgaaaagcgttttctggcgggctatatgttttcagaagaagatctggagcgggcggtgctgacaccgacgatgcgtgaagagatggaaatgatggagaagatcatccgttcaccgcagctgatggatctcaacaaaaggcaggcgcagtatctggcactgcagaatcagatcaatccgcatttcctttacaatacgctggagagcatccgcggagaggcgctgatcgccggtctttctggtgtggcggatatgacggaatctctggcaaaatttttccgttatacgatcacaaaggtggaaaatctcgtctcggtggaggaggagctggataactgtgaaacgtatttcggaatccagaaatatcggtttggggaccggctgcagctgcacatcgagtacgacccggatgagtgggaggagattatgaactgccgcattccgaagctgacgctgcagccgatcctggaaaacagcattatccacgggacggagctgaagatcggggaaggcaatctgtggattcgtttccgtaggacggagaaccggctggttatcacgatttcggatgatggggtcggcatggatgaagaaacgctggagcggctgaatgaaacgctgaaccgcggtgttgatgcgatcacgcagcagcaggaagaaaaaaagggcgggatcgcgctggcaaacgtcaacaaccggatccatctgatttttggggatgaatacggaatgcacgtgtattcgatggcagagtgcggaacggatgtggaaatctccattccggtggtgacacggctggaacagaaggaggagcatgtatgaaccgggagatatttcggatggagcgcgtcacgtatcaggaaaacggcgtcacgtttctgaaggatttcaatctccggattgatgaaggagagatccttggcctgattccggtcaatggctacgggctgaatgcatttttaaaactccttgaagtaaatgttccgctggaggacggctacgtctacagccgcggcgagatcatcaattcctggaaggattccaggcggacacataaccggatcagtgtgatcggggcagaaaaccgcctggtggagaccttaagtgtcacagacaacattttcgtcctccgaaaaggatttcgtcaggaagtgatccgtaccggacttctgcgcaggcagcttttgccatttctggcggatatcggaatggatattccgaccgatgtgccggtggagcggctgacagtctttcagcgtctcgtcctggaactgctgcgtgctgtcgtgtttggacaaaaattcatcgtactgaatgagattggcgaactgatcagctatgaggagctggacaagctgcataagattctgcggcactacgcggcgcaggggttttcgtttctctatatctgtctccattacgaggaggcgagccgcatctgtgagcgctgcgcgatgatgtcgcacgggcggatcctgaagctgctgccatgcaatgacgaggaaagtgcggagcggctctacacggcagagtacaaaaagatggtccgtgtccatatggaaaacaggcaggagcagctgcaaaagcagcggcaggcgtttgcggcggagcatctgcagggggaatatctgagggatctctcatttgcagttggtgccggggagtgccttgccgtgcagatcctcgacaacaatgtttttgcggaactgcgcagttttcttttgcaggaccagatgccggagggcggcgaactgtgggtgggaaagcgcagacagcggaatttttcggatcgcaggatcgcagtgatccgggaactggcaacgcggacgatggtctttccggagttgtcttatatggaaaatctgtgcatttctctttccatgcgcgttccggcgctctggctgaaaaaaagcatccgccggagtatccggcgggagtacgggccgatccttggcgaagaagtatttgaccttccggtttcgtcgctgacggaacgccagaaatatcagatgatctacacgcgcatacagttggcgcacccggatgtggttttctgcatccagccattcaaaggagcagatctcccgcaccgcatgcatatctggcagcttttagagcagctgatggatcacgggatcgcggttgtgctcgtctctttgaacctctctgactcgctctcaatggcagatcgcctgctggtgatcggcaaagagggtatccaggaagtgctgcggaaggatttcccgacactggcggaggaggtgccgtggatgaatctggtgtgagaatgcctgctttactttgtcagacaggtgtgataggatggaactaagcggagcaagttctctgccgggctgcgcggagcaataagcagtggcaggggatctgccggaaaaagaaccgtgctgcgcgctgacaggaaaaaggtgaacctttcaggcggcagcagacggaaagaaaagggagggttacaaatgaaaacaaaacgacacgcaaaacacagcttttgccgcagcatttcagggcttcttctggcacttctgatgatagtgacggctgcaattccggtcccgtcacaggccgcagcagaagaaaacggtgccgctgcagctgcggtagttccggggaagacaaggatcacatccgcgcgggcggcttctgccacagcggtctttctggactggcagaaagcgaaaaatgcgacaagctactatgtatattacaagctttccggggcaaaatcctggacaaagatcgcatgtgtgagagatctgggatatgcacatatcagtaagaacttaaaagaaggaaagcgttatctgtacacggtgcgcgcgtataatgcgaagagcaaacggcttggcggctatagcaatgtagtggcggttgtgccgaaaaatgtacagccgacttcggtgaagttcaataaagcaacgatggtactttcaaataaagcggatcggactccatccaacaaaaatcttctgcgtgtaacgatcctgccgaaaaatgcgacgacaaatcttgtgaagataacagtgtcaaatccaggaatcgtatcacttcagtataccgaaccgggaatgttcgtgcttgcacgtaagaaaggaaccacgacgatcactgcgacatgtccaaacgggaaaaaagctgtctgcagggttaccgtcagataaaaacagaaagaaagaacaataaaaaatacgcgagggacaatgcacagccctccgcgtatttttttgtacatttatccttataaacgtttatttccgaatgacaaatttgtgaacgtgtgataaagtagagggggatttacaacacgactacacagcagagcatatttgaacgcaggtcgcgaagcggattgcgaatggccgctttacaaaagcttcagttatttttttgatatgttctggcagacaggaggagaagacatgacaagagtaggagtgatcggtgtcggcggaatgggctttacccatgtgaaggcactgaaaagtctggcagaggagatggatcttcaggtagtggccatcgcagatctgcaggaaaaatatcagaagagagcaaaagaggagtggccggaggccacgatttatgcggagggcgctgagcttctggaaaaggagcagcttgacgcggtacatatctgtgtgccgagctataagcatgcagagctggcaattcaggcgatgaataaaggaattgacgtgctggtggagaagccggcgtgtttaaaggaagaggactgtgagcggatgcttgcggcgaaggaagcaaatcacgtatcagttatggtcggacaggtcgtacgtttcttcccggagtaccgttatttaagagaagcatacaaaaatcagacattcggaaagctgaaatccctgtccatgcagcgccttagcggcaatgtgacctggggctatgaggactggttccatgatgaggaaaagagcggatcggtagtactggatctgcatatccatgaccttgatttcctgagatatacgtttggagatccgaaggaaatgtcctgcacggcaacggcgtatgcaagcggtatggtgaatcagatcattacaaattatatatttaacggcgtggatgcaccggtcagcgcagagggactgtgggcggaatcggccgcacttccgttctgcccgcgtttttacgcgcagtttgagcaggccgatgttgtctttgacggccgtgagaaaccggataccttaaaggtataccatgcagacggtacggtggagaagccggacgtaaaagaggctttcagccttgagggcggtatgcaggggctgaacatctcgacattcggtccgtattacactgagatccagtatttctatcagtgccggaaggaaggaaaaaatccggacatcgcatcgcttgaggaaggccttgcatccgtaaaatacgcgctgaaggaatgggaactggcaaagaaatacgtggaggagaagtcatgagagtaggatgtacgattgattattttaagggagcggatctggtggattcgttccgtcagttaaaggaaatgggaatgaacagctgccagctggtctgctgggacagaagcgtgcttgatgcagagcatgcggcagaggtaaagaaaatctgtgaggatgagggcattgagatttcagccgtatggtgcggctgggaaggcccgcgtttctggaacttttacgagggacaggatacgctgggactcgtgccggaagcataccgcttcaagcgcatcgagatgctggtgcagggctctgattttgcaaaggagcttggtgtaacagatcttgtgacacatgcaggctacatgccggaaaatccgcatgatccgaaatatccggagatcatcacagccctgaagtatcttgcaagaaagtgcaagcagaacggccagtatttcctgtttgagaccggtcaggagactccggtcacactgcttcgtgtaatgcaggacatcggatttgacaatgtgggaatcaaccttgacccggccaacctgatcatgtacggcaaggcaaatccggtcgattctcttgatgtattcggaaaatacgtccgcggtgtgcacggcaaggacggcctgtatccgaccgacggaagagagctcggagacgaggtggcgcttggcgagggaaaggtaaacttcccggtatttttaaagaagctgcatgagcttggctatgacggagatatcacaatcgagcgtgagatcaccggtgagcagcagaagaaggacattcagatggcaaagaagatgctcgatgaaatcatcagcggactggaataaatacaggaagaaaaggtggtgacggattttgaagataacgacacagcagctgcagctgctctttgatgagaaaacactgcatttttcagtggcggcaaaggagatactctggagctggcaggaaggctaccatccgtatcttcttctgaaaaacggagaggtgatccggtttgacgaagcatccgtaaaggaacataaaatgatcgaaaacggcgtgggcagcggtatcctgagccactatgagggatttgaaaagagcgcgaatctggcatttgagacgtacgtatggctggaggagacaaccggagatttctggtttgagtggattccactttcagacggcgaggagcagatcgcaaaggtattctggccgggcgcaatggagtttcggcaggcaagtgatgactggtacacattgattccggaggagcaggggctgctggtgccaaatacgtggccgcaggaattaaaggcactcgtctttgacggaatgttcctgaccgcaggggcttacatgccgtggttcggacaggtaagggacaaaaacggctacatcgcgatcgcacagaccccgtggaacggtgggatctgggtcgatcatccggcagacggtaattatacgcatgccggagcctggtgggagccgagccttggaaagatggattaccgccgggtgctgcgcttcagcttttttgaaaaatgcgattacaacgatctgtgtaaggaatatcgtgaatacgtaaaagagacgggacatcttgtgacgctgcgggaaaaagagatccgcaatccgggagtgaagcatctgatcggagcggaatttgtccacttcggcatcaaatcgagcacgaatccggcatcggaattctataatcacgagcatccggagaaaaacggccgtctgacttcgtttgcggaccgggagaaaatgattcgcaggcttcatgagcagggagcaggaaagatgtatctgcatctggatggctgggcagagcctggctatgacaatcgtcatccggattattttccggcctgtgaggaggccggcggatgggacggcatgagatccctggcagagacgatgcacgaggtcggcggttactttgggattcatgaccagtaccgtgactattatcatgatgcaccctcctatgaggaagaatatgcagtgcagagcgtggacggaagccattatacccatgcaaaatgggcgggcggactgcagtcctatctgtgtgcatcgcaggcactttattatgtaaagcgcaattttaaccgtctgtttgaaaactacattccgcttgacggggcatatctggatgtgtttacgtgcaacgagggggatgaatgtgcaaatccgcgccatcgcatgagccgcagagaatgctacgaataccggaagcgctgcttcgattatctgacggcaaacggtatcctgccgagctctgaggaggtttctgactggagcatggacagccttgtcttctgccactacgcaccgtatgattttatgctgcgccagccgggtgctccgaaaaagggaattccggtgccgctgttcaatctggtttatcacgactgcgttgtggagccgtggatgatggagaagcacgaaacggaagattatatgctttatgcgctgttaaacggtggagcaccgtatctggtacgtcttggtgcctatgagggtacggacggagcgtatgacggggcttcccttgcgatggaagagcatatgaagcgctgccagacagttgcatctctccacgaaaaggtggcgtactgcgaactgaaagcgcaccgtatcctggatggagatccgaaaaagcaggagagcatttttgcggatggcacgcgtgtgcgtgtgaatttccatgacggcacgtatgagattagatgcgggtacacggaataaaaacgaatgtctttgtgttattgacaaacactggtaatacgcctataatatccagcgtgtgatgtgattttttgtgcagtatgtgtgtggctgcattaaaagataaatggcagccggagacggctgaccgaacaataaggaggatccacttatgaaaagaaagttatgtatggcgctgagcgcactgatgatggtttccggcatggcaggcttcggcattgttgcaggagcatctgacggagatgttacactccgctatggtatctgggatgacaaccagaaggctgcactgcgtgagatcgcagacaagttcgaggaagagaacccgggcatcaaggtagagatcgaggtaacaccgtggaaggattactggaccacgcttgagacctctgctaccggcggaagtgcaccggatgtgttctggatgaatgcaccgcactttgctatgtatgcacagggcggcatgcttgcaagccttgacgatgcaatcggtgattctgaggttgcttccaaggcagatttcccggagagcctggtagatatgtattctgataacggtgtatggtacggcatgccgaagggcttcgataccatcgctgtatattacaacaaagagctgtttgataatgcaggcgttgcatatccgacaacggactggacatgggatgattatgtaagcatcgcaaagcagctgacagacgcagacaatggcgtttacggtacggcacttcagcttgatgagcaggctggctggtacaataccgtagcaatgttcggcggcgagatcttaaatgaggataagaccgcatccggatttgatgatccgaatacccagaagggtatccagtgctgggttgacctgcttgacgagggcgtttctccgacctacgcacagctcaatgataccggtctgagcgatatgttccgttccggtaaggtagcaatgatgttcggcggctcctattctctgtccggattcatggcagacgaagagttcgcagacaaatttgactgtgtagagcttccgagcgtagatggcaagaaggcatgcgtaatccatggtcttggcaacgtgatttattctcagggcgcaaatcaggaagcagctgctaaattcgtggaattccttggcggcaaggaagcaatgacaatgcaggcagagtcaggaattgatatttctgcaagaactgactgccagagtatctgggttgattccaacaagaattacaacctgcaggcattcatgaatatggtagattactcctatgcttatccggcaaccatgaacacatctgcatggatgactccgatgtacgatgaggtttacgctgcattcaacaaggataagaccgttgaggaagcctgcgcagacgcaactgctgagatgaacgaggcacttgcacagcagtaaaaaataagaaaacgggaccgttcagggttcctcagacagcggggcgctgtgaaatccggcagcgccccgctcttataaggtagtactgttacaaaatgcgttattccgaaggtatctcttaatacttcgctcaggagcgtattggaaaatacctgggagagggtgaaacaagggtgtttcggaatgacgcatttttgcatttatccggaccgcagtctgaagcgcatttctcgccggaggctcggttgtaaaatgtctggaggtaggcaaatgacaaagaaaaaaaaggtttccagcataaggagaagacagtggatgtggggatatctgatgatcgcgccggtagtcatcggacttgctgttttttacatttatccgttctttgatacgctggtaaacagtttcaagacgatcggtgcgttcaacgtatcgaaatggtgcgggcttgcgaactataagaagctgacgaccgatgagtctctgtggcatacgctgtacaacacgttccggtatgtaatctttaccgtcccggtgacgattattctttcccttctgctggcggtgctcctgaatacgaaaaacctgaagggacgcggcatttaccgtgtcatctatttcctgccgtacgttacgatggcaactgcgatcgcagcagtgtggaagtggatgtacaacggtgacttcggtctgatcaactacatccttggcctgttcggaatcaaggggcagcagtgggtgacgaacccggcgatcgctccgtattcgatcatcgttgtctcgatctggggcagcctcggttacaacatgatcatccttctggccggtatccagggcatttccccgacgtactatgaggcagctgagatcgacggcgcaggcgttgttgcaaaatttttcaacatcacgcttccactggttactccgtcactgttcttcattctgatcaccggactgatcggtgcattccagatcttcgatacaatcttcatgatgatcggaaagaatacggttgttctggaaaacacgcagagtgtcgttatgtacttctaccgcaacgcgtttgagctgggcaacaagggttatgcctgcgcgatcgcaatgctgctgttcgtgatcatcatgtttatcacgctgctgcagatgatcggacagaagaaatgggtaaattacgactgatgcgcgtcatcacaggaaggagtagaaaatgaaagaaaaaaattcaagacacctgttcgtacatctgatactgattttggggtcttttatcatgattctgccgtttgcctggatggtgctcacggcatttaaaacacagaacgaggcaatccgtgtgccgccgatcattttcccaagtcactgggatctgacgacatttaagaacgtatttgacaagcttccgtttctgtctgcttacaaaaatacgattatttctgcgatcgtgacggtagctgcgcagctgttcatgtgctcaatggcgggttatgcattcggttgtatcaagttcccaggaagaaatgtgatctttgtgacctgtctttccgtgctgatgatcccgtccacgctgttcattcttccacagtatctgatgatccagaaaatgggtcttctgaacacgatcccggctctgttcctgccgaatctgttttctgcatatggaacattcctgatgcggcagttcttcatgtcactgccgaaggagctggaggatgcggcaaagcttgacggctgcaattacttccagatcttttacaagatcatgctcccgcttgtaaaaccgggtctcatcacactggcgatcatcacggtgcgtctggcatggaacgacctgatgtggccgctcgtagtcaacccgtcgaccgacaagacgacgctggctgcagcacttgcaaacctgcagggacagtattccaccgattatccgacgatgatggccggctctgttatggcaatcctgccgctggttatcatgtttgcagtattccagaaacagttcattgagggtattgcgtttacgggaacgaaggcgtgagaaaatattgttttactgtagtaagccaagtccttcgccgtatggcggaggactttttgtataggaaaggagattccatatgaatttagaaggttttaaggaaaaagccggtacgctcggcgtacttggtgtggtagtgacacaggatggagaggagaaggcaaaatatctttgggacgaggaatgccgccgtaatgtttattcggcatccaagagctttacttcatgcgcagtaggattcgcggtgcaggagggcctcatttctttggatga

SEQ ID NO: 4029 - DNA, 3614 bp, Unknown
  16S sequences of unknown bacteria
cctgccgatggaggatgcgaaggtgctgcagcgggagtgcctgcagatgctggcagattctctggtgcacatcgggacgatccacatcctgcacgatgacaagatgagccagctcaaccgggatttcgtgctcttcgtggaggagctggagcagcggacgttctcttaccgtgatttcatgcagtatcgcgaggcctatcatgaagaatggctgcggcgctgcgcactgatctttggacggcattaaacaggcatagcagggccggcagcggcataggatggaacagcgaggagggaaatccgatgaaaaaacaggctctggcctttctgacactgttttcgctgatcctgatgctttccgtgtattatgtcacgctgcccagcgatgtcaccagcgtcatgagcgacaccgcgcaagaggaacaggatgcagacgcgcaggcacagcagacgcagccggaagaaacaagcgcggccatgcaggaggagatcgccgcacgcatgagcgaaaagctcaatgaggcgcaggcggtcatggccgacagcgcatccggcgaggcagaaaaggaagcggcgctgcagacgatcgaagagaatgagaccatatcgcagctgcagcagcagacgatcgaccatctgaaggaaaagggatgggactgcgccgtggagatcagtgacggcgtatgccgggtgacgctgtttggccaggaggaagccaaagagaccgtcacgcaggtcatgaacgaaacatacagtgtcttgaacgggaattatttgattgaagtggcttttaaaagcgcctgaactctgctataatgtttgcagaaggtgataaatatggcacaggagtacatttcggtcaagacgcagaatgagatcggcgtggtggccctgaacaagtccgtgttcacgacgatcgcgaagatcgccgtcgacgaggatgacgccatcgtgctcaacgagagctcgaatctgttcaaatatccgatcggctgcaagctgatcgatggaaagatggtgctgaccatcgaggtaaaggtaaaatatactgcaaacgttagcgatgtctgcagcaagctgcagaagaagatctttgaaagcatatctcatatgagtgactataccccggataagatcgatatccgcgtggtcggctttattttctgagaaatcctgacggatttctttttttggatatagggggggtggatatatgccggtttctctggaagactgcctggtcgtcgggatctcttcgcgcgcgctgttcgatctgcacaaggaaaacgagatctttgaacaggaggggcttcaggcctacagcgagtatcagatcgcgcatgaggatgagctgcttgagccaggcagcggattttcgctggtcaaggcattgctgcggctgaatgagctgagcggcagacatgtggtggaagtgatcatcatgtcgcgcaacagcgccgatacttcgctgcgcgtgttcagctccatcgagcattatgggctggatatcacccgcgcggtgctcagcggcggggaaaatctctctaattatctggcgtcattcggggtggatctgtttctttccgcggatgaggatgatgtgcaaagcgcggtcaatgccggttttgcggcaggcatcatctatccgcatgccgatgattatcagcgaaaggagatcgagcagatccgcatcgcctttgacggcgatgccgtgctcttctccgatgagtcggagcggatctatcaggaacacggccttgacgcctttgtggagtatgagcgggccaatgccaggaagccgctgcccaaggggccttttgccagcttcctgaagacgctgtcccgtctgcaggacagcttcccgcctgacgcttctccgatccgcaccgcgctggtcacggcacgcaacaccccggccagggagcgggtcatccggacgctgcgggcatggaatgtccgcatcgacgaggcgttttttctagggggcatgccaaagcgggacgtcttgcagaaattcggcgcgcacatcttctttgatgaccaggatgtgcatgcatccccggccagcgaggtggtgcccagcgccagagtgccctatcgcagcgaatcaaatgccatgcagcagacaggaggaaatagtgatggaaacgatgaacagacataaactcagagagatcgcgatgacttctctctaccagcacttgttgctgaacaaggatatccgtgaatgtgtatatgagaatgccgagagcaatgagatcgatcagtttctgtatacgatcaccatggataccgtcaaatataaggacgcatacatcaagaagatcagcgagcatctgagcagcgaatggacctttgaccgcctgggctatgtcgaacaggcgatcctgctcatggcgtgctgtgagatcgacctggagatcgtgcccaagccgatcgtggtcgatgaagcggtcactctggccaagaaatactgcgatgagccggcttatcggctgatcaacggcgtgctggatcagctctgagatgaacgagagagtctacacggtcagcgccatcgtgaaatacgtcaagggcatgctggatcagaatccgtatctcagcagcatgctcgtccagggagagatctccaatctgaccagacatcgcagcggacactggtattttacgctcaaggatgaacgcgcacggctttcgtgcgtgatgtttgcttcctacgcatctaaatgccgcgtgaatgtgcgcgatggcatgaaggtcatcgtcaggggctctctttcgatgtatgaggcgcagggcagcgtgcagtgctatgtcagcagcatccgcagcgatgggctgggcgatctgtatatgcagtatgaagagctcaggaaaaagctgcatgcggagggctggttcgacgaagcgcacaaaaagccggtgccccgctatgcctgcgacatcgcggtggtgaccgcaaaagagggcgcagctatccacgatgtgctctccaccatcgccagacgatggcctctggcggatgtcacgctgtatcctgcctatgtgcagggggccaacgcggcgccctcgctgatcgatgcactgcagcgtgccgaccgcgatgggcatgagtgcatcctgctggtcagaggcggcggttcgatcgaggatctgtggggcttcaacagcgaggcgctggtgcattgcatctatgcgctgaacacccccgtcatcagcggggtcggccatgagagcgataccaccctggtggattttgtcagcgatctgcgcgcgcccacaccgaccggcgcggccagcatggtgacatgcgacatcagggatgttaaaatgaatttgtatcagagcgcgagatatctgcaggaacgtctgcagacgatgctttctcaggcgagaaggcagctcgacatcgcaaaggagaaccggtatctcaaggatccgctcacctatgcggcagagtggcagatgcatctggcgtgggcaggcacgcagctggaacaggccaagtggaagatcctgaacacgcgcgagggccttgggcaccgccagcagatgatgctgcagctcatgaagcagcggcaagtgagcgcgcagaagacattggcgcagcagca

SEQ ID NO: 4030 - DNA, 11267 bp, Unknown
  16S sequences of unknown bacteria
agccgaccactctgcggcgggcacggttgacttccgtgatcttcatcttgaccgtctgcttcaccagcgcggacaggtcaccgcccttggcgatgccagactgagaagcggggatgaacacgcggatgccgttgacattggcgaccaagccgcccttgttctcttccgtgatcgtgccttcgacaacgtccttgttctcgcaggcagcttcgacctcgtcccagaccttcaggccgtccagcttcttcttggagagctgcaccgtaccctcggcgtcgttgacgcggacgacaaagacctcgatctcgtctccgaccttcaggatgtcctcaggcttgaccgtcgggtcagcgctgacctcgtcataaggaatgtaaccggcatgcttcgtacccaggtcgatctgcacttccgtcgcgccgatcgctgttacaatacctgtgaccttatctcctgtatttaaagttttgatagactgctccagaagttcttcgaagctctcctccattgcagtatcaacagtagtaatttcgctcatcgtcttattgacctcctttattatccacgccggcgtcgatgcgcctgccgtgatgcttacagcatgaacgcccttaaaatcagccttctgcagctggtccgtgctgtcgatcaaggagacctgcctgcaatactttgcgcaaatctgcgcaagccgcttcgtgttggaactctgcttatctccgatcacaatcatcgcctggctctcgcgggccagggatgccgcctcattctgccgattttcagtagcttcacatattgtatcaaatattttgcaatttgtacactctttttttacgattttagcgcaagaattccacaaaaattttgtggaagtggtctgacaaaccatcacaagcggcaaattgcgccgctgcgggtccgcaaagagccaattttccagctccgcagccgattcgaagatcaaaggatcgtcgcaccagcctgcaatcgccaggacctccggatgggtcctcgtgccgatgatgatggaccgccgccccgcctgctctgcctgggcgacgatggtatggatgcgcttgacgaacgggcatgtcgcgtccagcacccggcagtgccgcgccgccagctcgtcatagaccgcccggcccacaccgtgggagcggatgatgaccgtgccgccctccggcgcatcgccaggcgtctcgaccgggcgcacgccctgggctgcaaattcctcgaccacatgacggttgtggatgatcggccccagcgtcaccgcaccggagcccgctgccgcctcccgggcgaccatctccactgcccggcggacgccgaagcagaaacccgccgtcttggcgactcttacttgcattccggcacctgcccgattttctcttccacgatgcgctgcagcgcctggacgctggcaggcaaatcaagcgcgctggtatcgaggacgacagcgtccttcgcctgctttaacggcgcgatggcgcgggtggaatcctgcaggtcccgctgcgccaggtccttctgcacctggaccacggtctgcttgccgcccttttcctgcagctccagccagcgccgctgggcccggacggcgacgtccgccgtcagaaagatctttacatccgcctggggcaggacgaccgtcccgatatcccggccatccatgatgacattgttcttgcgcgccagcgcccgctgcacgtccagcaaaaattcccggacgaccttctgtgccgagatcagcgacgccgcctgggacatctccggcgtgcggatctcgtccgtcacgtccgcaccgttgaggatcatatgctgcaccccggcttcgtcatagcgaatttccagattcacatcgtccagcagccgggtcacgccgtctgtatccttcgggccgatgcccatcagggccatatgatacgccaccgtgcgatagatcgcgccggtatccacatagcggaagcccagcgccgccgccagctgacgcgccagcgtgctctttccggccccggcagggccgtcaatggcgattgcgtaagtttttttcatagtcgttactcctgtcggaccgccaggcccgcggcataggccgtggaccaggcgatttgtaagttaaagccgccggtataggcgtcgcagtccaaaacctccccggcaaaatacaggccgggcactttttttgacgccatcgtcttcggatcgaccgaaagcttgacgccgcccgccgtgacaatggcctcggcaatgggccgggggccgcggatggcaatcggaaacgccttgagaagctgcagcagcgtccgccgctggaccttcgtgatgctgttgaccttctgcgctgggtctatcccgcagcgctctgccataatgggcaccagcttgctgggcagcagaccgcccagcaggctggagaaattctgattctgccgggccgcgatctcccgcaggagccgggcgtccagcttttcttcgtccagggcgggcttgaggtccagcacagcccggtagcgcttccccggctcgacccgggcgctggcgctcaggacgatcgggccgctcagcccgaagtgggtgaagagcagctcaccaaagtcccggtataccgccttgccgctctcctcctgcagggccagcgccacattgcgcagggagaggccctggagccgggcgcaggtcgtgccctcctcctccagcggcaccagggacggccggggtgcgataatcgtgtgccccagagccgcggccatccggtagccgtcgccggtggagccggtggcggggtaagagcagccgccggtgcataaaataacccgcgccgccgcgattttcccatcctccgccgcaacaccgcagacgcgcccgtcggccgtcaaaatctccagtgcccgggtgtgcaggacctgcacgcgcatctgccgcagctcccgccgcagcacatccacaatgtcaaacgaccggtcggagaccgggaagacgcggttgccccgctctgttttcagcgggcagcagcgggattcgaaaaactccatcgtatcttccggcgtgaagcggtgcagcgcgctcatcaaaaagcggccgccccggggaatctgctgcagcgcctcctccggcgtgcagtgatttgtcacattacagcggcccttgccggtgatccccagctttttgcccagccgctcattgggctccagcagcgccacacgcaggccgcccgccgcggcagtgatggcggcaaacatccccgccgcaccgccgccgatgaccgcgcagtcaaactgcgccgactggcttttcattgattgctcgctcgtagacttcatatttatcccaaatccgctccagctctgcaaaggtatgggagagctccccctcccggcgctgcgccgtggcgacgatcagcgcattgatcaggctcaagggtgcgacgagggaatccaccagagagaccatatcgctcttggccaccagcacatggtccgcgcagcggcccacgggggaatcggcataatccgtcagcgcaatgaccctcgcgccgacgtcccggcagaattggactgccttcgtcgtcgaggtcgagtaccgggggaagctgatgccgatgacgacatcctccggcgtgatccggatcaatcgctcgaagagatcccccacgccggcgttgttgacgacgcagacattatcaaacatatagccgtagtaaaagcccaaaaaattggccagcggcgcggaggagcgcacgccgatgatataaatatgcgcggcattcaggatcgtattgaccgccgcggcaaaggtctgccggtcggccagctcgttggtctggcggatcttatcaatatccgcctgcaggaccatggacagcacatcccggtcgccgatgcggtcgttggtgacttccatgcgctgcacggaggtcagccggttcaggatcatctcctgcagggccttctgcatctccggatagccgtcgtaccccaggcccacggcaaaccgcaccaccgtggactccgagacctggacgacgccgcccagcttactggccgtcataaacgccgccttgtcgtaggcggacaggatatacttggcaatcaatttctgccccttggaaaattttgacattctgctctgaataaccgttaaaatatcggcaaccatacttccctccaatggcgcaaacaagacttctctaaaaacacttgctatcatacaaaaaatgaaaaaattttgcaagatgcaatcgcgcatcctgcaaaatttttttacactttttttaattttgcggcttcctccgccgttaagtaacgccacgcacccaccggcaggtcccccagagccagcgcgccctcgcggatgcgcttgagccggtttgcgtgcagctgtgccgcctggcacatccggcggatctgccggttgcggccctcgtggatcgtgatctccagctgcgccgccccgtcccgctgccacaggcagcggaccgccggttttgcaatttttctcccatcgagcacaatgggccgcgccagcgcctccagtgcgccgggggaaaagcccgtgacccagacgagataggtcttatccacctggtgcgatggatgcgtcagccgttgggtcagcgcgccgtcgttcgtcaggagcagcaggccctcggagtactggtccagtcggcccaccgggtgcacccgcaccgggcagtcgtgcagcaagtcctgcaccgttttccgcccccgctcgtcgcgcagcgtcgtgacatagccccggggcttgtggagcatcacatagacaggcgctggcgctgccgccagcggcgcgccgtcgacggtaatcgtatcgcacgccgggtccgccgtgtcgcccagccgggccggtgcgccgttgacaagcacgcgcccggaggcgatccactgctccgcctggcggcgggaggccaggccgcggcctgcgatcagcttttgaagtctttcctgcatggttgattcaatgcatcctatccgttccataatttctgccagaaggagcggcgctctttctgggcgatcttgatctcttcctttgcccgcagcgggcaggacgccaccgggtagccgtccagcaagacctccgccgttgcgacgatctgccccgccttgaccggcgcgtagagaaaatccggcgcgaggatgcggaagctgacgcgctccgactccgccacagggaacgtacatgtctcggccgccagcaggtcgcaatatgtctgcgccccgcctgccaccggcagctcgcagaccatctgcccctccgtcagaagcgccttttctgcaaacttgccgaaggcatcatccaggagcttttcatggtcgcgccagtcgtccggcgcgttgatcgtcacggcgacgagccgccgcccgccgcggaccgcgctgctgaccaaaatgcgccccgccgcctttgtgtaaccggtcttgaccccgtccgcgccgtcatagcgccagaggagcttattgtggttgcggaggctgcggccggggatgctcgctgtcttcgtcgcggcaatgcgggcaaacgcgggctgcttcatggcataggccgcaagataagccagatcccgggcggtggcgtagttcccgtcgtcgtccaggccgttggggttggcaaagtgcgtatctcgcaggcccagggccgccgcgcggcgattcatctccgccacgaaggcggggacagagccgctgcagtgcagcgccagcgccacggcggcgtcgttgccggattgcagcagcaggccgtagagcagctgctccaccgtcagcacctcgccgggcttcagatacagcgacgacccttccatgccgcaggcagcggcgggaatcgtcaccgcttcgtccagcgggcagcgctctgtgatgagcaggcctgtcataatcttcgtcgtgctggcaatcaggcgccgcgccccggcgtccttttcatagaggacgcgcccggtggcgcagtccagcaaaacggcgctgcgggccgaaagctccggcgccgcctgcgctctgccgggcagcagcgccgcaaggcaggcaaatgccagcgccgcggctatcacgcttcgcagtttgcgcgttgctccgattttttcttgcatgtttcatcaccggcgatagtatctccggcgaaaagcgcaattattccgccggttcctgcggctttttccggccgtccaggaaatcgccgagcttgtccagcagctccggcagctgctcgacgatgcggtccgccgtcgaattagccggaacggcaatgggcatcatccgcacctgctcgcccttaataattaaaaacgcgatgggtgtgatcgtcacgcctgcgccggagccgccgccgaagggactctcccggttcgccgccagattcttcgggacaaaatccgacccgccgccggcaaagccgaaggaaaccttcgagatcggcaggatcgtcacgccctccggcgtctggatcgggtcgccgatgatggcgttggcgccgatcatatcccggattttactcatggtcgtgtccatcatatttcccagaggatgactcatgctattaccgcctttctgcgtctgcgccggaccggcgcggccgtctatcttttttgtattataatgataataaggttacgcctccgcttccccgccgtctgccgcagagctttccggggcagtctggctgcgatagatgcggtacgcccgcagcccatagcgcagcgccagggccagaacatccagaaccagcagccgcacctgcaaaaagcaggtaacacgcagcaatccgccggtgaaggcgcattccagcgccaccgcctggcggcgaatgcggaagacctgccccagctgcggcagcagcgcatgggcgacggcctgggcctggccatagcgaatggctgtcttcgccgggtcctccccgtcaaaggtgatggtcagctccagccgcttgaccagcaagcgccgccgcagcgcgccgagaaacgagagccccagccggacaaacggcctgaaatcctcgagcctcccaccggcccgatgcgccgctgccacagcaggctttttgcgcgcctttttctgcttggaagcgctgcgttgcgctttcttcttccccccggcctttttcggctttgcaggcaggacctgcagccgcaccgggcccaggcgcagggcgacctgcgggccgccttcgtcaaaggcgacatccgcccccaccggtaaaagcaacagcagggcgaaaaacgccgccaccgcgcccaggacgatcagggccgtcatgccgtgggcgccgcgggtgcggcatccggcacagcggcaggctgcgccgcgtcctgcccttccggcgggcgctgcggcttgccgaatttgatcttctcgatctccggcagctccgccaggctctccagcccgaaggtccgcaggaaatctggcgttgtctggtacaggatcgggcggccgggcacattcagcctgccgcactcctcgatcaaccccttggtcagcagcgcgccgacggaataggagctgtccaccccgcgaatctggtcgacataagcccgggtcgcgggctgataataggcgatgatcgtcagcgtctccagctgggaagccgagagcttcgggggcttgcgcgtctccagcgcttttgtgatatagctcgaatatgccccggcggagcacatctgataggaattctccagcttgacgatgcggatgccgtggcgcgcaaaggccagccggtccatcagccgctttgccgcctgctcgacctcgtccagcggctgctccgtcgccagggcaagccgcgccgcggggactgcctccccggctgcaaataatatggcctcaatggcccgctccaattctgtctggtccatgcttttctcctctgctgcccgggagtcggcgcgcaacgcaatcgtcaaatcgactcctccggcattttttcaaacaccacgtctacatcatccgcgccgtccgccgtgtcctccaaatggacggatttcacgcggcacagctccaggatcgccaaaaacgtcgcgacgatctcgctgcggctgcggttgccccggaacaggctcttaaaccgcgccacaccacgcaggaccagccgcttgagcagctcctgggcctttttcgtcaccgggtacggctccgcgccgacgatcccggcaaaatttgccgccggcggcggcagctgccgggcgctgcgctcggaaatggtggccagggcccgcagaaggtcccccggctcgtgcttgtagcgataggtcttgtccgcctggtaggcctcctggcccttggtgaagaggttccgcccgatctcgttgcgctcctccaaaaacttcgccgcgatttggatctgcgcataggccccggcgcgctggcgctcctccagggaacgaatgagctgttccatctccgacatggcctcttcccgctccgtcacggagagcagcatcttcgtcttgatctgcatcaaatgggacgccatagcaataaattcgctggcgatctccatatccatgcgcttgcgctcttccagataggccaggtattgctccaggatcgacgtaatggagacatcctggatctcgatcttattcttgctcagcagcaggaaaataacatccagcggcccctcaaaatcctccatggattcctcgcgggtatgcactacgccggacaggtgatatttcggttcttccatcgcgcctcttttctaacaaatgctcacgccaagcccctctacaggccggaaaacagcccaacgacgccgcgccacatgccctgcacgacccactggagccccgtgttcaaaaagccatccaggcatcccaggaccaccagcaggatcagcaaaagcatcccatagcgctcatagcgcatcagccagctgtacgcccgctggggcaaaaatgcaaacaggaccttcgacccgtccagcggcgaaatagggattacattaaatacagccaggccgcagttgatgacagccaggtcctgcaaaaacagccccagatagacggccgcctccccctgtccataccgcaggcagaaataatagccgcacagtgccagaaagccgaagagcaaattggaaaccggccctgccagggccgtcaacgccatcccggccttgggatttttaaaattccgcatatccaccggcaccggctttgcccagccgacatgggcgacggccagcatcacgagccccaggaaatctacatgcttgaaggggttcaggctgatacgcccggcccgctttgccgtcgggtcccccagggcggcagcgatcagcccatgggcgctctcatgcaccgtgatgcacaaaagcgccgccgcggcggacagcagcagcgtcaaaagataagaaaagtccaactgatgcagccaggcggaaatgctcatgcgtgcctcccaaaacgtttgcagcacccgcgcgccgcgccgggctgccctttggtattttattcagtatagcattgccgcacgaaatatgcaagcttcgtttgcccgccacccctggaacaaaccgggaaaatcatatcgaataaaatgtatcaatttcgaattttttccgttcatttccatcgtattcgtataaaactatcggtataaaaagaattttttatacctatttacaatattcgaaaatcgtgtataatggaaagtaatacaccgagaacacgcgtgttttttctatcacgaactttggagggttccacatgagcagactttacatcaaatcggaaagtcaggcacaggctgtggtggacgagctctacaggagcattgaaaaccgcatcgccgccagtcccccggggctgtgtcctgtcgatatggcgctgaatttcttaaatctctgtcatgcgcaaacctgcggcaaatgcgtcccgtgccgggtcggcctggggcagctgtcttccatgctgcagcgcgtgctggacggcaacgccacggaaaacaccctgcagctcattgaagatacggcccaggtcgtcgttgacacgacggactgtgccatcggcacccaggccgcgcgcctggtcctgatggggctcaagggcttccgggaggattatgaggagcatgtcaagaatcaccgctgcctgggcgggctgaaaaacccggtgccctgcgtggcgctgtgcccggcgggggtcgacgtccccggttatatcgccctgatccgcgaggagcgctatgccgacgcagtgcgcctcattcggaaggacaaccccttccccacggcgtgtgcctatatctgtgagcatccctgtgaagcccgctgccgccggaatatgatcgacgatcccatgaacatccgcggcctgaagcgcttcgctgtggacaacgcaggctccgtccccaatcccccctgcgccccggccaccggcaagcgtgtcgccatcgtcggcggcggccccggcggcctatccgctgcctattatcttgcactcatgggccacgacgtcacgatctacgagcagcggaaaaagctgggcggtatgctgcgctacggcattcccagctatcgtctgccccgggagcgactggacgaagagatcgcatccatcctctccaccggcatccatgtccataccgaggtctccattggcaaggacgtcacattcaaggacctcaaaaagcagtatgactgcctgtacatctccatcggcgcacataccgacaagaaaaccggcatccccggggaggacagccacaatgtcatgtccgctgtcgaaatgctgcgccgcatcggcgatgacgatatgcctgattttaccggcaaatctgtcgtcgtcatcggcggcggcaacgtcgcgatggacgtcacgcgttcgtccatccgcctgggcgccaagcaggtcagctgcgtctaccgccgccgggccgaggacatgacggcccaggaggaggaagtccagggtgccgtcgccgagggcgcggagctgctgacgctgcaggccccgatccgcatcgaggccgacgaaaacggcaacgccgtcgctctgtggacccagccgcagatgctgggccggatggacgagcgaggcaagccgaagatctctgccgcatcactgccggagcgccgcattgcggcggatatgatcatcgtcgccatcggccagggcatcgagtccgatgcctttgatcagagcggcgtcaagatcacccgaggccgcattgccgcgcaggacagcagccagctggatgaaaacagcaacgttttcgccgggggcgactgtgtcaccggccccgcca

SEQ ID NO: 4031 - DNA, 16688 bp, Unknown
  16S sequences of unknown bacteria
ttattctactgtatttattaaatttcggtgttttcggtagttttttccacggtatttccgccgctttcacgcaattttctcagtctgagctgaccgcacgacgcgtttatgtcagaacccagacggcggcgtatcgttgcgttgactccttttttcgtgagttcatccgcgaaggctctcgctctctcacgtcccggagttttaagtccggtttcgcttacctcgttgagcatgatgagattgacgtgggacggcgcgcgcattccgttttttatgactgaggcaagcctgtccgcgtcatgtgcggtgtcgtttttgccggagatgagagtatactcaaacgaaactctgcgtccggttttcgcaaaataataacggcacgcttccatcagctccgatatgttgtatctcttgttcaccggcatgagcgcgcttcttgtttcgtcgtcggaggcgtgaagagaaacggacagcgtaacgggaagtccttcatcggcgagctttttcactctcggtgcaagtccgcaggtggagagcgagatatgtctcagtcctatgcccagtccgtccgggtcagacacaaggtgaaggaattttatcacgttgtcgtagttgtcgagcggctctccgattcccatcataactatgccgtcgactctctctcccgtatcgtgagttacagccgcggcctgcccaagtatctccgatggggtgagattgcgcactcttccgttcagtgtagacgcgcagaacttgcagcccatagcacaacctgcctgagaagagacgcaaaggcttgttccgtgctcgtaatgcatgaatacggactccacgcattctccgtcgataagcgaaaagaggtatttcacagttccgtcaattgccgagacatatttttcgacgattttcggaagcctgtattcacattcgtttttcagcttttcgcggaaggatttcgagagattgttcatcccgtctatctcttccccgcgcgacatccatgtgaaaagctgcgccgcacgaaattttttctcgccgagcgattcaacaacgggaacaagctcttccttcgtcattgacattatgtccggctttttttctgtttcagtcattttattctaatcattctcgcggcaaagaatccgtcgcatccgtccctgtgtgggaggaatgtacgcataccgccgcataagtattcgttttcttcaagcttaaagctgtcgtttgagtcgaggaacgcctttaccacgccctcgttttcatcgggattcagcgtacaggtggaataaactatcacgccgcctacccgaacatactccgccgctcctttcagcacgtcaagctgtattttcggcagattttcaatatcttttatgtttttataccgtatctccggcttctttgcgataactccgagaccagagcacggcgcgtcgcaaagcactctgtcagcacttccgataagctcatcctttggttttctcgcgtctctcgcttccgtttttattatatgaatgccgagcctttccgcacccttttcgacaagagagagcttatttttatgcaaatcgaatgaatataccgcgccctcgtccgtcatatcaatagccatcgaaaagctctttccgcctggacacgagcaggtatccacaaccattttccccggctttgctccgactgccagagacgttatccgtgacgcttcatcctgcacgaaccatcttccgtccgctattccctcgcgtatctcgtcgctcatgcagtcggtgaggacaacgtcgcgcgctatgacggattcggtgcatccctcgggcaatttaggatttttcagccgattcagtctcagcgcgatatgcggctcacggttcatggcttcaagcagtgcgtcgatatcgtcgggacaggcttttttgtatattctgcaaatctcgcgcggtacggaatactgcacttcaagccgttcttcttcatcttcaggaagcgtgaactttttgccgcctcttatgaatgagcgaagcaccgcgttgacatacccgcttttagccctcgacacaagctccacggattcgtttaccgcagaatggtcgggaattctgtccatgaacatcatctgatacacgccgagtcgcaaagcagtcagcacatcatggtcgagtttgtccgcgctcatcctcgaatactgcgatatgatatagtcgagcgtgagccgtctttccgtaactccgtagacaaggcgcgtgtacagtccgcggtctgcttggctcatttcggatttttcgagggtggagtctatctcaaggtttgaatatctgccgctttcctcgatttttctgagtgaatcgaaggcggcgcgtcttggatttgttttgattttttctgtcatctgtttctgtcgttccgttttgctatcgaaagaagtctgaggaagtttcctatcgccgaagcaagagccgcaacatatgtgagagccgcggcagtcaatacttttcgtgcagcctttactccgtcctcgctcatgcctgaatccgcgagagccttcaccgctctggagcttgcgttaaactcaacgggaagtgtaacaagctgaaacactaccgacgcgccgaagagtatcaccccgatgtaagcaagcgtagagaaagagaacacgattccgagcaggaaaatggggaatgccgccgtagacgcgagatttgtcacggggattatagcggaacgcaccttcaccgggaagtaattctgcgcgtactggactgcgtgtcccgcttcatgtgccgcaactcccaccgccgcagcagtctgcgctccgtacaccgattgggacagccttatcacgttggctttcgggtcatagtggtccgtcaagtctccggctacctgctctattctgacatagccgagtccgtttctgtcgagtataagccttgccgcgtcgcagcctgtcattcctttgtcggagctgactcgggaatacttcgcgaaggttgtttttacgttgaactgcgcccacaatgcgaaaatcaaggcgggcagcacgaacacgatatacgagtaatctataccgtagtaatatccgggcataatcagcctcctgtcagtattttaaaatatctcccacagaaatacgtctgcctcttatatagtccgcgcttttcataggtttctttccctcgggaactacacctgtcaccgatatacagccgtctccgcatgacagaactatctcgccctctcccttgtccgaaagagctgcgacctctcccgcgttatccgttttttccatgtcggacagacgcgcgtgtgtcagctttaagagctttccgtcaggggttcttgtaacggcaagaggggcaggagacagtccgcgcacaaggtttactatatcctcggcgttcttcgtgaagtctatgactgtatcttccttttctatctttgcggcgtatgaggatttttcgtcatcctgctttgttcttgtgatagtgccgttctcggtcatgtctatcacgtcgcacattgccacacccgcgaggactgccagcttatcgtggagagagccgaaatcgtcgtcgggtgtaatatcgcaggggtatatctttataatatctcccgtgtcaagtccttccgccatgtacatagcagtgattcccgtaactttttctccgtcgattatcgcgcgctgtatcggtgaagctcctctgtacttcgggagaatcgagccgtgagcgttgacgcatccgtatttcgggtagtcgagcacatatttcgggagtatctttccgtatgccgctacaattatcatgtcggggtcgagttttttcagctcatcctcaaacgtgccgttttttagggtctgcggctgatatacgggaattccgtgctcctctgcgaaaaccttaaccggcggcggaacgagcttcataccgcgtccctttggcttgtcgggctgagtaagaactccgactacctccacgtccgccttattgtaaacagcttcaaggcagactgcggcaaggtcgggagttcccatgaacaaaatcttcaatatatttcctccgttatctgtcgcccatcatctcgtccacttcgtcgggagttaagatgtgtaccgctttgtcagtgaacagctttccgtcaagatggtctatctcatggcagaaacagcgcgcaacaacgccttctccttcggcagtgaattcttcacccttgcggttcattgccttcactatgaccttagccggacggtgagtgtatccccatacgtcgggaattgaaagacagccttccaccgcttcctgttcgccgttttcgtagattatcttgggatttataagttcaagcacctcttcgcctgtgtcaactacgcagattcggcgcagaattcccacctgaggggcagcaagtccggctccgttcgcgtcttcgagagtttccttcatgtcgtcgagaagtcttattatcctcggtgttatctctgtcacgggacggcacaccttgcgcagtgtatcgtcgccttcttttactatattaagtattgccattattatacctctgtttatataattgtattattttctcttttttatactgtgctggggtttaagtcagccgtcacggttattctcgcgtttgacttgaccgacgggaactttttcgcaagtccgctcggagataggcgtgaaaactcgcacacaagttcggagataaactcgcgcattctcttgttcaggcggcactttatcacaaaccgcatacggtacatattctgcacacggtacagcggcgcttcaaacggtccgaacagcatcatcggaatgtcgtggtagtcgtcccgtatgtgctcctttatcctatcgaacataagatttgtcatcattccgagatatccctcgtcggcggaggacagcgtaatcaccgcgatatcgcagaacggcgggaagcacagcgcttttctaagtcttatctcgcttttataaaaactcttgtagtcctgcgaagccgctcggagaatgacgtcgctttcgggattgtacgtctggattatcgccttgccggggacatttccgcgaccggcacgacctatcacctgcgtcagcatagcgaaggttctctcccctgctctatagtcgtcgagagcgagagagttgtccgcgctgagcactcctacagtagcgacacgcgggaagtcatgtccctttgtcaccatctgagttccgagaagcacgtctgcctgtccgcgtcggaatttgtcgagaatttcctcatgggagaatttcgcctgcgtagtgtcgtagtccatgcgcagtattctgaggtcggggaacattgacgcgatgtcgtcctcggctttctgcgtaccgcatcccatgaagaggaagtgatcctttccgcattcggggcatttttcgggaacggagcatctgtagccgcagatatggcagacgagatacccgccctctcttcggcttttttcgtattcctcaccctgcgcgtcgggaagcttatgcatacttttcgcgtgatatgtaagggtaacggagcagttcgggcattttatgctttttccgcagctgcggcacgagacgtaattgttgtacccgcgccgattcaggaaaagtatcgactggttgccgtttgccttatcctctcgcagtctcttctcaagcaccgagcttacgggagagatgtttccggcggcggcttcacctctcatgtctacgatatcgacggcgggaagcggcatatttccgtatctttccgtcagctcgatgagagtataaactccgctctccgccttatagtagcttgtgacggaaggagttgcggaggacagcagcatgacggcattatggtcggcacatcgttttctcgcaatgtcatgagccttgtacttgggatttgtgtcggatttgtaggtgtattcgtgttcctcgtcgattacgataagtccgatattcgagagcggcgcgaatactgcggatcgggttcccacaacgacacgggcaagtccgtcctttatccgtctccacgcgtcgtatctctcacccgccgacagacccgagtgtatcaccgcgatgtctccgccgtatctgcgagtgaatatgccgacagtctgcggagtaagcgcaatctccggcaccatcatgataactccgcgcccgctgtcaagcacatggtcaatcgccgccattatgacagaggttttgcccgagccggtaactccgtgaagcagagccgccgcaggttttccgccgtcgcacagctctattattttctccgccgctttcgtctgttcatcattcaggacaggcttctgcacgggcgtttcatcgtaattctcggcggtatagtggttgcggtattcttcctcttcgcatgaggtgagaagtccgtctttttcaagagaatccgcagcattctttacggcagttatctttatgtcggtcgcgtccgctatctcgccgagtgtagaggggctgttttccgcaacaaaagcgaacaccttttgcttgttcactccgcgcagctttttcacctgagccgatatatcctcgctgtccgttgaaatttcgtcggcgagtgagtatattattttcttctttgtggcggcttgtcccttgatttcggttatcttttcgatgtagccttgcttttcgagctgatacaccgttccagacacgtcaaagtcaagctccgactgtatagtttggttcgagaatcgcgtcttagtctttgcgatatcgagcacacggcgcgccctttcggtcagtgatgcggaatacggtgcgtttgctttttcgggaactgctttatagtatgtgataaccctcgacattgccgctgcgggaactatagctttgagcgcttcgctgaacgtacacagtgtatattctctgacgaagcggcaaagaccgagctgttcctcgtcaagtatggggtacggacttatgacggaagttatcggttttgtgctcatcgggacttctcccatgacaatttcgtcgactattcccgtcatgcgcctgtttcccctgccgaacggaacttcaactatcgctccggggcaaatttgagaagcgacggcgtccgggatatagtatgaataagccttatccgcgtgatacggaatatcgagaatatataccttagcttcccctgccatcgctttacctcacataatattagttttatcgaaaatcacattacgagatcttcgttgagttcctgctcgttttcagcctcgttcgccgcgtcttcttccgctctgttttcgtcaggcttgtgtccgccgagcattacaacatgaccgttcggttcgattatcttgaattcaccgctgtaaagtccgtttatcgcggtttttactgccttatcatcgcgatattcacgctttatcatgcttgcgatgttgttcttcttgtcggaatccttgttgagcgcgattttctctgcgtattctctctgctttacatattcatcggtgatgattcttgcgcactttgatgttgcggttacaagctcatagcggtttatttcgttattctttaaaagttcgtttactgaaggatatatcatgatttgccctttctgtatatgaaaaactgtatttttaactgaattaatcgaagtagtggctgataaaatcttcgcggcgtgagtatttctgacgttccgctttgattatcgccacaatattctctgcgcattcctctaccttaccgttttcgttgactacgatatagtcgtacatcggtgcaaggctgatttctttgcgcgccgtcgcaagtctgttgagtattgcttcttcggagtccgtgcctcttccgcgaagccgtctttcaagctctttgtggtcgggagctatgagcattaccgcggtacattcgtctccgaggagcttttttatctgacccgcaccgtcaacctcaatttcaaggataaggtcgcgtccggaatttactattttttcggcttccgagcggagtgtgccgtaataattgccgttatatgtggtatgctcgaggacttcgccgctttcgatgagcttctcaaactcttcgcgggacttgtagtggtaatgcacgccgtcaacttcaccggttctcttctgtcttgtcgtggcggaaactgatactccggcgttcgggtatatcttacggagctgttctacaaccgtacccttgccgctgccagacggtcctgaaataacgataactattcccttattcatcgctttcctcctcatccgcgccgccgagacgtttcagcattgtctcgttctgcaaagcgcagagtataatatgatcggaatccattatgataatgcactgcgtttttcttccgcaggtacagtcgatggcgcgtccgttgtccttagcttcctgaatcattctcttcgcgggagcggaatccgaggctatgaccgcaacggcacgatcggcatttatgatattattgaatcctacgttaatgaatttcacgccgtcctccgcttattctatgttctgaatctgctcgcgtatcttttcaagctccgtcttcatctcaacgacaaggtgcgcgatttcggagttgcccgcctttgagccgatggtgtttatctcgcggtttatctcctgtacgaggaagtcgagctttcgtcccgccgtctcgtcggagtgaacaatctcgtcgagtgccttaaagtgggagtcaaggcgcacaagctcttcgtcaatggcggctttatcggcgaaaatcgcggcttctgtgaggatgcgctgttcggtagtctctacgtcaaagtcggagagaagctgttttatcctctgctcgagctttgcgggatagctctttatgtcgttctccgaaagctcctttatctttgccgcagacgcttttattgtctccgccttcttcatcacgtcgatgcaaagtctttcaccctcagccgcgcgcattgcaatgaatccgtctacagcttcggagagaacggtctttatctcctcccagtcggaatcaaggtcttcatccgcacgctttgtggtaaatatgtcgcggttttcggctaccttcatcgttgtaatatcgtcgggaagcgaaaactcgtctctaagctccttcagcgcgtttatatacgactccgccgcagccttatcgagaactacagtgtcgccgcgtttttcgagcacgtcaactccgatgtaaacttcaaccttgccgcgtgacacacctgcgcttgtgaggtacgattttaccttatcctcaaggcaggagtacgcgcgggagagcttcaccgaacagtcgaggtatcttgaatttacgctttttatctccgcggttatatcgagcgcaccgtcagatgaagtcctgcgggaacgtccgaacgcggtcatacttttctgcatttttatctccgatatatttctcccatgagattttttaccctctcgggagtaatgaaaaatcacaaaatttatctactttatattatactataaaaaaagctccgttgtcaacgaaacgaagccatttttatcagttctgtatagttatctcttggttttggcaaactttttgcgcagctttaccatgtacaaagtgatgcacgcgctcaggcagaagtcgtaaagcacgaagaacaccgttcccaccgccaccgtaacgacggagagagagaagaactcgtctcccgccatgaaaacgtactgtccgagcaccacaaggagcaggagcatacagtcaaggcacgatattttaacaagccacgcgaacagattgcgcattctctcaaagtgcatttttagaatcgggtaaaccgcggagagcattatatattcgagcgcgtacagctttgacgggagcagaatcagcgcgagtgttgacgtcactccgacatatacccacgcgtatttctcgccggtctcgacaaggactaccatcgtcatgattgcgcacaccacgagcagtgacaaatctgcaaccgtgaatccgccgatatacaaaaacacaatgcacagcgccgcgaatataccgcacagcgtgagtttttttgtcatatccttacttttcataattcacctcagcagcacggaataagatctccgccaaagcattcacagcaggtgtcgcagcatatcagagtcgagcatgttccgcatacgtcgcagtcggagccgcttgtctgtctgtatgttccgccgaaattgtttgagcgggcgtgcatacggttcttcgcttcacggtactcgttgttctgcgggtcaaggtaacaggcgatttcgatataccgcatagcgtcgtagtagaatcctctttgtgcgagcagatatcctttgaggaaattccactccgcacctctgtcacccgcgggagttgagtcgattatcagctctgcgtcggagaacttgccctcgttgatgagccgtctcacctgatagaaggaagttgttcccgacgagctgtaggtattgtacgagccgccgtatcctccggaatatccgctgtttgtggttttacccgagcgttccttctggatgatatcgtaagcttcgtttatctccttcatcttctcttccgcaccctcggcagcagcaccgcctgaacctgcgaaattgtcgggatgatatttccttgcgagcttatggtatgctttttttatttcgtcatctgacgcgcttcgtgatacaccgagcacatcgtatggatctctcatcaataatcgttctccgtttgcttttcagctttctttttatcttttttgtcttctacggctctctcaagcgacttcaccatgccgaggtacaccgtattttttattaccggggtcattatgtgcgttttgtcgagcttttctattgcttctccgagaacttcaagctctataggcgcggaggtcatgactgcttcttttaccataggcgacattttgccgtcattcagcgcgtagtctccccacccttcggcgagaggattgtacctgtgcttttttatgtcctcggtcatgtcgtcggcggcgtcgcagatatacgtaaacctgccggtatgatatccgataagacgcgcgacctcggcagtctctccctcaagtccgagcgagaacacatacccgagaacctcaccgaacgcatttgccgtttctcccgccgaaccacacgactgcttttcaagctcatacagtttctcgagcctctctcggatatttttcctgcattcgatcggcaaatccctttcggcttctcttgcaaacgcggacagaacgggacggacagcggcggatttcaatttgtcaatgccgtgctcgtcttccctgtcatcgcggttcttttcatccgcaagtacagcagatattctcgcggcatacatcagcgccggattttcaagcatgacaagccggtttttcagcggatgcacaagacagcgcattggtttaaactccggagtgatgccctcaagcaccattctcaccgccgcaaggaacacaaggtcatacgaaagcgtcatgcgtgagagctgtccggtagcacgtccgatacacacgcaaagtccgcagtaggcggcgcggtatttctcgtattccgccaccttcagctcgggaacatagggttttatatatccaaacatagctcctcacgccgtaaaaacgatataatatcattatataatgttaccttaaattagtattctttgcaatggactttttgtaaatataatattaatccaaaaaagaaagacccgcgcggacttttttcggtctttgcgggtggtttcatatgtaatactttactttgtaataacgcggcggtgctccactatttctttgtctgcggaaacaatgagcttttttccgtcggtggaatacattccgaacaggacaacgctctccccgccgtatgattcacacacaacgacgtctgctctttccgcttcgtaggcagcttcgggatatctgtcggtctctatcgcgaaatagacgtagctgcgaccgctttcctccgtatgtatggctttgctcggcactgttatcccgtacggcgaatattcaagctccgtcgtttctacttttggcgagagcacccctctgatatttctgccgtaatgattgaacaggaacgcggatgagcaatagattagcatcagaaatacaataattacccgtttcatttcagcttgtattcccccagtccgtccattatttcttcctcaaaaaacgtgaatataaggagcggcagaagagagaacaccacagccgccgcgaatccgagcacatcccccgctttgatcccgctgagcaggacggttaggggatatttttcttccgtctccatgaggacaagcggctcggctaccatgttccactgctcggtgaaggtgagagcccacgcgcatattattccatgcttaacggacgggattattatgctccatattatcctgagtgtggacgatgtgtcaaggcgcgcggcttcaattatatcgtcgggcactgttttcatcacctgcgtcagaagaaatgctgcgaacggtgcgaatattcccggaagtatcatcgcgagcggagtatcgtaaacgccgattttttgcgacacgatgtactgcggcagaagcgtgacctgaaacggcatcatcatcactataatatataggtagaaaagtacgtccctgcccttgaatttgactttggcgaagacatatgccgcgagggttgacacaacgacagttccgactgacgctccgagagatatgattatggaattggtcagcgcgttcacatactgcgggttccagatgaagaaattcgggtacgccgctccaccgtcgtcaaacgagagaaacgcgataaacagcacaggcgagacgacagcaagcgcgagaatgcacagaaacacggtgaatataatatctgcttttttctttaccataccgagtcgctccatttcttctcgaatgcgaacactacggcaaccacagtatagacgagcactgcaaaaaatatcgcggcggtgctgatgttctggtagttgagcttcatgaagtggttgttcaggtagttttgcagcatatacacgctctcatccggatatccgccgtagagcagatacgactcacggaaaatcttgaacgaattcactatcgagaggatgaatgtgaaaaacagcgtcggcgcaatgttcggtattatgacatggaaaagcgtaccgatactcaccgcaccgtcgatttttgccgcgtcaagcatatccccctgcacccccgaaagcgcggtcagcatgagcataacgttcagcccgccgtacttccacagaaatatgagaagcagggacgaaaacggcgcaaaatccgaaaaataggcgttccacagcatgattatcgcagcggacggaagaatgaccggcaggaaaaacgcagacttcacaagcgggattcgcgcggcaaactttgctatagccaacgcaatcagaagagacagaaccatagtgagcggaacggacagcgcggtgaaacggagagtattcttcatggcaaggcgaaaatatctgttgccgaacagcatgacgaaattattcagtcccgcaaattttcctgtaaaggcgttttcggtgaaggcatagtagaacgtatacacaaacgggatgatgaaaaacaccgcaaatcccgcaagcgacggcataagaagaagtatatctgtccgttttttcataagctttaccttttttcattccatgagctgatacgaggcttcggagtagattttgtccgcagcttcttccgctgtcagcttgccttcgttcagtccgtcatagacttcgtttatcatgtcttcgagactgcctgtatagatcctcggagcggcgtttacgaatatatcttcgccgttattcacgagaaatgggttgcatccgcgcatatagaagttctcttcgccggaaagctttgtcctcctgtattcgttttccaatttgtttggttccggagagaagcagaaatacgagtccttatctttcgcaagatatgatttctgatattcggttatccaagcaagataatcatccgacacaagcattgagaggtactgcacggcaagatcggtatttttcgtcttagagttaatataagccatgctctctatgttaacatatctctttccgtcgtatgtgggaagcgagcgcaagcctttgtaatctctttcgtcaaaatttgagctgagagtaccgccgattcctccgatgattctgagcggaccgtctccgggagggttgaggttgagcgatcctgctttgcggtacttcatgtatgtttcaatgcactcgaggatggtgtcgcgggagatatcgccctttctcatgccgtcttcaaggatagagctgataatgtagtaaaacggcttgtggttcgtcaaggtggtgcagaacattattctcgaactgccggactcctcacagaagttccagaagtcgtcgagcgtgtagtcggggcttagcttgtcgatagtgttgttttcggaagtgaagccttcaaccgtcaggtagtacggtatgccgaaaatatgcccatcgtaagacataacgtcacggactccgtcgaaatatttgtcaaatccgctcgatatgctgtcgtaggcttcaagcgggagatacaaattgtagttcaaaattgaagcaagcagctcgtccgcgtgttcaagcataacaacatcgtagtcgtcgtctcccgcaagcagcttcagacgaagattttcaacaaatttgtcgtgcgcgtagccttttgcgttgaccgcgatcttgttttcttcctcaaactgcgtgttcatgcgctccataataccatgcatccatccgaattccgatacataatccgaactgtgcagagttacaattgacggactgtttctgtaaataaccgttatttcttcacctgtatcgttcacttcttcaggcagcacccaaataacactgttgctttgagtccaaaacataaatccgctctcggtataaaagacagatacaaaatatgatccctttgcctcttttccggcggcttctgcaacaggctttattctcgcgaaaatgtactcttcatttgtgttgcgaacaacgttaatttctccagaaggcaatgcgattctgcctatcaatatctcgccggacgtatttgactgatccataaagtaaaggcagttatcatttggtgaatagtcaactatgtatccgttgaccccgtcataaaccatctcatatttgccgtttgtcgcatctaaagaataaacctgatgattgccgactaagataaactcgttctccttgcttgtcggaatgattttttcaagcgtgtctccgtcccttacctttgtgtagtcatatgtacttattttgtttgtttttctgtcgattacatagattacgttttcccaaccttcgcgttgttcaacatgataaaagcagcagaccgctatgtactttttgtttatcgctaagctatattgactgatactcgctccaaggtctggcaggtcgatttggtttcttatatttccctcaaagtcaatatcatacactacatattcgcctgaaacatatatgccggtatcgtcaacatatatgtcatgcagttctttattctctatggtgcataataaatgatattccatagtttcaggctcgcgatagcctatgtttccgttataatatgttgcttcataaaatttgttgtcatatggatagacggctacaggttcgtcttctaaataatatatcccctctggaatagcgtcgcatttgtatttgcttgagctttctataaaatcatttttacacccacacataaggataagcatgaatgtcattaatattggtatgcaggttttcttcatgattatactcctgttataaaatacatagggtgccaacttatagacaccctattctcattactacttagtaactttatttaatgcggataacttccatatgggcagacatcatggcttatttcatcaatactatgttcgtattggcaataatgccttccataattatgttcaccacaatttacacaaacaaagtttgtatatccatatcgttcagttaacgtgcatatatacgctccctggcttgtctttccatgttcttcacaatgaatattttgagtttgactatcgtctattccaccacaatctatgtatgtaactgatggtttcatacagtatgaacatatcggtagtctcgcttcagatgcactaacaggagcaagaagaagcgcggttgcgaataaggctgcaatgattcgtttgagtttcatattaactcctattaaaataaatatatttaccatttcatccgttattgttggcatagacaattttcgctttcgctacacaatatgcttatttgattgaccgtacgcttcaacctctaaatcatactgtcggatgattttataaataattcgccttttttaacatttatttgctgttttgtttgcatataataagctttattgtcatatctactttcatcttattgtttttatgtctatcttgtgtatttataatatcatatttcgagtatttttgtcaatagatttttgaaaggtttccaaaaatttcttactattttttcgggaaaataaaaaaaagtccagtcgaaactgaacttttttgatgttggcgaataccgattttcccgagccgtcgccggcgaagtatcttaggcacg

SEQ ID NO: 4032 - DNA, 15922 bp, Unknown
  16S sequences of unknown bacteria
ggctcgttgcccattaccggtttgagacaaaggattttctttgtacatcataacaaaaaggatggtttggaatgtcaaaaaaagagtttaaaccgagtaatggttctcgaagtgcaaaaaagacgattatcgtcgtctgttctgtattgttgggcgttactttatgtgtattaggtgccgctgctttgtacattaaccatatgttggataaagtcgattatgaaaatacacccggtcaggaagacggacaatcggtagtcgaaatcaaagacgatcagaatctttggaatgatgatgttctcaatgttctcctattgggcaccgacgagcgttcggatgagtacagtgaaaacgcccgttctgactgtatgatgattctttccctcaaccgtaaaacgcataaaatgcgcctgaccagtctggagcgaggcattggagttcccattgaagggcaggaggatgactggctgacccatactttcgcatatggtggtgcggtactgacgctcaaaaccgtgcaagagtgttttgatttggatgtagaccggtatgtacgagtcaatttcaattcttttgaacagattattgacgcaattggcggtgtggacattgagctgactgcattggaagcgcagggtctgaacggtgaaatctataccaacgcgattaccaagcacaccgtctatgaggggtggaatcatctggacggctatgacgcactgcaatatgcccgtcagcggtttattgacagcgattggcagagaattgaacggcagcgcaacgtggtatccgctgcatttgataaggtcaaaaccttaagtgtattcgaatggaacaaccttttgggtactgcattgccgctggtaaaaacaaattttaccaaatccgaaatcacctcgctgttaatggacgcgcccggctttaccaatagcgaaattgaacagatgaccattccggcagaaggtacctatggcagcaaaaaaacttctgatgggcgcagccttctggatctggactgggaaaccaatattcaaatcctgaaaaaatttatttattcataatcttgtgcgtgggaaaaatcgaatcggagccaactttctgtttttggttttccgatttgttgcggatcatggcaaagcccggctatctgtctggatagccgggctcttaatttgcgctgtcccatatcagctcagtgatacgatttcttcccgtggaatgagtgtgatctccatattctcctcgtatccgagatcggctggagagaagggaagcatctcttccgtttggctgttatagatataagcgatgtattgattgggatgatccgccggaaggtagtcagaaccgtatgtctctatcgcctttgtaaaatccggattgggatacaaaatcatggtttgaacgttcgtaatgggatagaaaaagaactcttggtcggatgtaaaaatgggatccagctgacctgaatggataaaaagccgatacagggtttgatcgcagatgaaataaatcacggttttatcaaagaaataggcattttccatcggccagcggttgcgataaatttcgaccggcccctctaacgttcggataaaaaaggaacagtgattcccgccccattccaagctgccgagccccatatccgataagttttctatgtacctttccttggaaaaatattcctcatagctcatatcgccggctccatatccgcttacgataaaccggtacacggtcgattcatccccctcaatttggagatgctccggatctttttgctcctctgattcagaatcctgctgatcatcggaccgggaggaggcggtttcaccgggcatagatgaggcgttttcctccttctcagacaatccaacagattctccgccgccagcacatcctgccagaaaaaagagcagaaaaacaaacagataaaataaagcggtttttctcatgttccgttacctcctcaaatcctgaacatgttggacacgactgttcagatcattgatccgtttcttttcttcctcataaatacacctctttgcagtatgttgtatttcttttcaaacagtttaacaggcgcgctctgttctgcttggttgtataatctatacgtccaaaatcacaaaatactacatttctccatccccattatatattagctttttgggaatgtaaaacagaaattggggtaaatcctttttgctaccgacccaaaaagcagaatcatccgctttctttttccagaacaacgttttccgctggccggaagtaaaacaaaagctgtcttgcattctgcaagacagcttttgtcagttttcgtcccgtttcatgtggaaaaacaggcgcagcaatggtgaaaggattctggggcatttcatgacgacaactttcatacttaccgccctttcaaatgggatttgctttattatatacagcaaatcttctgttggtgaaagtggctttcttttacctgtccttggagacaacaacgaccaaagtccccttttctacactaatctgcgcagtttcctccaggatttcattactcagtcccaatgtcgtccagtttgtcagctttgcctggcgcagcggatattttacgcctgtcagtgtaattccttcgcagcagggcgtgtaggaaaaaatggaaagataatacccttccatcctcggcatggaaacacagctgtcccgcagcatcgtaatcatattattctggtcggcaatcataataaagacaccttgctccagcccataagcaactgtttgaagatttgccagcgtatgatcaaagcggccgccgatcgcgcccagcagtacaaaatcctcatacccgcgggaaatgccttcttttaccgccagcatcatatcagaatcatccttttccggacggcaggtcagcgccggaatcccttttggaaatccctccacaaaagaatcctgatccccgatcaacagatccgggcgaatgcccgcctgttgcgcgtggtacaagccgccgtcggcacagataatatagtcatcttccctccaggaaaaatccgacagaaaatctgcatccagctcgccggctccaataatcacacaacgcgccataaaaccatcctctcattttttctgcagttcccattccttgatgtttttcgctgcctcatataaagtgcagtagctgtcatgccgcgacgaggcaatctctccctctttcattgccgccaaaacggcacagcctttttccttggtatgtgaacagccggtaaacctgcactgattcagatgcggtccaaattcgcggaaacaatactgcaactgttcttttaaaatcacttcataacgttccagatccatagaagaaaaaccgggcgtatccgcaatgtatcccccgcctgaaacgggatagagctgcacatgccgggtcgtatggcgtccccgaccaagcttttggctgatttgggcggtagaaagatccagccggctgtcaatccggtttaaaaggctggactttcccacaccagaattgccgcagaaagcgctgatctttccttccatagaccgtcgcagcatggccaaatcgctgtcctgatccaatccggtgcaaaagacctgaaagcccgccttttcataaagtgcggcaagggtctcccattcccccagatcggttttggttacgatcaaaaagggctcgatctttttatgctccgcaatagcgatcagcttgtccagcaccagcaaattgggctgtgggtccgctactgaaaccactaaaaacaactgatccaaattcgccagcggcggacggatcaaactgtttttccgatccaaaatccgggtgacatatcccttttcttccccggtttcttctatttctacccaatcgcctaccagtggagaaacaccgttttttcgaaacagcccccgggcgcggcactcatacaacaccgcgtctgaaagcacgtaataaaacccgccggttgcctttaaaattctgccctgcaaaaatgcttcctcctagctgaaacaaccttttcatcaaagggcctcccgatatgggaagcccttttgcctactgaaaatcctgtgaatagtcggagtcaatttcatgaatgccttcgtcgaaatccacaatatactccatatagatttcatcgtcaatatagattttcacacgaccgattccttcgcctgagaaggacggcttccaggatgtcgtattcttgggatttatcgtctcccggcgcacttccatatcatccagataagcggatactgtcacatcgcggtcaatcgaagacggcaaaggcactgtgatcgtcagccgggaaaccaccgtatccccctggctgactgtcaggttcacaaaggaaccggtggccaccatgtcatcctcggcgggatcctgggacagaacagttccatatggctcgtcgctggtttcatccagctttacctcgccgactttcaacccatagctttccaaaacccgcttggcatcgtccacattaatcccggttacatccggcacctgtttcatcaccgtctgtgctcccaggctgacataaacggtcaccgtcgttcccgcttttacctcactgcccttggtaggctccgtcttaatgacataaccgctggcaatcgacggatggttcatgcgggactcggtatattccaatcccatattttttaattctgcataaacctgtgttgcttcttgattagaaaaatctggaatcgtaattttctgtgcgccgctggaaaccttaatttttacctccgccccctttttcaccgttttgggatacttaggcttctgctcacagattacacccttttcatattcgtcgctgtataccgtttcctctacaacaatattgaaatcagagtatttactggagttcagcacgctctcgtactgaatccccacaaagttcggcaactccacttcgtctaccgaaacaaagggattgttaaaataaaacatcagaaagataaacaggcaggtgaccagcacaaatgccgcggaaattcctcccagcatagccaggtacggcgtttttaccacgacctgcacatccgaatctgcttccgcctgcgcagttttctgtttcttccgcgtttttttcactgcttccgcctgtgcatcagcctcgttgtgtttctttcccgcaagctgcgcttcttcttcctctgcggaaagatatttataagcaaacgcaatagaaggattgcgcttaaattcatcgatatcccgcagcatttccgctgcggattggtaacgctttgccggatctttctgcatagccttcatcgtaatctgctccaagccctccgggatggaaggattcagttccctcggccgctttggtttggactggatctgctgaatcgccaccgaaaccgcggagtccgctgtaaaaggcagcttgcctgtcagcatttcaaacagcattacgcccacagaatataaatcggtcttttcgtctgttttttctcctctggcctgctcagggctgatataatgcaccgaaccgattgctttgtccgtaatggtcgccatctggctgcgggcaaaacgggcgatgccgaaatccatcaccttgatggtgccgtcctgcaaaagcataatattctggggcttaatgtcccgatggacaattcccttgtcgtgggcatgctgcaacgcccgcagaatctgcaccgtgaaatgcaccgcttctttccagcggatgattttctgttggtcgatatagtcttttaaggtaatgccgtcgatatattccataacaatcgactgcattttatccgaaaagctgacgtcatatacctttacgatattcggatggttcagcgccgcgattgccttggactcgtttttaaaccgacgcacaaactcttcattggaagcatattcttcccgcaggattttgaccgctactaagcgctcgtcaatcacatctcgggctttatatacattcgccatgccaccaacaccgatgagctgtaaaatttcataccgcccatccagctttttgccaatcaaattatccatcgtctgcctcctggtcttgcagtattgggcaagatctatcttgcaatcagaaccgccgtgatattatccgcgccgcccatggcgttggcctggccgatcagctggtctaccgctgaaggcgcatcgttattccaaattaagcggtacaaatcctcctgatccaaataattggaaagtccgtcagaacaaaggagcactgcccccttttttggcatttcctcttccagataatcaacatccagcatccctcccacgccaagcgcgcgggtaatataatgcttttccggatgatattgcgcttcttctgccgagatttcgccccggtccaccatcatctgaaccatactgtgatcgcgggtcagctgccgtacgccgttttcatctatcagataaacccggctgtcaccggcatacgcaatatgtatgatagacccccgaactaccgctaaaattacagtagtgcccattcctttgagagaatcgtttttttccgcaatggcaaaaacctgtgcattggcagcggaaatggcggaaagcatcatattttttaccgaattttcattaaaatcctcccggtaaccgtcctctaccatctttcggatctgctccacggcgcaggagctggctacatgcccgccattttccccgcccattccatcgcagaccactgcgtaggctgcgtcagaagaaagctttgccacaaaaaagccgtcctcattggcagcccgctttttcccgacgtctgtttttcccgctatcctcagcatgatcttcctcctttgtcatcccttctgagctgtccacaggcggcattgatatcgctgcctaactcacggcgcacggtcgccgtgatatgatttcgttccagaatctgctgaaatcgccggattctgtcacgggagcttctgcggtaatcacgctccttcaccggattaaccgggatcaaattcacatgggcgcccatacccttgagtttctggcacaactgctgtgcacactccggggtgtcgtttaccccttcgatcaacgcatattcaaaggatatccgccgccctgtctgcttaaaatactcccggcaggctctgagcagctcatccatgggatacttatggttcaccggcatcgtttgagaacgaatctcatcattgggtgcatgcagggagattgacaaggtcagctgcagctttttttccatcagccgatagataccatccaccaaaccgcaggtggaaagagaaacgtgccgcagacttaaattgagtccttgcaaagaagacaggatttccaaaaaatccatcacattgtcgaaattatccagcggttctccaattcccatcaaaacgatggaggaaatcttctgcccactgtcttttccggccatataaacttcattcagcatttcagccggagtcagcgaacgttccagccccatcagggtggaggcacagaatcggcagcccatccggcagcccacttgagtggagatgcaaagactgtatccgtgctcatactgcatcagcacgctttccaccgtctccccatctgaaaattcatacaggtatttgatggttccatctatctgagacaccagctttcgccgaatggaaatgccaggaatttcacaggtttggtccagttttttccgaagatcagccggcagattagtcatctgctcaaaggagtttgcctgcttttggtgtatccactgaaaaatttgtccggcgcggaattttgccagtccctgcccggtgcaaaaatcctccagctttggcagcgtcattgacttgatatccaccttttccacctgttctccccccttccgcaatcttttcgcttatcatcccttgtgagaaaaaagcgtaaagaaaaaaccatccgtgccgtttcgatgcggcatcaatgtagcgccaaacgctttctccaggccaaggaaacgcaaggtttcctccggcaaaatttccaatgtaaacattagatgttcttttagaaacctctggacgacataatcattttcgtgccggttcaacgtgcaggtagaatagaccagctggccgccttccttcacatattgtgcggcggtttccaaaattttatactgaacagcaggtaaatcccgcaaggtatccaaatctttgtagcggatttccggcttacgccggataatcccaaatcccgagcagggaacatcgcataatacccggtcaaacaaacccatctgcggagaaaaaacactcgcgtccgccgtcaccgcgcggatgctgaaaagccccagacgttctgctcccttttggatcagcgccgccttttgtggatacagatctccggcgatcaattctccggcgtcctccatccgctgcgccagcgtaaaggatttcccgcccggtgcagcacaacaatccagaacccgcatccccggccgaacgcccagcgccgacgcgcaaacctgcccggaaagatcctgcacatgaaacaagccctgccgaaacgcttccaggtgttccaacgctcctgcatggtacagcacaacgcagtcggaaaaatcagggaaaagctgcgctttcaccccttcttctgccagtcgactgcacaggcccggcgcgtcaatccggcgggtattgactcgtacaaacagcggcgcatggccagtcatcccccgcaaaagcgcttccgcatcctctttgggatattgattttgccaaagtttaatcagcggccggggaatcgaataggccaaagaaagccaaccagcccggtcctttcccggctgcggcagacgaatttcaccgccagcccgcaaaaaagaacgcaacacgccgttgataaaaccggcagcgcgcccttttcccattttctttgccagctcgaccgattcatttactgcagccgattccggcacgccatccatgtagacgatttgataaatcgccagccgcaacaactgacggaccagcgggtccattttaccaaaaggcagagaagaatactgcgaaatgacataatccagcgtcagctttttttccagcacgccgtaaaaaagcgcactggaaaaagccctgtcacgggctgaaagcctgctggactcgagcagccggtccaacacaatattcgaatagctgtcggcgatttccaccctcaaaagggcctgcaccgcaacctgtctgccattattcacctgcgtcacctgaaatcgtttttaatcgtcccggcggcgtccgccaaaaattagaatcaaacgcaaaagctgcgccaaagcagtcaacaaagctgccacataggtcatggccgccgcccgcaacacttttcctgcaccggtcagttcatcgcccgccaacatctcagactgttccaataccttcattgcacgggcgctggcattaaattccacaggaagtgtaaccagctgaaacagcgcagccgttgcgtaaaacaaaatacccgcaaataccagcggctggaactgaaacaaaaagcccattaaaattagcggaatggacagctgcgacccgatctgtgtaatgggaatgattgccgaacgaattttaatcggtatatatccggtagcatgctgcactgcatgtcctgcttcgtgagcggcaacgcccaccgccgctaccgaagtcgatccataaacggaatcggacaggcggatgacctcatcctttgggtcatagtgatcggtcagattgccggatacccgttcaatacgcacatgataaaggccattgctgtccaaaatcatgcgcgcggcgtcagcaccggtatatccgcgctggttatataccgcagagtactttttaaaattggaagaaaccatcatctgcgcccaaatcgccagcaaaagggatggtacaattaaaatccaataatatgggtcaaacaaattataaaacatatacacgcttcctttatcagaaaatcataatcgtttttatccgtcctgccctttgggattattctcccccaaaaagtggattttctcttatcataacggccaattatgtcattctgatgggcaggatgtaaattttttctccgtgccagggcggcgcccccgcaaaaaatcctgtccggacatccgttttccgccctccggctgcacttccaaaagctccagcgagccctcgccgcagccgacaatcagccgttttccctcttgaatcacgccggattccccggacaggtccggcagcagcgccgatttgtgtacttttatccgctttccgtccaaataactgtatgcggacggccagggagacacgccgcgaatccggtcgtgcaatttttgtgccggctgggaaaaatccagttcaccatcagacttctggagcataggtgcataggtagccagcgcctcgtcctgtaccgtacgaaccgcttttcctgactccaagagtgtcagcgtatgcaaaagcagctgtgcgccgagatcggccaggcgatccatcagttctccggccgtctcctccgacccgatagcagtctgcgtctgctccaggatatcgccggtatccagcccttctcccatgaacatggtggtcacgccggtaatcttttccccattgatcacactccactgcaccggaccagcgccccgatacctaggaagcaaagacgcatggacattgatacatccatacgcaggcagctccaaaatttccttgggcaaaatccgcccataagccgccactacgattacatccggttttagcttctttaaaatctccagcgccgtcccgtcgcgcatcttcaccggctgatacaccggaaccccatgcgacagcgccaattcctttaccggcggcggcaccagtttatagccgcggccttttggccggtccggctgggaaaacgctccaacaacttcatgggtactgccgagcaatgcccgcaaagtgggaacggcaaaatccggcgttcccatatacacaatacgcaaattttttcaccttacttataacgattatttccaatttccatcttcatcctgatagagcatccggatagcaatatctttaaacagccgcccgtccaaatggtcgcactcatggcagatcgcccgggccagcagatgatcgccctccagcacaaattctttgccatggcgatcttgtgcccgaaccgccactttttcggggcggcgtaccagcgcatattctccaggactggataagcagccctccgcctcatccaatgcgcctgcttgggcgataatttccggattgatcagttcatacagctgatcgccgcagtcgatcaccaccacacggcgcagtacgcccacctgaggcgctgcaagccccacgccgtttccctcatacatcgtttgggccatgtcgtccagcaggatggcaagacgctcatcaaacttttccaccggacggcagactttgcgcagacaatcatttccctcttttacaatttcacgaatcgccaaaatatttcctcctcacatagaaccgtcataatacagatcaccgaataccgagacctgcttgttttgcggatctttgccggaccgaatcaaaagatctgcgatcattcggcgaaaatctgctgtatttttgcatttaatcaatattttatagcggtattttccgcttattttcacaatcatattcgcggtggggcccagcaccctcaaaggcaggccgggatatttttccgccgcagtctgcttcagatcctttaaaaaccgttttgctgctccaatgacctgcgattccatcggtccggaaaagccgatggcgcagatactgcaaaaaggtggatagagcatcactttccggcccaaaatctcctcccggaaaaagccttcataatcctggcaggcagcctgttcgatcacgggattatccggcacataggtctgaatcatcgcacgtccgtgcttttctcctcgtccgctgcggcccactacctgcgtaatcaggctgaacgttcgctcttggcatttaaaatcgtctccaaacaaagaggcgtccgccgccagcactcccaccagtgtaaccttggggaaatttaaccctttggctaccatttgggtccctaccataatatcatatgcgccatctgcaaatgctctgaacttttcactgtgcgcatttttgctcatggttgtatccgcatccatccggagcactcgcgcgtccgggaacagctcatggagctcttcctccagcttttgagtcccaatgccctgataccgaagataccggccgccgcaaaccgggcagcgctcgtctgccgggcgggagtatccgcagtaatggcacatcagtcgcccattggccgcatgatacgtcatcgcaatgctgcaattggggcaggaagctgccgtattgcagccggtgcaaatcgctctggtatgatatccccgccgatttaaaagcaggatggtctgttctttattttgcagattctcctgcatctcaaccagcaattcccggctcagctgagaatcatttccatcccgcagctcctggcccatatccaccacttctacattaggcagcagtgcgccgccatagcgatttttgagcgtgatcagatgataaacgcccttttgggcgtaataatagctttccaccgacggcgtagccgaagccaacaccagcagacagttgttctgcgcgctgcgaaagcgcgccacatcccttgcgtggaagcggggacttgcttccgatttataggtgtgctcctgttcttcatctataataatcagccccagattgcgaaagggagcaaaaatcgccgatcgggtccccaccgcaatggaaacctgccccgcgcggatttttttccattgatccatccgctcgcccagcgaaagaccgctgtgctggatcgccaccttgtctccgaaaacggcggtaaatgcggcgattgcctgcggtgttaaggagatttccggcaccaggacaatcgcctgacgcccctcttccaccgcctttgcgatgagtttcaaataaacctgggtttttccgcttcctgtcacgccatataaaagggcggtggaagcttcttttttttgataatcctgcaaaaggctctgataggccgtttcctgctccggcgtcaaaggcggcaattcctttctcttttcgccggattgcagggtctggcgcagtacttcagcatcgtagtaatacaaaagccctttcttttcaagggcgcggaacaccgcctctgtcacaccagtgaaatagatcgtttcccggacagaagccgtctctaccgtctgcaaaaaggacaatacttccttctgcttgggggtcaggcgtatgtcttccatcccttcccgctgcgcagacagcgctaacatccggacagtttcatccttcatccggcgttttgccgtttcttcccgcaccagaatgcctttttgaagcatttcgcccaaaagagggctggatgccgataagcccaataaccccagcaacttttcttccggcaccattccgcttttgttttccagatagttcacgagcatctgctcatcttcccgcagcggttctttctcgcgaccccacagcggcgacaaaccgtaatcataccgcatccggtagccaatgccgccgggcagaattgcttttactgcatcgaaataggagcagaaagtcgtctcctttaaaaaagagaccagccgcagcagttccggcgaaagaatcggttcgctgtccagcagcgaaaccaacggttttaacttttccagacttgggacctgctttcggccaagcacaatcccctgccgcttgcggttaccgcctccaaaaggtaccagcacccgcattcccggctgcaaaacggccgcaaactccaccgggatggcataattatacagcttatcaaaatggtaagccgccttatccactgccacgcaggccgcttcatagggtagaatcggaatcctctcctttatttttccggagtatcgccgatatgctccggttccacaatcttatatttgccggcagccagctcatttaccgcgattttaaccggtttctcagtcagtacaatatgctcttcttctgcctcctgggcaatctggcgtgcccgtttggccactgcgattaccaggctgtaatagctctggccgtcttttaaaatctcatttacagcaggtctcagcatcatattccacctcatcaataaattctcttaaatattttgcggtatgtttggccgcgcatacaatctgctccagctgatcggctgcgtcctctaccgtttggttgaccacaatataatcataatgtttggcagcttccatttccctggccgcattggcgagccgtcgctcgaccgtcgccccatcttcggtgccgcggtctgttaaccggcggcgcagctcttcaaaagaggggggcataacaaaaacgagcagcgcgtcgggacatttttgtttcacttgcaaagcgccctgcacttcaatttccagcacaacatcgatccctttttccaggttctgttccaccgcttccctgggggtgccatagcagttacccgcaaactgtgcgtgttccagcagccctccgttttccaccagcagctcaaactcctcccggctcaggaaaaaatagtgctgcccatggatttctcccgcccgcggttttcgcgttgtcgcggaaaccgaaaatgcggtatggggatgctttttcaaatattctttgagtacagtgccctttccaacgccggacggaccggaaaacacaagcaaaaggcctttgttattcattgctttccaactcctcaccctcttcgtcagacaaacggttggccaccgtttccggctgcactgccgagagtaccacgtgatccgaatccgtgatgatcaccgctcgagtgcgccgtccataggtcgcatcaatcagcgttccccgttcccgggcatcctgaataatccgtttaattggggcggattccgggctgacaatcgccaccagccgattggccgaaaccatattaccgaatccaatatttatcaatttcatctttgtccatccttttcgatctattcgatgttctggatctgctcgcggattttctcaatttcgctttttacattcaccacaatccgggcgatctcgatatcctgcgccttggagccgatggtgttcgtctcgcggttaaattcctgaatcaaaaagtccagtttgcggcctactggcccgccctgttccaaaatggcacggaactggtcgatatggctgcgcaggcgcactgtttcctccgccactgcaatcttttcagcgtagacagcggcctccgtcagaatccgctgctcgtcgatttgggtgtttcccagcacttcgcacattttattgtaaagacgggtacggtattcctccaccgtctgcggtgaccgttcctcaacctttttcaccgccttcagaatgaaatccaatctgctttccacgtcctctttcattttcgcgccttccgtctcgcgcatctggacaaaacgctcagcagcctcatcggccaccttcagaacatccgcccagataatatcttcatcttccggctctttgctgacggtaaagatatccgaaaagcgggaaaccgcgctcaaagaaaggtcatcccgcagcgccagcggttcttccagcgcccgcagcgcctgaacgtaggatgccgccagctcctgatttacctgcacgttggcattggagccttcgatgttctgaatgccgacatttacatccacctttccccgggaaagcttaccctgcaaataagttttcagtcggctttccaaaaaaccgtatgctcggggaacccggcaggaaaattcaaaataccggtgattgaccgaacggatttctactagaatattgcgtccgtctaccagtgcttcggcccggccatagc

SEQ ID NO: 4033 - DNA, 3546 bp, Unknown
  16S sequences of unknown bacteria
gccgcgaaagtttccgcggcggcttttattgcaatcgttatttttatccccgcttttttctgacgagaatgccggcgagcgccgcaaaggcgaggacggcgggaaatactgccgtacctttacagccgccgcagccgcttgcgcccgaggaagagtccgccccgcccgaagaggacgcttggagcgagtccgaagcggactgcgcatccgacgaactttgttccgacgaggaagcggaggctgagtcggaggcggaagaatggacgggcggttcgtccgagtcgtccttttccaaacggaaactctgcgtatagatcagattgtttccctgccgataagaggcgatcacctcgtaatactcccctttgtcgatacattggaacacggagccatagacggtcttttcctcgcccgtatacagggtcgccttcaaatccacggcgtcccccgctttcagatccctcgctttgtcggcgattccctccacgaacatcgccgccgtcttatacgaatcgcccgcattattggtaagcccgacgtagccgagattctgcgcgctcatcagcgaggcggagttgtcgtacgtccaataccagccgatgatgccgcggtcgcgcagataggattcgttgaacgccgcggtcgcgttgccgagagaggtgtccacgcccgtattgtaaagccccatccaatagagcaccgccgcaaaactgcccgccgtggcggtgttgaggtttgccgtgggcacttcgggaagcgccgtcttcatcctgccgagaatggcggtattaaaggaaatgaccaccgtctgttcccagaaatcgtatttttcgagcttctctttgagaatatccacgatttcgttcctgcccgattttatctcgaacaccaaaatgacgtccgactgtttgagtacggcgatgatgtcgtcgagggtgggaatctcctccgcgtcgaattggtcgagcttgtattgacggagctgggaaaggctcatgctttcgatgctgcccgtgccgttcgtcgtcctgtcgatggtgttgtcgtgcatgaggacgatatgattatccgtcgtcagatacccgtccaattccacgtgcgtggcgcccgccgcgatcgcggcttttaccccgctgaccgagttttcgttgtacagtttgggaagtcccctgtgcgccgcgttgaagggcattctcgaaagcccgttcttcgcgtaagtttccaagacgtcgtacgccgccgagaagtcggaaacgataacgccgtaagcgccgctgttcacgcagtcgtaaagtcccagtcccgccgtatcgtccgccgtcacccacaccgtcttgaaacgagcctgaatgtagcgcacgttctcctgcgtcgccatgctctgcgggatcacggcgacgttcgcgtagctcatgttcgtcgtctttacgatctcgtaaagatttgtgcccgcggcgtaagaaacgatgccgcgtatcttgccgttcgcttccttgaccttcttcacgagcgagggattctccgacatgaccgccaaatcgagtatatccgcctcctcctcaaaatatttcaaagcggcgtccgccgccccttcgtccgcgagatggagaacggggaggatccttccccgcaaaacatcggtatagatattcgtaaagctgtccagcaccgtgccgtccgcggcgacgatattataatccttatcgaagcggagaatggcgttggaaggtctttccccgtccgcttttaaagagtcgagcgccgctttgtccttcacgtcgaaaacgacggtgggggcgttggtcggcgcggattcggcgcggtaggtttccaccaaggcgccgtcggcctccgcaatcttggcgggcgtgccgctgacgctgtaatttttgacgctgagcgtcgcgcggttgagaaggagcgcgaagccgcccgcttttagggtgccccccagcgtatcgtccttcgtcttgacgtcccactccttgatcagaacgccgtccatataatgcttcgccgtcgtgcccgccatttcgattttcatcgtatgatacagaccgtcgctcagcgcgttccccctgtccttctcatcgtcgctgaaaccgcgggaagcgtctaccgccgaggacgccgtttgcccgttgtagcgatagttcatcaaatatccgaccaggttgctgcccaccttttgggtatggtacataacgccgaaccatctcgacgtgtcgaagggatcggtcattttcaccgtgatctcaaacgtgaaatcgctgtacgccgcgtccgtgtcgatgagatagacggagccgtaatacagctgattgttgatggcggcattgttgtgcgtgatcaccagatcgccgttctcgaacgcggaggcggtgtgcgcaacgtcgctctcgccataaagctcccagttttcgggcagagcgtccccgaaaatcccaggcgcttccggctcttcggcctctacgctgcggctgatggaacagctctttatgttcagcgtcgcgcggttgagaaggagcgcgaagccgcccgacgtcagaggagcgccgcccactttgtcgtttttggaagccacgtcccattccttgatgatcctgccgtccatatagtgccttgccgtcgtgccgtgcagggtgatcttcaaggtatgatattccccgtcgctgagcgcgggattgcccgtactgacggcgtcgtcgtaaaagttcctgcctgcgtctacggcggacgacgcggaatttccgttatagcgataattcatcaggtagcctatcgtattggtgtccgtcgtctgggtatgatacatgatgcccagccatctcgacgtatcggcaggatccgtcattttcaccgtgatttcaaaggtgaaatcttcgtagacgctatccttgtcgataaagtacatcgccccgtaatatttttggggagaggtgcttccctcgctcctgatcaccatctctccgttttcaaacgtcaccgaagtgttttcggcgtcgcattgatcgttgagctgccaatcggcgggaagctcggcgaattccgaaacggaatacccctcttcttccgccgccgcgctctgcgcgagcgtcgacgccccgaacgcgaggcaccccgccatcaggacgccgacaagcaatacaacagattttcttttcatcttttcctccttatattcgcacgttttatttattcccaaatcctctgaaaggtctttcctcttcggaaaattcccttttaaggcgaatatagtcacggctttttacgcgttttttacgtagtacgggtagtacgtacaagcgcgcctttgttttccgcttttcccggtcgattgccgcgcccgaaagcatctttattataacagaatttcagtttcggtcaagatgcgcctgcacatattttttacattttccaaaaaaatatcattctttcaatcttttggaatcaaattccgcatttctttaaagtaatctttaaaacgttattcattatatcaaatatattcctcttgtcaatagagagatcggaagagcgtcgtgt

SEQ ID NO: 4034 - DNA, 9754 bp, Unknown
  16S sequences of unknown bacteria
ttccgccgccgcgtcgtcaggcaagctcagaacatgaaacgccagccgctgggccgtcttgctgccgatgccgggcaggcgggcaaactgctcggtcagcgtttcaaatgccgccgggaaatatcgcatcgttaaaacagccctcccagattcaggccgccggtcagcttggccatattggcggaagcctcgctgtccgccttgcgcagcgcctcattgaccgccgcaatgaccaggtcctggagcatttccacatcctccgggtctaccgcatccggcgcgatggtcagggagacgacctcgtgcttgccgttgacctgcgccgtcacgacgccgccgccggcagaagcctcataggccttctgctccatctcctcctgcattttcagcatgtcctgctgcattttctgggcctgcttgaccatgttcatattcatgccgccgcccatcatgggccggccccggtaaccgccttttgccattgtactgttctcctttacttcctggttttataaaaaattgcttttactcttcatgaatggaaaaaatatcgctgtgcgcctgcccgaaggagatgagctcctccagcgcacgggaatcgcccttttgccccttgatgacgacctgcactgccaccgggcggcccagcagcgtcgcagcctttgtctgcaccagctcccgcacagcgggcttatccacaatggccttgacaaatgcgtcgtttgccaccagctgcagcgcatcgccccgcaggcgcggctgcagcggcgcattttccgcgccggtgaaaaagccgacaaccggcggccgcagctccgcgcgcatccgctggcaaagctccggccagaagccgtccggcaggggcgtgtcctcctccgaagttgcctcctccggcagcgtttggcctgcggcgctgcttgacgctgcaggcgcagtctcgtgctccggtctctccgtcggcggtgcatctgccgcctccggcgctgccgccgggcgggcctgcaccagaacgccggaggccagctgctcctcgacccggctgagccgggcgttcagcgactgggcatccaattgcagctgcggcaggcagagctgcagcaggcagagctcgcagtccacccgggggttctggctcttgcagaaattcgccgccgtctgctgcagcagcgcgatgatgcgcagcagctccgcttccgcgaaggcattttgcagctgcagcacctgcgatgtctcactgacaccggagagcatccccaggccgccgcccggcgcggttttcacgatcaaaatatcccgggccaggcaggccatctcatccaaaagcgccgccagatccttgccgccggcatacagggcggcaaattcctccagcgcagcccgggcgtcgcgtcgggagaccgcttccagcagctgggccgccttgcgggtccccgccaggccgaggcagcgctcgacggtctccgccgtgatcgtgccgcccccggcggaggcgcattgatccagcaggctcatgccgtcacgcagcgcgccatcggccaaatggctcagcagctgcaccgcgccatcgtcaatggagatctgctcctggtaggcaacatagcggatgcgcccggcgatatcctccggcagcagccgccggaaggaaaagcgctggcagcgggaaaggatcgtcgccgggaccttgtgcagctccgtcgtcgccaggataaacagcagatgctccggcggctcctcgatcgtcttgagcagggcgttgaacgcctgcatcgagagcatatggacctcgtcgatgatatacacccgcttttttgcctctgccggggtatagaccgcgtcatcccgcagagcgcggacatggtcgacgccgttgtttgacgctgcgtcgatctcctgcacgtccgtacaggccccggcttcgatggccttgcagatggcgcagcggttgcaggggctgccgtcgatcgggtccaggcagttgacggccttggccaggatcttggcgcagctcgtcttgcccgtgccccgggtgccggtgaagaggtacgcatggctcagatgccccgtcagcagctgggccttgagcgtatccgtgacgctcttctgccccacgacctcgtcaaatgtcttcggccggtattttcgatacaatgcctggtacataggccaccttctccccatccggcacagtttcttgtattatcctctagtttaccatactttccgccgtttcacaaccgcaaaaaaagcgccgcaaaacggcgcaaaaacacaataacgacaagataacaggcaaaaagcctcgcagcgtttgcgccgcgcggcgcaaataaagtccgatccgttttttccggcggcaagtgggtaaggctccaaacacgcaagctttgcgccgcgcgtttggtcaagtcaaacccatgcagcgctgtggaaattatgcgcgcagcagggtgcaagccctcaaacaagagcccagcgcagcggtaagcgcgcgtcaaaattttaattttgccccttgcgcttaaacagcgggatcgcgtttgaagcgcttgtcaaaaaaatttttgacaagcgcgcatgcgccagcccatgacaagatcgcacacccacatttgaacaatagcctatacccgttacccctgcagccagctcagagacggctcccttgcggcacacgggaggatccgcttaatgctgctcggttccccgcctgacatggttcacgggaacccgttgcgcaagaccgtcccctcaacactgcttacaagggtcagacgatacagactaagcccgggtgtgggaattcactcctgctatagcggattgcaggttacagggcaccgctatctccccagctagtgcgaccttgtcacaggctggcgccaatgacaaagtatttttaaatataatgatgcgatcctgcgatcgttccgcaagcgccgctgcgctcagttgaccttggattcgataaacgccgccagctcgccaacggtcgcgaccttctcctccatttccagctcgacgcccagctcctcttccagatccatcagcatttcgacggtatccagagagtcgatgcccaggctctcaaaggtggtctcttcggtaatatcctcttcgtttatgtccagctgcgaagccagatatgcagcaagcttttcaaacatgtgccgtccctccatactcttctctctgcaagtgccttatggacacaccgcacctatataataggggattttccgaagatgtcaagtaaaacattccaatttttttaattcacaaaatcccgcagcgccttggacttcgagggatggcgcagacggcgcagcgccttggactcaatttgccgcacccgctcccgggtgacgttgaatttcttaccgacctcctccagcgtatggggcttgccgtcctcaaagccaaagcgcagccgcaggaccttctcctcccggggcgtcaggctggccatggccttttccagctgctcccgcagcagattggtcgccgtcgcctccaggggctcagacgcctcattgtcctgaatgaagtcccccaggtggctgtcatcctcctcgccgaccggcgtctccagggagaccgggtcctgggcgatctttaagatctcctcgaccttctccggcgaaaggcgcagcttttgggcgacctcctccggtgtcggctcccggcccagctcctggaccatgccgtgggaggtgcggatgacgcggttgatgagctcgaccatatgcaccgggatacggatcgttctggcctggtccgcaatggcccgggtgatggactggcggatccaccaggtagcgtaagtagagaatttatagcccttggtgtagtcaaatttttccacagccttcaaaaggcccatattcccctcctggatgaggtccagcagcagcatgccgcgcccggcataccgcttggccacggcgacgaccaggcgcagattcgcctcgatcatcttctgccgggctgcctcatccccggcagcgacccgacgggccagccgctgctcctcctccggcgtcagcagcgggacccggccgatctccttcaaatacatccgcaccgggtccgtcagcggcagtgcgtcactcatggcctcggtgtcgaccatctccgcctcggcctcctgcttgagctgactggccgtcggctccagcaggtcgttattcccgataatatccagcacatcccccacgtcgatctcgatcccggcagcttccagggcgtcgtagacccggtcggtctggtccgcgtcggcatccagagcgtccagcgcgtcgatgagcagcttggagggcagcttcttttctttttttccttgttcgatcaattccgccagcttcttttgcagcagtgcttccttgacttgctcctccgaggtctcacctgcagcgggagccgtcagtgtctgcttgttccgttctgccatagctttaccctccatatcgttttttatcctgcagccggtcccgcagcgccaggagcgcctccggggtgtgcagattggctttttcgtattcctcctggatgatcgtgcagcagtcccgcagggcggtctccgtcaggggggcgtcctgcttctgggcgatcctggtcagatgggcgagctcctggggggagaaggactccggcaggctcgccaggctcagctgcaggccgtgggcgctgcggtccagcattgtctccagcacccggcccagcagcgggacggagaacatctgcggcgtcagactgccgatctcccccagcaggtcgggctcccgcaggagcatccggatgagcccctcctctgccatggctgagcgcatattttcataatgcagcgcccgctccaccggctgctgtgccttggccggggcgaggtcccgctgcttttgcttggcccgctccttggcaacgcgcttctggaaggcttttttgacctccagctgcatcgcctgggcggagatccctgcggcctccgctgcccgggcgccatagacctcccgctctaccgcgctgtgcaggccagaaatcagcgcggccgccgcctgcaggaacgcgacccgttcatcatcgacctccaggtggtattttgcctggagggaggccagcgcatactcgatatgattcgtcgactgctccagcagcagcttaaagcggtcggcgccgtatttcttcaggaattcgtccgggtccttcgcgccctgcatccgcagcacccggacctgcaggcctgtctcctccagcatggggacggcgcggcgggtggcgttctgcccggcctcgtcgccgtcgtaggtcaggatgacctcgttggtgtatttggaaagcatggccgcgtgttcccgggtcagcgaagtccccagggaggccacggcgcagtcaaagccgtactggtagagggtgatggcgtccatatacccctctgtcagcaggatatagccctgcttgctcttcctggccaggttcagggcaaaaagatttttccgtttgttgaagatcaccgtctccggcgagtttaagtacttgggcgtgctgtcgtccatcacgcggccgccaaagccgatgacattgccccgcaggtccaagatcgggaacatgagccggttccggaagcgatcatacagcgtgcccttctgttcatttttcgagaggagccccgcctccagcagctcttccttggaaaagcccatctgctgcatcgcatccatcagattggcccagcccggcggcgcaaagcccaggccgaagcgggtgaccgtcgcgccggtgacgccgcggtgtgccaaatactgccgggccggttcccccgccgggcccttgagctggcggtgaaaatagcgggcagcctggcggcacagctcccacaggcgctgctgctgccggtaacggctgcggtaggcctcgtcctccggcacctccagcccgacacgcttggccaaaaagcgcaccgcgtccggataggtcaggttttcctgctccatgataaaattgatgacccccccgccgcgatggcagccgaagcagtaatagatctgcttgcccggcgccacggaaaacgacggcgttttctccccatggaatgggcagaggccaaagagattgctgcccttgcgggtcagctggacgtattctcccacgacctcctcaatcgggtttcggctgatgagatcgtcgataaacgcagccggaaatgccataaaatcacctccgcaggcaatttctcaaaagttatgtcaacacactcagccccggacctgccaggcggcagggataaagagctccgagtatttgtaaatcgcgtatttgtccgtcatcccggcgatataatcgcagatgacccgctggatcccatcaaaatccagctgcggcaggaaatccgccgggagcctctccggccagcgttcatagtagcggtacagctgctggatgatgccccgcgccttggattcctctcctttggcgaccggattacggtaaacccgttcaaacatgaattcccgcagctcgttcatagcccggctgacctgtggctgcatctgcaggcggtcgccgcccatggagcaggcgatcatatcccgcaccagcgtatcgatccgctggcggtgggtgtggcccagaatatcagagatcgacgcggggatatcgtcatttgtcaggatcccggcgcgcatggcgtcgtcaatatcgtggttgatataggcgatgcggtccgcgatccggacgatctgcccctccagcgtctgcgcgatctccggccccgtgtgcccgacgatgcccatgcggacctcgtagcacaggttcagcccccggccatcgttttccagccggtcgacgacccgcagggactgctcattatgccggaacggccgccccaggacctccgtcagcgcgacctccccggcgtggccaaagggcgtatgccccaggtcgtggcccagggccgccgcctcggtcaggtcctcattcagctgcaggccccgggcgatgctgcgggcgatgcggctgacctccagggtgtgggtcatccgggtgcggtagtggtcgccctccggctgcaaaaacacctgggtcttgtgcatcaggcggcggaatgccttactgtaggcaatgcggtccacatcccgctggtagcaggtgcgcatctggcacggcgcctccggataggcccggccccgggaggcatcggcaaacgctgcccagggcgctaaattttcatgctccgtctgctccagacgctggcgaatactcagttcctccactgcggcgctcccctttccgttccgcctatttttccaccgggaaggcccggtagcacgttcccatgacctccggctgcattttcccgccggacaggtcctgcaggcgcagcaaaaacggcgccgcctgctcctccggcagcagaacattcagcgtcacatcggcggcgaagtccgtatcctgcacctggccgccgaaggccgccacatccagccggacccgctcaaaaagatggtacgggcacgggatacgcacctgggaccagacccgctgcaccgagatgcccgccgcatccagcgcaagcttcgcagcccttccataggcccgcaccagcccgcctgcacccagcagtgtcccgccaaaatagcgggtgacaacgcagcagacgttggaaatctccgcctggcgcagcacattgagcaccggcattcccgctgtgccgccgggctcgccgtcgtcactgtagcgggtcgcgccgcctttaataatgtaggcgtaaacattatgcgtcgcgtcccagaattcatcccgggtctttttgatgtgcgccaacgcttcctcctccgtctccaccggccagatcctgccggtgaagcgggattttttctcgatcatcgtctccgccgccgggccggtgggggtgaagaacggcgctagcttcacaggctgctccatctcgcctcacccctcgctttctataagatacgcctgcagcttgccgtagagaatttcatcacacacagcctccacagcgatgccgcgctccgtatattcgcatgcgagcacctgcgcctggcggtgcagcagctcaagctggcctgccatggcgtagggcagcaggaattttgcccgatgctgcccccgctgcagggcctgctccatcagggccagcagatcggaaagtcccgcccccgttttggcggagacggcgatggtcagctccccgtggggcagcgtctcgacctccaggtccgccttgttatagcaggagataaccggcacaccctctcccgccagcgcgccgatgagcttctccaccacggcgatatgcgcctggcgctgcggatccgtcgcgtcgatgacatggaccagcaggtccgcataccgcagctcctccagcgtcgcctgaaaggcgtcgaccaaatgatgcggcagcttggagataaacccgacggtgtccgaaagcagcacctgggtcgtctctgacaggcggagctttcgcgttgtcgtatccagggtatcgaacagacggtcattggcggggatgccagcaccggtcagggcgttgagcagcgtcgatttcccggcgttcgtatagcctaccagggcgacgaccgggatggaatttttcatccggcgctcccgctggaccgcccgggtccggcgcacctcggcaagctcccgctgcagccggtggatgcgctcgcggatgtggcggcggtctgtctccagctttgtctcgccggggccgcgggtgccgatgccgccgcccagacgcgacagactcttgcccatgccgctgagccggggcagcagatactggtactgggccagctccacctgcaggcggccctccgccgtcttggcccgctgggcaaaaatatccaggatcaaggcgctgcggtccagcacgactgcgccggtcagctcctccagtgcccgcagctgcgagggcgaaagggcattgtcaaagatcagcatctccgccccggtctgcgcggccagcgcccggacctcctgggccttgccctcgccgatgaagctgtgcgggtccggcgtgtggcggttttgcagcacccggccaacgcactggcctccggcagcctccaaaagcgccgccagctcgtcgagcgacgcctccgtcgctgtctgttccggggcaaagcaatcggcattgaggcccaccagaattgcccgctctatcacatgtcgttccagttgttccattcttcccccatggcaaatagaaaaaagcccgcaccaacatcaggcgcgggcttgtgcaaattacttcagaccgtatttcttgttgaaacggtcaacacgtccaccagtatcaaccagcttctgcttgccggtatagaaagggtggcacttggagcagatttcaactttgatgtcctttttggtggaaccggtctcgatgacttcaccacatgcgcatctgatcgtagtctgttcgtacttgggatggataccttccttcactctgttcacctctttctactgtattaaaaaagcacacagcggcgctttccgattcgcatcgcctagatatagtaccatagcattgccaaaaatgcaagcattatttttcattttgataaaatatcctgctgtgccgctccccgtcggcggtcagcggcgcgccggggggcgcaaacatggcgtaaaggtcacaagcccgcgtctccagagcaaaatacggcgtgcgcacccgggtcccggcctggatgagggggatacggctcgtctcatgcgcctgccgcagcag

SEQ ID NO: 4035 - DNA, 30925 bp, Unknown
  16S sequences of unknown bacteria
aaaaactctcgctctccgcttttttcgtcatgcctaaatttctctgccaacaaaaattatttttcttgaaatttactcttgacttttattggcaggttttatttttgtaattcaaggtactccttaagctctggcaaggaaacataggtaaaggtggttttcgcatatgccgcacggcttatgtcctcaagcgtgcctataaagctgtccacgctcgacgccgccgcgtcggtttcggtaaaatccttctttatgtccaaagcctcgttatacagctttaagagctcgtttttaagggccataagcgccctgtttttgttctccgccgctttaaagacgtcacgcacggaataagccttagcggtaagctcctttatgcggtcgcccaagggattctcgcaaatgcgtttaagagtatccgaaataacggatatttcctcaggcttattccaaagatagtttttaagcacaagcatatcctcgggaataacctcgtctctgccgtttagaaaagcctgtgcctgaacgatagagccaaagccgaaaaaggttctgtcggataccgctatatccttttttctcagctctaaaagcaccgcatccataagctcgttaatgctgtcggggattttaatttttttaacctccttctgcatttcttcaagctctgaaagacttacggttgcgcttacggtatcgtccgcacagctctgtttcttacgcagcatcgccatacggtttgccttttcgcttacatactcggtctgcaccttaaggtcaaaacggtcgtacagcgcctttaaaatcctttcctcgggatttttgaaattcggtatttcattcgaggccgagaaaaagcttataaccgggatatttaccgtcctgccctcattggtgtaaacccgctcgttgagcgcttttaaaagactgttaagcactccttcgttggacttaaaaagttcatccagcatcacaatatggctgtcgggaatcttatccgcggttatgtattcaggctttcctccgcagcttaaagcaagccctttttcgtagatttggagcgcctcctggttgcgtcttactgcgtcggcataacaactgtttcccggatcattcctgaagtcatcaagcgctttttcaaggtctgctttcatatccctgtaggtggaatcgctttccagtacgcttttcggcatgtgaccgggtatgaggcttgcaaggtcgagccgcccgaaaagctgctcagtatcggtctgcttgctcataagggtggaaaactgctttgctccctttatacgcttgcagaactggtcgatagcataagactttgcctgacccacatcaccgagtacaaacagattgcggcgggtaagcaaagccaaagcaatgcagtgtatcagctcctcccgctcgcaaactaccgaattaacctccttaataacctctaaaagcttttcatttcccattttttaatctccttcacgcaacttttttcttggtctttttctctttcggcgatttttccgccttttctttaggctttactatctttacgggggttcgcggcgtgacgatatattttccgccgctgcagctaagcaacataaaccctcttttgtctatacctaaagtaacacttccgaccgccacttttaaaaaatccagtataatctgcggctcgtaattaaaaccgttttcgggcgtcggagatgcgcataaggtcggtacaaacgccgcgcctgtccgcccgtatgccgcacaggatagctttatacccgtcggcgtaagacagatattgatacatcggtcatcacccgaaagctggcagaccgacgcagtctctattgcccgtgaaagctcctttgcatctgtctctgcgctgtaatcggcagaaagcttctgaataaaggcgttcatatcaggcgtggaattgttcatcataacggtggaaaatacggtatccccgcaaacaaatactgctttcttccctgctatgcctacacaaaccgtcataccgtcgttaatgagcgacgtcagaatattaaccgcgcttatatgcagcgacatttcaatatctccgtcagctattccaagtcccaccgacagcgccattcgctttttattcattgcctcggcggtgccggcacctgcggtaagccttattttcaccccctgaagctgtctgtcctctccctttgtttctgccgcaaaggacgcgtgattaattaaaggcaaaagccctgtaacagaaacatacgccgttgggaaagcaatatccgctttcggaaattcctctacgggcccggtcggcaaatcgtaccgagagcctccaaaggaaagccttaaaacattattttcgtctgtttcaaaggtcacgcttttatcctttgaacgtcttaatatttctaagactataccgggtactataacctcgccgccgatatttacctgaacgtcctttatccgttttatgaccgaggttataatgtcggtgccgataagctgtaccgttcccctgttcgcgtcggcggaaagatacacgcctgtaagcttattaagcgaagtattctttactgccgtaaaagctgctttaagcgcattacaaaagtctgctctatctaccgtgaatttcattatattgaccccgttccccgtattatttcgcaggcaaggctgaatattatcctgaagctttccagctcctcttcacagcggcactcacccaaggcgtcgtcccgttcctcaagcagttttttctgctctggcgtaagggtctctccgagcttttgacgtgcctgcgaagcccttgaaagcttttgacgatagctgtcgctgctcggcattgccttttcagaaataatgctgcataattcctctaacatagatttttcacacatagtttttatcctcctgctatgacgccagaaggtcaaacagcgtaagctgcacttcaggcgttttatctgtttgcggctgtatgggctttaccaccttaagctcaggctgcgtctgagtttttgcgtttctttcgttcttgactgccatttttttgaatgtagcggtaagatcctccacgctttcctttatgccgcttgcaaggtcgcgggctaactgggttgtcatatcctgattctgcgatattgccgccaagccttcgtctgatagctgtccctcaatcatggtagccgccgcaagctttgaagccatcagccgcaaagcgcgctgctgcatagtatctgcataataaaagagatacacctcaattttgggtgcagtctggtttattcgccaactgcggcaggacgcctgacgaagcacataaaggttaaatgcgaggttgtaaaagataagggtggtaaactcattcaaatcgagtcccgtctcgacaagaaatgggtttgttattaagacctgcatacccttgccgagctttttcttaacccaatcctctcgccttgagggatctacgctctgctttaagatacaggcgttaattcccatttcggctaatttctgttctaacacgctctgcgaatcaagccttacccacgcggtatagataattaccctttcgcccgcctttatcttcctttcaacaagctctaaaaccttattaagcttgccgttcggctcatcgggataattccttggaacaatagccgtatctcccataactacaggctcgtgaccgtagggctggtcggggtaagctgtcagcagattaaggtagacagaaaggattttatttgcaagccgtctgtcctttcgcataacggtcttaaactcggtttccatatgctcatattcctttttaacactatcactcatcttgcaggcaacgggaatttcctcataatcgggcagctcctttgccatatcgtagagcgataaaaacaccgtgttttccataaggtattttgagtaaactataggcgaaatgccgggcagaaacttctcgcgaacttttcttgtgcagttctttgaagcagcgttgtatttcgttttatccgtttcaaagatgctttcaacaacgccgtaacgctgacagaatttccttgcatcgttataacgaaagccgtccatcagcataaggcgcggtttcagcctgaaaagcagataaaacattcccttggcgtagccgtttattagggtggcggtcattgcaatgacctttttggatattcccgctatttccgccatagcctcgccctgtgcactctcgcccgaatactcgtgcagttcatcacagatatacgcgtcaagcttcttaaatcggtgctttatataccgtgacagcggataccgcttatatgcgcctgctgcggggaatattccgtcaggatcgtctataaccgcctcaacctgctttcgcttgcccggtgttttaacaagatgcagattcgagacggcaaatttacggtgtatatacccgtagcctcctattctcacccattcgttttttgcggggtcaagacagtcgggattgtccgcctcccacaaaaccgctccgcattccgagcacttgtgatttttggcgttctcctcacggaagtaaaggctatccacagggagtgtataggatatgccgtcattagtaaccgtcatctcctgaaccgcaccgcatatggggcagacaaaggcttttcggcgctcgttccatgtaaccgcgggctttcgcagataaccgtttctggcgctctccttagaaagcaccataaaaatcgatttatccgtatggcggtacagctcgtacattcggtctatatccgttatacttgagaccgttctcgcaacgcagtccggcacggtctcataaagctcgcgcacccacttttttgcaacgtgggacggacaggttataacgttaatacgggcaccgccgcccttcgacttctggtaggcatacagcgccgccgcgcctatcttggttttgcctgtgccgcagcttgatacaagcatggtcattttttcttttgcaagctgacgttttattgcctctgctccggcaagctgagcttcgtaaagggaatatccggtgttagcctttatatgttcgtttacctgctttagctcttcgcatatatcctcatttgcaggattgaatacgggaataaaggttgactggattttacgcgccacagccttaccaaagctttcaagatactgagtaaaggtatatatctccttaaacgcggtatcgttattttttgcgccggggatacatatttctccgcttttaagaccgtcggtaaaaacctttacaatttccttttcgccgtccttcagggttattctgtatgcggcgaaggtaacgctgctgtatacgttaagctttttaaggatttttctgcctttaagctcgcgtataaagtattcctcccactcggggataagcggcacaaacagcttgctgtcaagctcggaaaaaagccctgtttcatccttacagaaaatgtaaatgtcccttggctttttctcctctgagttttcggtatcgctcagcttcagtacgctctccgcacaggtatccgtgcctttcatccgccgctcatacttacccccgtaggtagtaagcaccgtctcgctcttttcatcaggcagctgtaatgaaagcttactgccgctaaagagcgcgtcggacattgacagcacggtttcgggatagccgccgaagcgtaacgctacaaccgttttgtttccgtcgaataccaccgtatccgcgtaattggttatacccactccgtttttttcgtcctttaaaacgacgggtataagctttgtcctgttttcagtgataacactcttctcctttctgccgaacaccgaaacgccttaaagaaatttcagataacagtgtaaaaatcttttaaaggcaattccgatgttcaggctttttgtgctgtatgtaaaaacaaaaaagaccgaccctctctgcataaatacagagttaaggtcggtcaatcttgtgattaccgaatttaatttgcgggcgtttgaggttaccctaaaacgcaaaaaagccggacttctccctttaagggaaaaatccgacctgtttcctcaaaccaatgtcttctgagagacatcacactcaaaccatgttacaagtgtattatactctatgcaataatggttgtcaaccgaaaatgcggttttgtttttaaaaacttgacattttcacaaactgtggtataatataagtgaaataaggcaaaccgataaacggctagccccaaaataagcgttaaaaagatttagccgctagttttgcagaccgggcggctacttcttttttattgcaatgacagtatataaaacaacaattaaaattattattatgtactccatcggcaacgccccctttcgagggcaagacttagccgtttaccgtttaaggtttaccttattccgacagtattataccattttatatcagtatttgcaagctaaataacaccttgttttctaatgacaaaaagaataaaaataattcccgaaaaaccgcctgtcaaacttgacaaacagaaaatatttgctatataatacaggcggtgtagaaaatacaccctgtcttcttttgaggaacgccttttgtcctgtggcgttcctctttttttaccatcttgcaagaatctttccgtatataagcttacgttcatagctgtatttggttataacgattattaccttatcccctatatgaaaatcgctgtcgtactggtcggcggaatagctgcacaggcagtcaagctcatcctcaagccggcagaaaagcccgccgcgatactttcccattattacagatgcacgcctcgaatctatagggtgtcgcaactgggcgccgtcgaagggatgaggctgcgccttctttatagatactgaaagcttcatattttcggggtcatagcatttaattacagcctcctttgtctcgccggcgtgatacctctcccgcaaatcgggaattgcggcatatgatacgtcccttgcggcaagcgtaatatcaaaaccgcccacattgcaaagtaattgccactgccctaccgccaatatatcgcactttactcttcgtcccgcctcgggcgtaagttttaaataattatgccgccttatgcgcagcgcctgacttcttgaagctatgcaaaaatttccctcacggtcaatatctgttataacatagtctattttagctccgagcatagagcgcataacgtgaagcggcatagttgtattttcataccaaagctcattttgcgggattataacctttaccctgtagcttataaccacaagatagcgtaagaccttttcttcgtattctccattttcctttttaacctcaaccgtttttgtttccataccagatacttttcccgtaagcagtgaccgtgctctgtaggacgcataaatcgaattccactccttgcgttcttcttcggataaatctttatcaagctcggttaaattaagctttcttatgtccatttatctccctccgtaaaatatgtatttattattttgttttattgcaaaacggcaatcgggcggaactgtcaaaagctctgtctgctctatccgttccgtaacaaaaaccggtatgccgattttgtttttcatgccttgtagcattgcgtttatcactatttctctgccggcgttaactacgcaaacatcataacggttcagcttttcgtctttacatttaaaaaatgtaagctcaaacggcggctgaccgcggcagtaaatctcaggcggagggtcggctatcgcaagcattacttcaagcgcagtttcggtgtcgcggccgcaaatgattttactgtcgtcgcagtaatactcgcccattttaaaaagcatacggttcatttcaagctgacgcagcacaacatcaaatctgtgagacccgccgcaaagcctttcaagcatctccgctttcattccgccgtattcgcggacaagctccagtattcttttctgggttttagtcagaagcatagagcatctctcctataaattttttctccgccaaattaggaactgccgtacaaatcatgatttactaatgacgaataataattgtcaatcgtgctatgagcattaaaaagcaccgtcagcagatattgccgtatattacgaattttagaggtattttcattcaagcactcgaaaacatattcaatatctgtgctttcaagctttaacagcttcgaccttacaacctctgcggggaattcatcacttgcaacacgaatcgattttctcgatgtgcagacagtttcaaccataagggttacgatctcatcaagacgcgttttatcaagcctttcgcaaagtaaatcgtactcaatgttttctttgataatctcctcatatcttttcatcgtttcaaatccgttttgtttcggagaattatcttcacttgcctctttgataggaaaagattgagtatttaataaatccgtatttaatttattattatttaattgcgttggattttccaacgtagggtttgcctgcgtaggtttatccaatgttggattttccaacgtaggattttccaacgtagggttttccaatgtaggtttttccgatataggctgttcgcgaattatgtactccgtaccgcgcaatttaccatgcttgtcgcgttcgcgtgttcggcttatatacccctcattttccaattctgttattgctttgcgtatagcgtcaaccttttcaagactgatatgtgctaacccctgcaaggtataatcccaatcgtccggcagggagagcattaaagataataatcccttcgccttaagcgagagcgccctgttttttaaatgatgatttgacattattgtataatcgtgcgtgcgttctactctgaatactgacattttaaatttccctttcgtttaattttttaagactcctgcaatcaattccgcccgacaaatcaaagccgtcctccttttcttcctcctcaccgtccataggtatttcaaactgtaaggaatatttcggagccggcggtttctttgtttttttgaccggttcttttcgccattcggggatatgctccgccgccttgcagtatttaagcaatttgaaagaagggtgctcctcgggggttatcttattcaaaagcaagggcttcgcgccccttattaaaagtattgccttatcctttgcaagccgccgcacttcatcaggcatcatcagcggtctgcctgtgctggttttgttatgcatatacggcttttgaagcactatggaatcaaagaagggtcttgtgggcgtgttcatattgtttacacgcaccgtcacctcgccgcactgctttgagataaactcggcggtcatagcgtcgttacagcctaaaaagagctggtaatcacagtctccgactatttcctgccattcattttttgggtatctgtctgaaagctgagctatactctgaactacagcctgtatattaatatttcttgaccgcgctaccgaaaaaatctttttgctgtcaagcagagagatattgcagaattcgtccataagcacgtttacgcatacgggtaatcggcggttttcctgctgtcgggcaaaatcgaagagctttacaaacataagcgaaaagaacattgaagacaaaaactccaatgagctgtcttgatcggatataatgcagaagtaggcgcatttttctctgccgggcaaagtaaggtcaatttcgctgtgcttggttatatcgtcaacaagcttgttctgaaaaacattcaagcggttgccgagacctattactatattcccccaaatctgcttatgcgcctgacggaatatgccgtagggcgggagcgcggggtggtcgggcggcagagctctgaaacgggcgtctaactcctgcaccgacgttgtggataaaatcttgtaaattgttccgagacttcgttcctcgggcggcaaaagcttgtccgtgccgggatatgtaagggtctgaacatagtgcaacagcgccataagcagatttttctcagccttttcccagaagtcgccgcgctcgttctcattagaggtattccgtattattatttctgccacgcgctgaacaaggttaatatcctgcgccgtatccatcacgcaattccaaccgtctgacgcgaacaaatccaaaagattgtacgcctttacggtgtagcccctttccctaaaaaactcggaatacatttcgtaaaactccgctttcgggtcaaccaaaacaatgctctccccgcgccttgccgcttgcattacaaaaggcattacaaagccccgggattttcccgttccgggagcgccgtaaaccataacatttttagacattcccggcatatccttcatcgcgacatattctccgtcgacaagctttccgaaaagtgtttcgttaagctcctttaagcttccgctgtataaaaattcgggcaactcctttttatccataaagccggacgtgccgtgagttccctcgggcaatatttctattccgcgctttttatcctttacggttttgtatccgcttattatatcctttccctttcctgtaaaaaggcagtacataaggacagaaaatataattattccaaagccctgcggagtaaaaaccgccgctatgtttttaacgggattaagggtaaaaagcggctcgtctcctcccctccatacgttgttaagacccgttactgcggaatggattataaagccggcggcataaagaagtataagggcgataagaatatacctcggcagtctgtccttattcttttcgtaaaaggctattgcgcggtcttcaagctttgctatccattttgatgggcgcacttaaaaattctccttccttggttacatacggttttgtttcctttgtgtgaagctcgggagaaagcctcagcaattcctccgcctcacctgttttaatggggtggagcaccgcctttttacctcttaatatttcctttgcggcgtccacctgccaatcgagcagaaagatatgcacaccgtattcggcagcagtctccatacgaggaaaatccaaatctatccccacaagtatcttcccgcctgcgtcgtaccaacgatgctcgggcggtgtatatttctttttaagaatattctgcgctataattcttctgtgctccttaacggacattatacgcatttgtcttgctccgttctccgacaagggaaagaaggacacggggcagtcaagccgccttactgcgtcgaaatacggcaaagcccttgaattagtggtcttgcgctgagcaaaggctaaaagctcgcccaattcgcctgctcccgtaaaagcggctgcgcttttcctgccgcctgtcagaatattcatactaaaggtgtttctctcggtttcgggatacaatccgtcgttctgttcggatatgtagtaaagcgccgttgcggtattctttgtataaagcattccgttaaaccgagccgtgccgagaggatttttattcttttcgcgccttaaagcaaaggcgggcaaaaaagacagcgggctatttctgtccgggacagcagaacaaaacacatccgtcttgccctgaaagagaaataacataagctcggaagtttgtaggcggcgtgtaagaaacgtaccgactcccctgcttttgctgtcatactcataactgtagccaaggttatccaatgtcgtcttacccttttctgtaacacgaatactaatactgtttctgctcgctctgagttgttcggtcaagagtaaataagacaaatcctctctattaatgttcttgcttttaacaggcagatccttacaccacccgcacagtctgaggaggtctatttctgtatttgtgtataacaaagcgcactacctcccgtactcgtgtaacattttccaatttttaaggtattaaaatccgttgaaaatcctttaataatgcggcttttaaggttatgctctttttgcaaaaattcaaaagctgtttttcgctacttttttaaaaaaagcgcactaccctaattcgtgagaaagccgcatatccgtgaatattcccgcctcgtcatcaggcagaacatatatatgacaacagctttcttcacgtagctccgtaaacagtccgagcgacagctcaaagcaatcatcatcgggaaacagcctgccctttaaaacattctgcacagccttaaatcccttgttgtcatggtcgaatacgtcgcttacatcgctcgggcaatactctataattcccaaaaacgcctttctgaaaaacggcagcttaaccccgtcaaaggagatttcgttaagcagccttaacagactgtcctgaacaaactgcgttccgcttacaaccctgcaatgaggtaaaagcgaattaagcttaatatgtacccaaccctcgggcgttacgcaaatctctccgtaaatctcacttatcctgccccctacggtcggagtgttttcctcacggtccgagcttcttaactgctcgtatagacggcgcatttcaatacacgccatctcctgctgctggagcgcaacctcaagaagattgttaaagcgttcgctgtcgggcggaacggaaattaaggaatccacacaggcgttgctcgccagcacccgctttttcatttcctttaataactgaaaatttgttgacatttaaaaaatcctttcttgacactttatgaattgtacgctataatgtacatataatagaatagaggtgaacggtatgacaaatacgaatattaccaatttcagaaaaaatgttttcgactacatcaatcaggctattgaatacaacgacgttataaatgtcaataccaagaacggaaacgccgttattatgagtgaagaggagtataacggtataatggaaacattatatttgtcctccgatccacgcgttaaagatgaaatactgaaaggaaaagacacccctctgtccgaatgcttgcccgcttcggaggtagaatggtaatgtatacgatagtttatactaaagatgccgcaaagcacattgctctgcttaaatctgccaatcttgataaacgggcaaaaaagcttatagatgtgatagcgaaaaatcccttccaaaatcctcctccctatgagaagctatgcggcgatatgaacgggctttattcccgtcgaatcaatattcagcaccgtttggtatatcaggtttatgcagaagaaaaaaccgtaaagatagtcagtatgtggtcgcattatgaattttaaagtttagttattctttgactcgtcttacataggcgagtcatttttttcgtccttatttttcatttgctcatttatcctgtttatttgaagacagcacataaatacaacacctaaacagcctccaaacattgcaccgcctaaaaagattaaaaatcccattataatttctcctgcttcactcttttttcaagactttcacggtcggttgtaataagctcaaactcggtatccgacgcgcgtatatctattgctatacggttgcgtcccgcacataaaagcccctcacccctgccgcagcggattatctgcattgtctcgctttcggtaagcataagcttttcctgaagctttaccgcctcggtttcctctaactggagcaacagtttcagcctgctgtttccaagcagagcgtcgccgaatttgccgccgttaagcgcaaagtaatccacgacgttttgggttgcagatacgaatatagcgccgtagccgcgcaccgtctttataagcccgactacgaaatccgccgcctgctcgttgccggtctcgcccgcaattttccacgcctcatcaagtattacggcttttttctttacgcgggataaagatattctgtcctttacaaactcggtcgctataaatgtaccgagcgccgtaaactctttgctaagccgagaagtatcaagaacaataaacggcgaagacaagtcaatattagtctgtcctccgagtcccgaggcagagccttcaaccagccgtttaagcgccatagtaacgcttttaagctctgtaaatttctccataaagggaattaaatccgcaaagcagggcattctttttatccttccgtttttatccgtaagactgcggttatcctttgtaattccaaagcttctgtaacagttaagtatcgccctgtccaaaagatatttttcgtcgggtgttattccgggataaagcaaatcaaagaagatatgaatattctgtattttttcaagcagtaccgagctgttgtcgcttatatcctcctttgagtctgcatcaatatccgctgtggtgcgccttatctccataagatttatacaatcattagagcctgcacctatctgaataaatttaccgcctatcgcctcgcaggcgctcctgtattcaaagcccttttcgggggttattatatacactcctactccctgcatacgaagccgcatcgcaagcagtaacaggaaaaaggtcttgcccgcccccgacattccgaacacagccatattgccgttgctgtaacgggttgtattgtagtggtctattataaccgacgagctgttatgcagattaagcccgtaaaaaatcccagtctcatcgcacatttcaaaggacgagaacggaaaggctgcggcggcgccgcttgttaagatattccgtgccgatttatgcgctatatcccggtctatttcaagtaacggaagcaaagacaaaaaagccttatcctgcatatagtcggctctccttgcggtaaagcccaaagagctacatagatttaccgtttccttttcgcgccttttaaggtcgtctacattatccgcagaaaccgacataagggggttaatataataaaaatcctcgccctcgcggtttatctgagctttcataaagagcgccgattctatagcgtcgtcaagctgttcataatccgagcgggtgtcgccgacgtcctgtattcttgaacggttaaataccgccgcattacctattttggttataatctgatcccggttcattctttcaagataaaagaccgccgttataccgccgcctgcctccgcaaagggagccgcccatgcaagcccagcagaggagggataaccgcccgccgaaagataaagacaggagcggtattcgccctctgttaccgtgtagtcacggtgggtcatatccgcgctgtcgggagccaatgcgtcccttacgtcctcgggtattgccgtcggctttatacctttaagcgacggtcttaaaaagccgcacaagaggtcatataagaataaatcctcatcagtatggattaccgtttcaagcccgcaggcttcaagatactgccttgcggtgtttacggtgtcggacatctcatcgaaaatcgccgacatttcagccgactttccctcatacggaagtactatataaaaccgtcttgtaaccgcctgattttcagcgatatagtttacaagctgtgcgtcctcaaatatcattctgcggcagttttcgttagcctccgagttgtaataaccttctaacctttcacagaaagcgtctatatccgcaggtcttgtttggacaactatttgaatttttgacggcgctattttaagccacgccgcaaagcctgagattatattcttttgctccaactccgacttcaaataaaagttgagcggaagtacctctaatacggtcacatatttaccgttattaagctgaattatgccgtccgaaatattttttacaggtactaagctttcggtgctgtcgttatttatttgctctttcggcacaccaaaaacaatagatttcaaatcaggaattttcattgcatttccccctgtaggtgagaatttttctgtttttgcgaaagcgtatatacagccgcaaaaagttaagcaggcttgtatctcctacccctataagcgcaaacccgccgacaatcacgataacaatgcaggtgacggtaattcgtgctaatgcagggataggaagtatacgcataagcaaagccgccaaaggcacacataaaaataccgcctcgacggtatttcgtatttcaaacattccgaacagcctccccgcgtcggtaaaattagcggggatttgggtggttatttcgtccaaataaatcactcctcttgttaatttttaaaccgatacttgaagaaatcctcggtttatgatatactctaattgaaaggtggcgaaactaatgaatgacgaaatcagtcaaaaatcaagtcttgctgcttttaaaaaggctcagaaagaatttgaaggcgtagccgaagagcttggtataaagaatgatgacgatattcttaaaatgatttcagaactacgcgacaaaaatttaacttaacggagtatgacgccaatgccaactatttcaatgtttcgcggaattaaaatttacataaactataatgatcatatgcctccgcattttcacgcaaaatacggaagtgatgaagtgcttgtctccataaatgatatggaagtaattgcaggcacaatgccgaaaaagcaattacagatgatcttaggctggggagctttccaccaaaccgaactgatagaaaactgggagcttgctatgaaaaagcaggaaacattccctattgatcctttacgctaaggaggttcatatatgcgtacagtagaatattatcttgaaaaaggtttcagtctgccgtatgccgaatattttgcaaacggcaaaaaaactatactgaaagccactgcaaatgaagatttttccgttactcttgaatttgagggcggcgaactccgcagattggatatgaaaccaactttaaaccaaggcggcgtattcgagacatttaacgactttaataatttcaaacgggtatatgttgatagtgataacattgtatgctgggatttagatccgaatatagacagcaatattcattggaacaacaaaattgatttgagccctgaattttgctacgtcgaaagcacacctatgtaaatatttcttccctccccgccaaacggcggggatattttattgttcggataaatcttttaaataaagctccgcccattccttatccgcgtcggagaaatttttatacctcatatattccccgaacgtaagatagcggataacggcgatttcattttctgtattatttccgtccgacgttaagctgtacgaaacagactcgtctacgcactccttaaggtattcccttgtaattatttctgtatcgctgccggtcagcacaagacagaccgaataaagttgcctatagcttaagggctgaccgacagccttaattccactcgcagcggatacctccggcatacacagtatctcgtccattctggatatatacatctcagatatatcctcatcggtaactccgatgtcagacggatttcctattcccagtacggacggcatactcgccacaataatcacaggtagcataataacagctatcgccgcacagagtatataaggccagtagcgttttgccgcttcaagcgccgcagctttccatccgccccttaacaatgcctctattatttttctgatagaaacaccgttctgaacggcggataaaaagcgttcacttcccgttttgctcattgtcgtttaccgcctctttaggaacgttttgcgcctcgggaaccggcggcgaagcgttcttaccgaatctttcgggattaggattatgtcgcaccgtacccgcctttgcgccggcattaccggtattaaatgtactgtttttattccgtcccgctgtctgcttaccgctgacgaacgcagagcctttattatttgctcttcgctcatttttcggcttcggagcgtttgaatttttccctgtcggtttttctttatcaactgttttccctccctgcggtttcggtgaactgccgcctgctttgggcggcggattggttccgaaacggttagtatttatctttgtgccgccggaattactgtcaaattcagcagacttaggaatattgcttttacccgcttggttaaaggtgctgtgagacgaggtatttaccccgcctgaatttacggtgccgctgctctgcgtattttcggtccgagatacattagagccgccggaactgttgttattattattctttgtattattactgccgtttgtgttattccgtgtgccgcctgaactaaagcccgagcgcgagctgttctgtgccgatgaactgttatgggctttagctcccgaggtgtgcatagccgaattaattacacttctcgccgccagcatagcaacaaaccgccctgtgccatggtcaagcggatcgcccgtaaatgtcgggttcaatcctatctttgaaagcagagtgtccgccttacgtgcggtctttgcaagtcccacaataagtaccgtccacggaagcaccataagtcccgtcggcatagtgcccatagcggataatataagctttaaaaagagcacgtttgaaataagcagcagtatcatcgaagcgtatgtacggataaagcctgagcaaatatccttggtggatttactcccgcccattgcaaaggctaagggactgaataaggtcaaaaccgccaccacggcataacgctcgcctatctcaaaaaacagcttcagcacctgtatcccaataaggacgcctactataataataagcagccacgaattactcagctctgtaaaaaaggttttatccgggaaggttatttctacatcctccggtatgcctataaggtcggttattttctgcccgatagacagcgctatctcgcatatctgatgcgaaaagaaaagcagaaacccgaacagaaaggtacgtacaagaagtatgggcggggactcggtttcaaagcctaaccctgcgaacatagctttaaggcactgaaaaatacagttgcctataagcagtccccagcctatcgcgacaaaaattctgtaaagctcggttaccacaggcacattgctttcaaagtaggcaaggtcggtattcataagacctagcagagactttgccgcataacccaaaagctctacaaagaggctgtaaagccagagcgcaaaatcctttattatggaattaagcatatttctttcctcacggcaggtagttatatcccgcaaacaagggctgaacgtaggcaataaacgcgcctatgccgttaattaccgcccaggcaagccatactcttttaagccacgcccaagccgcatcggctttctgctgtgcacctgacattttcacaccgattaccgccactgccgacataagcgcagcaagcacagtggatattcccgcaatatggttgtatacgtcgcggattattctgtcacccaattcaaaaatatcctctcctgcggcgaaagctgtcatcgagagagccaacataagaagaaaggcaaagcagataacgcttatatttttaaaaaacctattcgctttcgtcctctgcttcatcttccgcactccattcacgaagcttactatcaagcatttccataaattcgccgaaaaacgccgcaagcaaatcccgtcttgaggaaataaggtttatttccaaaggcgtcttccagccgacaaagccgtacaggaatgtaaggtaaagatacattcccgtgtagtccgagttgtcgtacattttattgaaagtatttataaccggcttgtcacggtttatcctgaattttaaccttgaatgaaccttaacgattaaaggctccgccatagtctctgcaattttccgcattttttccttagacggatttcctttagccgttaaaattcctttgtctgtgagcattgtatccgggtcttccctctcggttatatctcccgttaaaaaccgtatttcggaataatcggtaattgacatataataatttttcattttgagttgctccttcgctttttaatttgtaggtatgccgctgttatcgcggctattataaatgttaaaagaaaataaatcggggtttgtgtatcgcctgttttgggtgtttcggtaatgtgaggctcatcgggtattttttggtttataagctttaagcttaaaatttcgccgtccccggttataacggcattattattttcctcagataagatatatccgtcgggcggtataagctcgcggacaatccactcgcctttaggtacgccctcaaaagaaaatgcaccgtacacatctgtttcgcaaattgctatcgcagtatctgtatcgaaaacggtctctaagggataaaacagccctattaaagcgccgcttaaaggctgaccgctttcatctgtcttaataccctctatctgtccgcggataattctgtttgttacggcatcgccgtttgtaatagggctttcatccaacaaataatgctcatctgtcgcggtttctttaatgtagtattcagcgccaaagggcatatccgctgtgaaaattacctcgccgtcctctgtcggagtaacctcctcaataagtccgtccgcgggaataacgctgccgtcaaaagcttcaagctcaatagcggcgaaaagcccgaaccgaacactcaatatctcgccgttatcccctatgccgaaatctaagtctttttcaagttcttttttaagggatatttcggttttttgacgttcgttatgtatttcggcgcttaccgttcctgccgtgaccgtaatctcggtcggctcagcgcttaaaacaaagccttcgggcgcggttttttcctttaaaagatattgtccgaggtacagttcaccgcttaccgccttgccgttttcatcagtaataagggtttccgccaaagcgtccttttcaagccttaatgcgccgtctgaggtataaatatcctcggcggcataaacctcaatctccgcaccctttaagccctgctcgctgtaaatcggggtatatacgccgttatcctctttaaccgaagcaaacacctcgcccgttttaataacggatattttccccttttggggcttgtctgttatttttaaaactatttcgggaacactcccgtcaacgctgaaggaaacgggaacggaatttaggatgtagccttccggcgggcttacctcaataagctcatagctaccgtaggtcagaggttcgggtaagcttaaaacaccgttttcatcggtatagtaaagcttgctttcctctcctgttttaacattccttatcttaaagcccgtaattcctttaacggtctgtcccgtttcggaatctgttttaattacggttagctttgcgcttttaagcttatttaccgcccgtattaaaacatcctgcgtttcgtcgcatacctttaccgtccattcggtctgacccgaataggtatacccctcggggaatgtaacctcacggataatatacgttccgtagggaacgccgaaattgagtttgccgttaccgttttggtcggtggtattaagtaaaaatacgtgctccgggttttccgcccacgttgccgagaaccgcgcgcccgcaagcggacgtccgttctcatcggtcttgtataccgcgatagtacctgtaggctcgcctatatcaggcactaccacctgcacaacagcctctggggagcttcccttgctcattccctctattgtagagatttcaggaccgttatcgtcgccgacgtgggttacaaaatgcttgccgttatatgtgcctgcataaattgcaacgtgagccaccgcccctgtggatatatttttaaatataacaagcgagcctaacggtatttcctctgcgggcgtaaaggtacttccgctttgagtaaaagaaattcttttcgctccgcctgattccacccaagaattcgccgatgtattgtaagaaacaggcgaacgcggatttgagggacaggcaaacgcagaaacatccctgtttgcaacattaggcagataattgtaataaacataagatacataagaggcacagcaaagcccgttcgctttgaatttggaaatatccggggctttgcctgttttggtgcctgcatttacggtttcaagtcccgatggtcccgtgccgtagcctattcccgacagcaccgacgacggcgtttttgtaccgtaggtcacgaaaatagtgccgtccgccttttgggtttcggtcttatatcccgtatatgtaagcgcgtctaaaaagacgttatccagcatatccgcaggtatgtccgacgcgggagccgcagacaaaggaagtgcggaaagcgttattattatcgctataattgctgttatgaattttaaaaaatgatttttcatttcctcaccgtcctatatagtattcatcataaacgctgcccgagattgtaagcttctcgctgtttttccttgcgctcaccattcccgcaggagtccataaatcggatttttctattgctatccggtactctccgtcagggtagcttaaaggtataaagtgtagcttaccgtagccgaagctgtcgggcagttcaaaatgcttaaaagtgtttcgtataagggtagtacaaaggtctgcaccctgcctgtaagaaaattcgggaaacagcgcggtcatatactgtatttcggtataaaccgcggggttcggtaataaatacccgccgactcccgtaacagcccctcgtatatccgccgaaaacccgcgtcccgaggatattgtagttccgccaagagagggatatagtatatccgcgctgtctcctatccctatcccataagttttcttttcaaaagcgccgtttgtataaagatattcccaccatgttgcatagccgtcactttctgcaggtacggcgggctttacaaaccctgcgggagccgctgcctcataagccgtatcgggagttgtatattctatatagggcgttgtctcatagtcggcttcagtatagaaaacctctgtatctccaaccttaacggacagccttgtcgtaacgctgccgccgtcaatcccctcgggtacgctccacttgaaatagcagaggtttttatcatttttcggtacgaccgccgccttttcttcggaatacagcagctctcctcccggagaataaatctttaattcggtttttacattatccgcaggtatataatccctgttcgagaggttcacaataaagccgcttgttacaacctcggtttcctccctgtaggttgcgttagcctccaaaagtaccgcttcaagcgtcctatcggtttcaagacctaaaaagacatacttagcctctaaacccattgtccccgaaagacccgagggatagcgcggaaagctgtatctgctgcttggataagtcgctaagtccgttaccgccccgaaaaagctcttgccctcagtaggtcggatattggttattgtataagttgtaccgtattttaaagcctcgtaaaaatccgatatatcctgcttatacagagttccgttaaggtagatatcaaagagacaccagccgtttacatttacctcctgctcgccgtccaatactccgtttacgtcaagattaaatttcttggtcgtaaagtcgggacatactgccgtcttcttggttacagtacccgaaatagggtctccccgccacgaagcgccgttatagttaaggtggtttttaggctttatatccgttatactgtaggtcgagcccgtatcaaccttctggtaaaaatccgtgacgtcgtttgccacaagcttaccgtttacatacacgtcgcaggtgccgcagttattgaggttgggctgcaaatcatcgtcgagaattgcgtttacatcaagataatactgcaccggctttgtaaggttactgccgtagagcatcgccgcgccgtagccgtaatacattatgttatagaaggttaagcgcgaggttgcattcgcggcggccggcatacccacataagcggaggtaagccgtaaggaattaggcagatacctgtttgtgtagttagctataaagccccagctattgctgttgcttgaggaattgccgttactgcccgagccgaattttgccgagccgtaaaaggctatttcggtcacggtgagggaatggtatgtgccctgtatttttacagggaatataggctcaataagaatagcccagcggttttcttcaagcttagctatagataatccccaaaatttagataacagcgtagcggtgtttgtgtcattgctccagctttgaattcccgttgttaattcaggaagagcgagacctacatcaacatcccaccaacagcccgaatagcccgagcttgttgtcatagaaagccatgtgtaattggctcttaaataggttttcggatatttaacatcgaatttataaaaggtaagataattacggttgtccgcgttttttgtggcggctctgtaaacgtccttgcaggctcccgccgtgttgccgtttgcgtctatcaaggtaaatctgtaccctactgcacggttactgttattcaccagcatatccggaacagcataaccgccgcttgatgctgttgtactgctgccgtctccgcttgccgagctcgtcccgttaaaggtaagggcaaagcagtcaaatgtgcagaaaattgaaaatattacggcggcaagggtgcaaatgattaattttttatattttctcataacgcttatcctccgcaggtgtgacaggtgtgcttagggataaccgcaccgcagtttggacaggtcatatcactgtccgaaaggctgtatctaaggcaggtgccgttcgttccgtcgccgcgtattctgccgcagtattcgcaattgtcgcttatttcttccttttctattgggtattcaagcaatacccactcgccgggtcgtatctcataatatccgccgtaggttttctctgtggtaagccctgacgcggtgcggtagattattgcgctttccccgtcccacgaaatacctgtttcggggtcggcatccttaacatactttttctcttgttcgggttcgggctgtaaaacaggctcgttatatacagagcttgtctttttctcagccgaagaaagtatttcatccgcctttgtctcgtcgggtttaagtccagtaccgtcgtcggttatttcggcggcggagctgtcctcggattctgtaatattaatcggcggttcttccaccgacaccgtgctttgggtattttcagcttcattattccctgcatcacttttcttttgcctgccgtttattaaaaatattcctccgacggcaagcgcaaggcagagaataaccgaaattatgattataacttttttcttcacaatgattctcctttaaaatttgtagtaaaaaactcctgttatctttacgggtacctccgcataggttatatttatatttccaaggcttacaggggtttttaaggtgtagtttactatgtaatttaacctgtctgtctctcggaactgaaaggtcatatttttaatttcatatccgtcgcctgtcagggtatttccgtttctttcaagctctgcataatcgcacagcgcctctgtaaagccctcgctgtcaagactgcttacaagctcggaatagcttttaaccccgttatatatctcaatggactgggctgttacaaagccgtcaagcgccgatcttacctgccgctttgaagctttaaccgccgtaagtgcggagataaatgaaagcataagcgaaaaaagcatacaaacggcgaccgttattacgcagaccgagatatatccctcggcttttctgttttgaataggtctaaagaacctgaaagatttgaatttcttaaaaagcttaaaagacttatccggttgcaaaaagcttaaaaaaatcattttaagtacctctcggatattccgacccgctttacactaacagtaagcggtatcttaaaggctcccgcgcccataacatctattcccgccgaaacctctacccacatactgtcgcctaactgaacggtttcctcacttgagtcaaagtatctttcggctccgtagtatatgtcataatacatatactcgtctaaatgtaccgaatcacattcccagaactcatctgtaaagccgcccgaatagcaggctacagtaataaggtcgtcggcggtctgacccagagagacacggagcataacaagctcaaacaggttaagtattattacggctaaggttatgagtataagggctgaaatacagacctcgacataaccctcgccttttttagaattaaatatcttcttcatttctaacctccgaacagcgccgacatactcgaagctatctggaatattattacggtagcatagataagcataaagcagacaagcagcgcgaccgacagctttttgaccttcttaggcgctttctttgcctgttcttttaacatttcccgctgaatttcagataacttcatactaagcgccgcgaaatacagccgcatatcgtctccccgtataacccctaaaaagccccgacaaacgtcggacatcataggactgccgacccttctttcaagccttgttatcgccgtctcataaccgcccgatttcatatccgccgccgttattttaagctcatcggaaagctctttatctgcgttcgcggcataggactctataatgtgcataacgtcccgcgagtgtttaaggttcttttcagccgaggacgcgagccccggcagaccgtattctattttttgccttctttgttttagctttttcgcaagccgtctcccttcgcccgtataggttattaccgcggcgattaaaagcacgggagacagcagcggaaaaataaaaatcataggaaccgcaagagcgcctataacccccgcctttactatggcgtttgccctgaactgctcgggagaaagggaaatatccgcgcttctcaaatcatttaaaaggcttatccgcttatacccgtttatccgaatatgctgtgccaacctttttgaaagtccggagagccatatatccgcggcattttcctttaccctgcgttttgaaagcagatttttaaccgcttttgaggtcttaatatacggaattttaaatatatccaaagccaaaagccataagccgacggacagcaatatacaaaaaattatctttataagcattgtctacctcctgtatttgatcggctttgtaaatttcttcattaggacaaaggttacaagtatcactattccgcatattcccattaccgctttacccggtgtggtgaacacaagagtattaaaccattcgcggtttaagaaatacaaaagcggaatatttcctgcaaccaacagcgccatcataagatactcgtttttagcgtcccttaaaacccccgcaagctcggtgtttacagtccttacgtcggaaagctttgagactatgggctgcagagtgtcctttaaggttctgtcatcctgacagcggacaagcgcctcgacccactccctgaatatgccgtcctgcgttttgtccgccatattaaggagcgccgattttgtatccgccgagacgctctcagtctcggttaaaaagctattgaaaatactgtaaagcggcggctttatgtatttaagattttcccttaccgctcctataatatcctcgctccgaagatacgaatttgtcaccgcagacaatgtggtttccatttcgtcgtcaagctgtttttcgtaggcggataaaattccgctgagataaagaaacggtatacagccgaacgccgcgcaaagcacgggcagtaaaaacatatttttaatgattaccgccgcggccgcgcctataaagacaagggcaaaggacgccgttacagcggcggaaaagctttttgctttgcctgtggcggcaagcgcttcttttagtcttaaaagctttgtatatatgccttcctttgccctgccccttaatgcattcgaccgtgcagacactgtatttttaggtttcaaaaaacttataatcccgtcggttatactttcggcagtaagctcaaatacaaggcatatccctataaccgctaaaagcgccgccaagattttaaaaatcatctgtaatccgcctcctttatctcgaattttcggagcagttctgcgggagcgccgtactgtagcagccgctttttaagaccgtcgcttatattttcaggctgttcaaaatgccccgttatttcatatttcccgtttactatcctgttttcggttatgctgtacctgaaaagggtgcggtaggttcgttttccctcgcccgagacaacgcactccgaaatatccattatttttcttttgttatcctctagcttatgcgcaaaaacaattaagggaaaagcctgcgccgcctgtgctaatgaggtctcgaattttatggggaatttcttctggcataaaagcgcaagtcttgtatgcgccgaatctgcggcaagagcgtgtattgttgaaaccaccgtatgtcccgtaaggcttgcctccaccgccgaatacgcctccgcgtctcgtatctcacccaccaccacaatgtcggggtcaaagcggagcgaggcgactaccaaatcctcctgcgctatatttgagccttcgtcctccgacggacgggatagtgtatgcacaacattgtttaccaccctgccgtcctttcgctttataagggaaagctctcgcgaacccgattcaatggtaaatatccgcttttcgtccggaacggtcgcaagcagagcgtttaaaagcgtggtctttcccgacgaagtcgcacccgcgacaaggaaggaaacaccgtatcttaggcacatacataaaaagtctgtcatcttctccgtcgccgttccgaccgagactattttctcggtggtaatatccgaattgtgaagtaaacgaattgacgcgcttattcccctgtcctcatctacaacaggagttttaacggcggttattcgggtattccccggcaaatgcccctgcgctattgggcaggcgttgtctattatcatgccggaatgatggagcaatctttttacaatatcctcggcgtgcttgggactgaagaaatgctcctcagccttttcggttctgccgtcccgataggtaacggctatatcgtcccagccgttaatgttcacttcctcgatttcttctctgccgagatatttcgtcagcaccgaatactccgccatttcgctgtatatgcggtcaactaagagtttaagctccgtttcctccgtaaagcccttatcccttaaatatttttctatgtacgcctttagctgtacggttttatccttatcgcttaccgcctcggaataaagggcggatatatgtctctgtgctccgcttaacaggctgataaaatcctctgtattcacattaccgcctccgcaagccctctgcatacagccttgaatttaggatcgggtatacgctcggtaagagttcccgttattatctgctgctttaaataaaagcaatacggaataatatatcttgcatttgaaaagcccgtctttacttcccctacaggcagataaatctccctgtcgtttatgtttatagcgccgattgtcttatcctttaaaagctcatagcttttctcaaaggaggcgtaatatgcggatgagcgtatatccggcggaataagctgaacggcgttatccgcaatagttaatgcgtatgccgataacggatcgtcaagccccgccgtgcagtccaaaaatatatgctcggctgttttaaggcagttgtcgaaaaattcttttaccttatcccttgtggctctcgcgtaggtatatttattttcgcccgccttataccctaaaaatccgaaattctgcattttaggagtggttacggtatgccttaaaatgttgtcctctgtaaccgaggtgtgttcgagcagctctcccaatgagaacagctctttatctctaaccgacggaaacacaagccccataaagggtgtaaccgtatcgggcgacacaaaaagcacgcttttcttataacagtaatacagttcttccgctatcttaattccaaccgcggttttaccgctcatcggcggtccgcaaagcaatgttagctttgacatttattatccctccccgaaatatttatcctgtgcggctaaaaacacctgcgctgtttcttctttccctctgtaaacaagcgccgtctgaatattgccgctgttttcatatgcggctatgagccgtgcctgttcgctgttgcaaagcaccgtcaccgtggcggcggtaggctttaccccgttttcgttaggcgcctgcttatctgaatctacgccgtcctgagtggtagtggttattacctttacatatttaagctcgggcggtattttggtttcgccgtttttatctgtgataattaaggtgataatatctcccgcctgaagcttgcccgaaagccccgcggcaaggctgtctaccgtaaagctgaccgccgcctttttcccgtcaaggcttgcaaatacctcctttacggtattgcctgagcctgaaagcttatccttgttgagataatcccccttataaaggtctgaaagggcgtatttaccctttaagctgtttacatcggtaattgtgccgtcgggtagtgtggattttttaacccttacggtttccaaatcctccgcagtgatttcgtccccctgcttaacatctcttacaagacgtataaccgacacctctccgtcggtgagcctattaatgaggggtgaaaagccgaaggttattaaaagactcagcaaaatacatacaattccgagcaccgttctgttcttcatatttttaattctttcctcctatgttttttcaatggggcattataaaagtttgcctctttattatttttcaataaggttatggattaactctttcctccttatttatctgataaaatatgcaagcataaaagcgggcgacaaatacggcagcaacggaaagctt

SEQ ID NO: 4036 - DNA, 32759 bp, Unknown
  16S sequences of unknown bacteria
gacgtggacgcagtgcttttgtcgcctgccgcggcaagtttcgatatgtttgaaaattatgccgcgagaggaagcgcttttatcgaaatcgtaaaggaactgaaaaagattgaaacgcgcagataacaatcaatattatttgcggtttgatcccgtgcttgtagcggcagtttgcggacttgtactgttcggaataatcatggtgtattccgcaagcagctataacgccgaagttaattacggaaacgaatactactatatgtataaacagattatcggcgcaattctggggttttccgcgatgttcgtgctgtcggtaatcgactatcatatcctgataaaattccgttacataattctcggaatatcttacgtcttgctggtgctggtgtttattcccggcataggcgtggaaaactacggcgccaaacgctggataaacttaccgttttttaccattcaggcaagcgaaatcgccaaattcggctttatagtttttgccgccgcgtatatggcgaaaaattataaaaaaatgaacacgtttctcggcatactgcccgtccttgcggtgggcgcgtcgatgtgcatgctcataattttagaacctaatatgtccataaccatgtgcgttataatgcttatgttcgccatgctgttcgtgggcggggcgagaataaaacatttcgtgcttatggctgtgcccgtggtactgcttgtacccgtgcttatagtgctggagccgtaccgtcttgacagacttatggcatttctcaatccgtgggaatctccgcttgaagaagggtatcagctgatacagtccttttacgctctcggaagcggcggactgttcggcgtgggattgttcaactccaggcaaaaatatctgtttctgccgttttcagaaagcgattttatattcagcgtaataggagaggagctgggatatttcggatgcgtcgcggtcatcgccgtttacgtcgtcattatctggcgcgccgttcgcatcgcaaaaaacagtaatgaccgtttcggctgttatctttctgcgggcatagccgcgcttatagccgtgcagaccttaataaacatcgcagtcgtaagcggttccattcccccgacgggattgcctttacctttcgtcagcgccggaagcagctccctcattgttttctgcgcttccgtcggcgttcttcttagcgtggaaagatttagccataaaagcgttaaatgccttattggaaagtaacacaacggaaagtccggcggcgataacggtatcgggcaagagataaatgatattgtaaacaaggctgtaagaaaccgccgcccagccggcaaggtcaccctgccatatcatgaaatcgatacccgaagaccagaacagtattcccgcaagaacgtggctgagatatcttacgaggaaataaaaagcgtaacccaaaagaatattgaaatgcgccgtcactacggggcggttgttcatcagggcgttttcgtattttgcaggcgaatagcttaaaacgcctataagggaaatcgccaggaagggcaggaaataatccagcaaagcgctccagggcgaaactatgtaaggattctggaaaaactgcagcagcatgaaagcaaagcaaacgatcatgcttttacgaaacccgaaatagtagcagtaaagccctatgggcaatacggacgccagcgtaatggagccgccgaaaggcagactgaaaagcttgatgaaagaaagcgcaaacgccgccgcaagacagatagcgccgtaagtaagctcccgcgtgccggttacgcgaacaatgcctttctttttctcgactatcgccgtcaggacaaaaagcagcgccataatcgcaatcacgacgacaaacagtacaaccattttccatggttcggtcaatacgttaccgaaatcaaacataaaaatatcctttaataccactaaaaaagcctaccgacattacgcgcggtaggctttttttaatctgattgcatcaaaaaaatttacaaacagcttccctacgcgagtactaactcacaggttcaaagggacagtcctttcggaaacatctcagcggtcttaagccgcgcccctagcggtatcgtacatattatagtaaacgataaagtttatgtcaagcgtatcgggatttattgttgcaatttaatttacggtagtgtataataaaaaacatgaagtacgtaaaagcgacattacgatatttttttgcgcattttcccaagcttatggcgattgcgataattcccgccgcggtagtcgcttttttcatggagccgcaaggattcggactggtgcttaccgtcagtcagctcgaggccgtgcaaagtttttcggacgtgttctttttggttttcagccgcaatcttataacgcgatggccgtatatgattttcgtttcgcttttattgattctgctgtgtatcagttatacgatgggagtggtggaaaaacatttccgcgtcggcaagttttcgctgagacagcctttttccaatattaacaactgttttgcttctgcgttcaaagtttttgcgttgcttgtcgtcatatatatagtttataaatttttacttgtctgcgtacttactctgcttacgtatgtgctggataatttctatgttgcggacgtagcgattgcagtagtcatggcaatagcaagtctagcgggatttttgttccttttagtacttgttcgcccgataatatacgccgcggcaaccatgctggtctacggatactactttaaggacgcattgagcgtcgcgataaaaataaccgaaaaagacaggctggaactcaatattgctttgatttttccgtttgccgtttatttcacggtaagttcgttgctggtaatactgaatgcgccgtggattgttttgtgtttggtacatactttgctgatagcggttttggtacagtatgtcacggtttacgtgctgatagcaatgttcgaactttcgggtatagagcggcgcgacgtaagaagatattattaggagggagcgggcgtgtcctttaaaaacgcttttaagcttttaatttccaaattcagttacgtttgggtaatattgctttacattaccgtcatgttcgtaatccttttaagtttggggcttacgtttttattgccggtaatccgttcttttgccgcggcaggcataggcgatatgttcaataaagccattctgtcaattttgaacggggcttcgtttactgaagcttcagcgcaattcaacgctattctgagcgaaataaaaattatttttgccaccgactcaagaacttttgtaaattccgcattgtttatagtgctggtggttaccgtagcttacagatttatcatgggactgtatgaattgcctattgtcagcgtaattcagggcgtaatgagcgataatgcaaaatacggttatatggcaaaatatgttgcgtttttcggtaaatcggttaaattttctttggtgaaaatgctttttatgacgttatatgattgcgtaatgtattttatcgccataggacttgcaaaactgtgcgcgtcgtttatgcttttgcttgctccgtttgtgtttatgctgtcgctgataatcttgctttccttccgttattctctgattgccgggtggtcgcccgcaatagtggtggacggcaaaaagatttttcctgcgctgggtgcttcgcttaaaagcgctttttccgcattcggttcgctgttttcgctttttatgatggtttgggtgataataatagtgtttaattttatcatcggcgtatttactttttgcgcgggacttatcgtgaccgttcccgtatctattttcttcataaatcttttgaacatgacattctactacaaccgcaacggtaaaagctattacgtcgaaggtaacgtttttgtaccagactcggcaaaaaagaaataaaataaactttttaatttcgtaagaagtttagctttaaaataaaaaacttagttaaaacttaattttttgaaaaacataaaaggaaacttaaatttaattcaatagacaaaaaaaacgccgcgacggattacccgttacggcgatttttttattcagagaattttgtcactcgtcatgcaatcgtgcgcacctttacaacgctgtccatgcccttgattttatcaagcgcggcatcggacagattttcgtcgaggtcgagtataagatatgcatgttcgcctttagcctgagacatcaggttggcaatattaatgccttcttcgccgatgacagccgtaattgcgcttaacacgtttttaacgtttttatggaaaacggtaatgcggcttttgccttgacgcggcattttgcatgcaggcatattgacggagttggttatgttgccgttctcgataaagtcaatcatctggcgcgcaaccataaccgcgcagttgtcctcggcttcgggtgtgcttgcgccaaggtgcggtattgcgataaggtttttaacgcccagcatttcgtcggtggggaagtcggtgacgtatctcgacagtttttcgctttcaagcgcgtcgatgacggcggccgcgtccacaagttctccgcgggcaaagttaagtataacgcttccgtctttcatcaacgctaaggtatccttgttaaccagcgagcgggtagagtcgttgagaggaacgtgcaaggttataaaatcgctttttttgaaaatttcgttgatgtcggtttccttgataacgtggtggtcaagattccatgcgccgtcaatagagataaaggggtcgtaacccaaaacgttcatgccaagctttatggcgacgtttgcgaccattgcgccgatagcgcctaagcccacgacgcccaaagttttgcctttgatttcacagcccacaaaagcgcttttgcccttttcaaccgctttggtgacttccgcgccctttcctttaagagaagcggcccattcaatgccctcgacgatttttctgccggcaagcagtagtccgcaaacgacaagctccttgactgcgttagcgtttgcaccgggagtattaaatacgacaatgcctttttcggagcatttgtccaaaggtatattgttgacgcccgcgcccgcacgtcctacgcacagtacggaagagggtatgtcgtattcgtgcatattgaaagacctcagcactattgcatcgggattttccgcttcttttacaagagcgtaattgtcgctgaattccttgttggcgactttgcttatttcattaagcttcagaatattgtacattgtcaggctcctttaatttatttagcggttgtttttttcgaattccgccatgaattctataagttttttgacgccttctacgggcatggcgttataaatgcttgcgcgcatgccgcccacaagcctgtgtcccttgatggaaacaagaccgtttttggcagcttcggaaacgaaagccgcgtcggtttcgggcgagggggtggtaaacggaacgttcatgatagaacggaattcgggcacaacggggttgttgtagaaggaggaattgtcgataaaatcgtaaagcatctgtgctttttcctcgttaatcttctgcatcgccttgacgccgccgatactcttaagatatttgaatacttcggtcgctacataggttgaaaaagcgggcggagtgttgtaaaggctcttgttttcgacctgagtgctccatttcatcatggtggggcaaagcggattttccttacccagcatgtcttttcttacgataacaatcgtgacgcccgcgggcgcgatgtttttctgcgcgccggcgtaaatgacggcaaattttttgacgtcgatttcctgacttaagatgcaggaggaaaggtcgcctacgagaggaacgccgttcgtgtcgggaacgtctttatatcttgtaccgaatatggtgttgttatagcagatatgtacgtaatcggcatcttttctgaacatatcgggcgtggttgcggggatatatgtaaagtttttgtctttggaagaagctacttcaaccatatcgccgtattttttggcttctttgtaagctttgcccgaaaagttacccgtaacgatataatcgcctttcgttgaggaggaattatgcgcaaggttaaggggtacggcttcaaactgcaaggaagcgccgccctgaacgaagataatatcatattcttcgggtacggacatgagttctctcaaaaggctctccgcttcgtcgttgattttctcgtagggtttggagcggtggctcatttccattacggacatgcctgtcccttcgtaatcgacaaggtttttctgcaccttttcaagcacttcaagcggcaacatggacggacctgctgaaaaattgtaaactctcatatatatctccttatcaaaattatttaacgaaatgaagtataataaacattataaaacttcaaaattaaaaatgcaagtaaattctcccgatttaagctagattttcgtaaattttccgcattttgacgaaaaagcgggaatagccgttctcaaaccgtgcgcgcatccgaatgtcaggcaaaaaaacgtcgtctgttattgactttatagtaaaaatagcttataataagatatatggcggtattttactcgcgttcaataaaattaaattgttctggttcggattaatcgggcaacggataaggtaggattatgttatacgcattgtttacaataggaaattataccgttactactgtggatttgattgtcgcggcggtttgtgtcgtcggtttaatttcttttcttatttttataatacacgatatgaagaaaaatccgggcggagtcaaaagttcggataaatcaagaaaaggcgacgcagcggtttcctcggcggaaaccaaagatgccctttatcccgaagaagcaggaaagggcaaaaacaaaaaacaaaaaaataaagtcggcaaagaagaaaaagccgcaaaaaaacagtccgatgttttgtcggactctgaccccgtggttgcgcttttgggttttgacccgtattctcagcccgaggaggaaacgtgcgaaatcaccgaggagtttcacgattccgaccaggaaaccgaggatatgcgcgttttaagggaaaagatgaaaacggcggccggcattgaaaagaaaatttcggttttaaagtcaagaggcgaaaaagtccgttacgagctggataaagcctcgcgttatctgagggacaatcgcgttgtcatcgcttccgccgaaaccgtggaacagaaactgagggcggaacttgttgcccttacggcagataaaaaaaccgcaaagcgcaacaaagaaacggttttgcgcgtaagcggggagttggataacagcgtccgcactgctgaggaacttaaaaagaatgtggcggcaagaagcaacgacgaaaaactgcttaaggaggcttacagctatctcatggcagaggtcgcgcggtcggagcgtgatttgtcgtttgtaaattccgatatagaccgacttaacgaaagcgtgggggcggagcttaagcgcattgaaaacgataaccgcgcccgtgcgcttatgactaaatatgccgagcttaaaccccttctcgtggacgcaaattcaagctatcgcgcaattaccaaaaccgacgctcagctcaacgaagttcatgcacaaaagcatgaattgcgtcaaaaactcgacggactgatgaacgagcttaaaaccgcttacggcgtggaggaaacgcagctgctttcccagaaagtaagcgagcttaacaagaaaatgattgttctcgacgcgcgggaggaggagcttatcgccgcaaaagagaataagattgctgaatacaaagcggcaaaaagcaaagccaacgagtttctcgaccgcgaaaaatacgaccttgaagacattgtcgtggctgaggataaggtcataggggagctggaatacgatcagcttaaatccgaatacgagcaaaagaaaaacgaaactgccgcacgttacgccgaagcgcagaaaaaatacgattcggtaatttcgcgcaaggtgaagttcaagaaaaatcaggaaagcgaaaagcgggtttacgaagaagaaattcagtccgcactgaaagcgcttaaggccgcaagacaggaaagcgaaaaggccgccgccgattttgacagaattctgccgtcgctttcgcccatgtcgcttgttaccagcggcagcggcgtaatttcgcgcgagcgcacttctaaacgtgcttccgcaggcgtacaaaaggatttactcgccgcagaacgcgtccgtaaagacgttaacctcgaaaatacggtttcctccgtaaaaccttcctcaagcgaggtatactccgccggttacgacaaagaaccgaaagacttcataaacgaggtgcctgtttaccctccgcgccgaaacgataatttaccgtcaactcctacgtcggtgcagctccgccgtcttatggaaagacttaacgagcttgagcgtatagccctcagggaaaaagagcaacgcgcgcttatccgcagagagcaggattttgcagcccccgcagtcaataaaatagagcgcagaaaagcgcaggtggtggcaatgcgcaaaaaccttaaatacatcgacagtccgcgcgccgcaagggaattcagacacagactttatcagctttccatatcgctggacgaagacgaaatgaacgataacgttctttcggagcttatacgccgtaccatggcggacgctgcgtatcttggagataaggccatggaaaaacggggacgtgatccttacggcgatcgttaagggatacggtaacgtatgtttatttgtttaatgtttaatttagtcaaacattaacctccggtagaattttaaggagaattagcattatggcaaacagttatgacaaacggtccgactttaatttcggaatagatgatatatacgatgacgagatgtacggcgacgataagcttgatcaggttctcgacgaaatcgcggaaatcaagaaaaccatacagggattgccggaagcggaatcgtacgacggcggttacgatgaggttacaaagcttcgcgacgaagtaaggttttcaaaaaccacgcaaaagcttcaggacgatataagaagactgaataaccgtataaacgaccttaccgaggagcgtttcggggaagacgtaaggacgggcgaaatgcttgaaggcaatatcgaccgccttaccgccctttgcgaagaagttctcagaaaagtcaaggacagcgacagaaagttcggcgacgagcttgcaaatcttaaaagacagcttgtcaaacttgcgcccgcaggggaaatgtcaggcgcgttgaaaggcttaaaaaacgacataaaacacaacgaggagtttatcctgaatatcaataccctggtggaaggacttgttgccggaaaaaaagaggaaggcgatgattctcccgcggtttcggagcttttaagacagctttacgatttgaaaaatcttataggaaatccgtcgcccgcaaacgaaaagcgaaacgacgaaattcttgatttttatgacgaacttaataaagtaaaatacgatatcggacttaaaagcctgggaattgccgaaaaattcgcttccgtggacgctttggctaaaaagctttacgaaaccaacgaatacgatatcgagcccgttttaactcagctaaacggcattatagaaaagcttttgcgtaagccgcttgacagggcgtccgcgtattccatcatggaatattccgataacagcgacgtgataaatatacccgcgtcccgcagggaggaagtaaggacgtatctcgataaagttgccgctctcgtcagggacggcagcgttgaaaacaccgatgaccttcccgatatcatcgctcagaaaaacgcgatacaaaacaaccgtaacgaattcgagtgcgaaaacatatattccgctattctgaatatcaatatttccttattaagcgaaaaagattttaccaaacaaaaagcgctcagatccgatcttaaaaaacaaatcaaaaaacttacctcgcttgaggtgcgtgaccttgtaaactacccgcttgtttcggcggtaaaaccttaccgtcccgtaaaacgcaccgcgggggaaggcttattcgataaacttaacgagcttaaaaatttcctcctggacgcgaatttttcgggcgggggcggcatggttgcgccttcaacgacaaacaacggccttgtaaacgaaatcaacacgcttaaaaacgaaatttacagtctcagcaatatagacaacgtttctcaggcaatacttgatttaaagggcgactgccttaccattctcgacaaactggacgaaaaaaaggagcgggaagaggacggcggaattatcgccagcgttcccactctcaatgaaatagtggaacagcttgacaggcttttcgacgacgtaaaaaacctgcttgccgatacggaaaacaatattctcagttccgttgaggttatcggagaagcggtcgcgcgttttaccgaacagaatattcaattcaccgaaggggcgaaagccgatcgcgtaaaaattctggaggacgtcgcatttatccgcaaagctctcgagggcggcgcggttgcggcacttaccactgccgtcataaaagaatcgggacttaaaaacgaaaacgattcggcggaaaccggcggagaaaattcattagctcctgaaaatgaaactcccgacaacgaaatcaattccgacaccgagaatgaaaataccgccgaggaagaaaaaacagaggcaaatatagcgtccgaaagcggaaacgaagcgttaaatgcgcgtcttgaaaccatagaaaaaaatcagcagttgattttagaagcattgcgcggaatcaacacggcgccttcagccgtgattaatgcgcctatggatatgtcgatggttgacgaaaggttgaccgctttggaaaacaaggtcttgggcgaactcaaacttttgcgcgatcagttgtttgccgtaagcatggcgtcggtttcggacggagaaaccaacagctacgaaagctataataatataattctgaacgaaatttatgctttagaggatgaatttgacgcgtttaaggaaacgggcaatgtcggcttaagcaaagaccgcgataaaatagcggaggagcttgcgtctcttaaggaacagcttgcttccgcgctaagccgaaatgcggataacgaaagcattataaaggaacttaataatatcaaggaggcgtttaaggcccgtcccgtcaaagcagcgccgcaaaaagcggaagagcaatccaaaccttttgtcatgcagacggccaagaaaaagaaagttactcccataattaacaaagatctttccataaacgaaatcctttccaaaatcagcgaaacggaaatcgtacttaaggaagactaaaatacagttaaatataaaaagtgtctttatacgctgcgcagaaaaagcgcggcgtttttttatcttttttttaacaagcgcaacgaaaaatccataaaatgaagtatacgcaaaagaaggaattttcgtcatggttttgtttttcaccgttatagcagtcagcatcgacgcttaccttgcaagtcttgcatacaacctgaaaaaaccgcttaaattttatgaagtgctttacgccgcgtcgtttacttttctaatatgccttatatcgcttacgcttaacgacgcttttatagaacacttgtcggtggtaaaagaaataagcgctttgatttttatattcataggcgttaaaaactatttgagtatattcagaaagaaacctttgatggatgaatcggggcccaaggaactgtggcttttggggcttgcggtaagcgcggacgcggggcttgcctgcctttcaatagaagttacggcggcatatttgcctttttacgcttttgttatgtttgccgctcattttttctttttgcttatgggcgccgttacggtaagacttataagcgttatcaacaaactttcggtgctttccggagtttttcttattgccttcggtatttttaaattatttatgtagcggcggcggtcttaaaaacatagactgataatatactgataatatccttaaaggggtttgcgcgtatttatccgtaataatataaatacatatttccgctttggggcgaaaaacagtgtaattgactattgtttacgaaagggcggaaaaaacaaactccgctaaattacatacagaggcttaaaattatggaatatttgcgtgttaccggaggaaacaggcttgacggaagtcttaaaatagcttccgccaaaaatgcggttttgcctatcatagccgcagctttattatcggaagaggatattttaatcaaaaattgttccgctctttccgacataaccgcaatgatgaaaattatacgttctaccggaggaaaggctgaatacgacggtaacaatattttaataaactgcaggaattccaatcccgcgcttatagagtcggaccttaccggtaaaataaggtcgtctatttttattatgggtcccattcttgcgcgcttcaaacatgcggctttaagttatcccggcggatgcgaaatagggttgcggcccattgacctgcatattttcggactgaaaaaattaaacgtaaaaatacgggaagaaaacggtcacatcatctgcgacggttccgatatgaaaagtgcggaaatcgaccttgattttcccagtgtgggcgctacggaaaacatcatgatggcggcggttttcttaaacggcaaaaccacgataaggaacgccgcaagagaaccggaaatcgtggaccttgcggatttcataaattccatcggcggtaaaatctacggcgcggggaccgatacgctggtcgtggagggcgttaaaaaactaagcggcggggagtatactcccgtaccggaccgaatagcgggctgtacttttcttgcggcatgcgctttgaccggcggagacgtttatcttgagaatctgaggtccgataccgtaaatgcggtgacggaaaaacttatgcgcgcgggttgcgaacttactcgcggatacgattttgtccgtatacgctcttcgggtaagcttaaagcgatacataaagtggaaacgcagccttaccccggattccccacggatatgcaggcgccgctggtggcaatgcttacaagagcgaacgggtgttcggttatggtggaaaatctttttgaaaatcgctataaatatacagtccaactcaataagatgggtgctaaaattaccgtcaaagaccgtatcgccgttgtcaaaggcgtaaataaactgcacggcacttcaattaaatccgaggatttgcgaggcggtgcggctcttgtcattgccgcgcttgccgccgaaggggaaagcatagtaacgggcgtcagtcatatagaccgcggttattataaaatagaagacgatttccgcagtttgggcgcggatataaaaagagaaaatatacaactttaaagttataattttttataaaatcccgtgaacgcataaccgagttttcgggattttttgttgcaacgaggttactgtcaggtaacctttttttgtaaacaacaagcttattataattaagcggtatgatgacgataattatcgtgtctgacgaaagattgcaaacgcttttatcgcttttagtaatttttcggtcaatcggttgctttcctggtttttttttgatataattagtttatacgttcattttgcacacgaattaatttgaaatcatattttttccgcaaaaggacggtataaacctgattgtataggtagaaaaaaaacgtatgaggaacaaaaaacttatagttttattttccatacttgcattcgtgaccctgctagtggtgttaagcagcgttattttttcggtgcagacggtttacgcttcgtgttataacgacgatgacgaacagcttgacgcaatagtcgcgtcggaagaaatcaacggaataagccgcggtaaaagcatgtttatgctaagcgaaaaaaaggttatcgaaaaagtcgaaagcagccgaagcgatgtccgcgtagtgaatatagagcggaaatttcccaatcaagtatatatcaattacgttaagattttcgaatatatcgcttttgagacggaagattgcgttctttatgcctcaaacgagtgtaagatactttccaaaggtgacaagcagaccgagtataaggaccatataaaactcatttccgacgccgctgcggtatcgcaaaatgaaggcgatacgctttttgccttagacagttcgcagtacaaaatagtgtgcgggcttttggacgcgatggaaagaatggaccttcacagcgtggtaatcgatatgtttgagtttatcgacgtcacaagcaccgataaaaacggccttacattcataaaaacccgtacaggcgcgttttttgagcttcagggagggacaaccaatcttaccgaaaaattgcggcttgcggcttccgtttatttaagcaacgatacgcaatacatgaacagcggtaccattattgtaaattcttcgggtaaaacggcgtattattcgcccgaaaaccgatatgaaaacaggtaatttaaaaaaacggacaagcgcttgacaaacgttgcgcgtaaagatataatttatttaattgaatttttcgacaaaatacgtcagttgcgttatttttaaagcaagtcaacggttttgcgaaaacctacaaggagaagcaaggtggctcaagatactgcaattttggatttcggctccagtaaaattaccgtgcttataggcgagcgtggcgttaacggcacaatatgcgtcaaaggtatgggcgtttgcgattatgccggattttccgaaggagagtggctggacccggagcatatcgcgcatgcggtaggccgtgccgtttccagtgccgaagcaaactccggcgttaaaatcgaacatctttatgtcggcgtacccggcgaatttacttccgtggtgtgcaaagaagtgggaatagtccttaacaagcgccgcaaagtcaaggatgacgatgtatttgcgcttatgaacgccggcgacaatttcaatcccgacatttatgaagtaataaatattcagcctgtgcattacacgcttgacaacgaccgcagacttttgcagcctgtaggagttgccagcgctaaacttggcggcgttctttcctatattcttgccgaggcgtcttttacgggctttgtgcgcgcaatacttgccgccatgggaattaattccgtggaatacgtctcatccgttctggcggaagctttgatacttttcgacgaagaggagcgggacaataccgcagtgttaatcgacatcggatatctcacttcttcggtcgccatagtccgtggcgacggaattttgtcgcttggcagtttttccatgggcggcggacacatatcgggtgaccttgctaccgcattggggatttcgtttaccgacgccgaaagtcttaaacgcaaggtaatactttccattaacgccggcgaaaacgatatttacgagataagcgggaaggacggagtaaagactttgtcggcccagcttgtaaacgaaatagttactcatcgtattacgctcatgggtaaggctgtggaaaaatgcctttctttaagcgaatacgactatcccgattatatacctttttcgcttacgggaggcggaatttgtttcatgcgcggcgctaaagacgttttatcgcgtcagcttggtcgtaacgtggaaatcgtcgcacctaaacttcctcaggtcaacagacccaatctttcttcagcctggggcttattggatatggcaataaataacgaagaacccgtaaaaaaaggatttttcgcacgcttgtttaagaagtaacggaggttaattatgttacccaatacaagaaatatgatgactatgcctgcagtaatcgtcgttgtcggcgtgggcggcggcggaaataacgccgtaaacagaatgattgaggcgggaataaaaagcgcccgtttcattgcggtcaataccgaccttcaggcgcttagcatgtctaaagccgagcatcgcattcagataggcgacaagcttactcacggacagggcgcgggcgccgatcccgaaaagggacaaaaggctgccgaggaaagcagacttgcgctttcggacgcaatcaaggacgcggacctcgtctttataaccgcaggtatgggcggcggtacgggtacgggtgcggctcccgtcattgcaagcatagccaaggaaatgggtaaacttaccgtagccgtagttacaaaacccttcggctttgagggacgcccgcgtatggaccatgccgaaatcggcattgccaatcttaaaaaggtagttgatacccttgtggttatccccaatgaaaaactcatgcagtttgcgtcgcgcctgcctattctggaatccttcaaacatgccgacgacgtgttaagacagggcattcagggtataagcgaccttatcgtaacgccggccctcatcaatcttgactttgcggacgtctgcaccgtaatgcgcaacagtggaatagcccatatgggtatcggccacggcaaaggcgaaaagaggacggtagacgccgtaaaacaggctgtgttcagtccgcttctcgaaacttcgattgaaggagcgtccaaagtcattcttaacattatgggctctcccgacgttacgcttgacgaaattcaggaggcgactcagcttgtgcgcgaagtggtattgccgggtgcaaatattattttcggcgccgacatccgcgagtccatgaacgaggaaataatggttaccattatcgccacgggatttatggacgaaaaatctcagcgtgcggctttccagcaagctcaacagcaggctgcgcaacccgaacgtcatgcggcttctcagcaaactcaacaggctcaggctcaaactcagtcttcatcgccttttaaccccatggggcaggagcctcatttcgcgcgttctcaggcgcagcccgttcacaatcaaccgactcaacccgttcagcccgtcaattcgtccagaatttcggttgaggacgatttccccgaatttttgcgccgtctgaacaataaaaacaaaaaataaataagttttaatttaaaataattaagctcggttttttcaagccgagcttttttttattcctaaaaaccctgatttatagataaactattttttttgctgtttcttgactattccgtaattttgtgaatttgacaaagcataaagcaattaaagtaatgtatgtgataagtttaagatatttataaattcgtgcagtttaattttaataaaattaatttgtgtaattttaactgtaaacttgttttttgctttttctttaattcgagcgctttcgtcacgttgtcctttttttcgtgcattaagcaatgctataatcgcgttatgagcgcctacatagaatacgtcatattggataattttgttgtgacttatgcgatagcgtcgcttacttataggattatgttaaaaagagtttgtttgttaagggcggcgatagcgtcgtttatcggtactgctgttgcggttttttatccttttattaagggcgacgcacttgtgttaatcataaaaattgtgctgtggattgctctcagccttattttgtttcttaaaaaagaaaagtttttcatgtgcgctttgacttttttgagcctgacgtttctgttcggagggggcatgttcggtataggctttatcgtaagcggagacgcgtctgaagcactgcgccttaatatgcttgattttcccgtttcggcaattattttaggcgtatttttatgctggtggattgttaaaaaaatctcggtaaaatttcaccgtattcgcgacctcggaggggtaatttacgatttttctctttccatattgggaaacaccatgaagttcagaggacttatggatacgggaaacaggctttacgacaaagtcagcgggctgccggtaatagttttaagcgcaaaaagtctgatgggcaatatttccgacgagcagttcaggataatgttttcggggcgcggcgacactcttcagccacaggctcattacatggagataagtaccgtcgccggcggaaaaaacaaaattttattgcttaaaccggacgctttcgtattatattccgcaagaggcgggaatatattatatgatgtaatggtcggcgtatctttttcgcccataaaagacgcaataggctacgacgcaatacttcacccggcgcttatctgaaaacacaaaacaatcggaatgtccgaaaacacacaaggagatttatgcgcatgaaacttaaaaaactgtttgaatttattaaaaagcttctgggctttacggatgaaaccgtactttactacataacgggaaacgatgcgttgcccgtgccgctttcagccgaggaggaagccgatgctatcggtaaacttgccgccggcgatacaatcgtcaagtccacgcttatagagcgcaatctgcgtcttgtggtttacattgccagaaagttcgataatacgggcgtggataccgaggacctcatttcggtggggacgataggacttataaaagcggtcaacagttttgcgcccgagaaaaacattaaactcgcaacttacgcgtcgcgctgtatcgaaaacgaaattctcatgtacttaagacgcgtcataagaattaaatccgaggtgtctttggacgaaccgcttaacgttgacttcgagggtaacgagcttttaatgagcgacattctggggaccgaccccgatcttgtatccaaaaacatagagaacagcgttgaaaaacaacttttatgggaggccatcgataagctttcttcgcgcgaaaagaccattatggaaatgaggttcggtttaagcgggcaggaggaaaagacgcagaaggaagtggcggacatcatgggcatctctcagtcgtatatttcacggctggaaaagaaaatcattttccgattgaaaaaagagatagcgaaagcattataacgctattttccgttttaagacattaaaaaaatgccgattcctatgataaggaaacggcattttagataataatccgatttatgacatgctttttttcagtgcggattttgcgtttttttcaagccgtgaaacctgagcctgcgaaatccctatttcttcggaaacttccacctgagttttgccttcgtaaaaccgcagcatcagtatttccttttcgcgctcgttaagcttgtctatggcttcgctgatcgaaacgttgttaatccatttttcgtcacagtttttaaggtcggaaacctggtccataatcatcacggtttcgtttccgtcatggtacacggggtcgaaaagcgaaacagggtccgaaatcgcgtccattgcgtacacaaggtcgcttagcggcatttccaaagcggctgcaacttcttctaaagttgcctcgcggttggtggcgctttcaagttcctgacgggcggaaatcgcgcgatatgccgtatcccttatggagcggctgaccctgagcggagagctgtcgcgtaaaaacctgcgtatttctcctataatcatgggaacggcgtaggtggaaaatctcaggttgagttccgtgttaaagttttccatggcctttataagccctatgcaacctacctggaaaatgtcgtccaccgattctttcttgttgtaaaatctttgtacaatgctaagcacaagccgcatatttgcaagaataaaatcttctttcgctttttcgtcgcccttttgagcttttctcaaaagttccatcgtttcgctgtgattcagtttgggcaaagacccggtgtctatgccgcagatttccactcttttcgccatgtcttcctccgtaatgttcgggtcaccgtcttacagtaaggcgcaatccgtattgggtattttggcgaactggacccgaaattataccgagcaaaaaaaattttttgtaacaactcctgttttgcggcatatatattgtgtacagaccatgagtaatattcagtatgaaatttcattttcggagttaaggtgtaaagaagtcgtcaacgcttgcgacggtcgtaaactcggcaaaatcatcgacattgtttttgcgggcgatacgggcaagataaagggcatagtgacaccttatctcaagcgtggctttttcggaaaagggcaggaggtttttattccctggcgttgcgtgaaaaagttgggcgaggacgttattatcgtcgacatcaacggcgcggatcagcttgacaggcaaactaccgcttcggatgattgcggttgtacggtaacgcctcaggaagataattgcgtcgatcggaatcccgatatgcccaattgcgaccgccgctgcgaaaaatgcatgctctttgattgcgagtaccgctggaaaaagtaaggacggagacttatctttctaaagcctccgtttaacgtatttttaagtgcggacaagcgtttactgccgtcgtaaagaagatttaagcgcagaagtttattaaaatcgatagactaaaacggctaaaacgattataataattataaaaaaacaaaaggtgaatatttatgaagtgtatgtattgcggatataccgaaagcaaggtaatagactcgcgttccgccgacgacggaaacagcattcgcagaagaagagaatgtcttaattgcggcaggcgtttcacgacatacgaaacaatcgaaaacacgcccgttcttgtggtaaaaaacgacggaactcgtcagccgttcgacccgtccaaaattcgcaacggaattataaaatcctgcgaaaaaagacccgttgcaatacacgacatagataagcttgtcgccgatatcgaaaaaaaggtttacaatactctggaacaggaaattccttcgtcgaaaataggcgagtacgtgatggacggacttaaggagctggatcaggttgcgtatatcaggtttgcttcggtttaccgccagttcagggacgtgacgacttttatagagtttatttccgaattcgaaaagagaatcaaggagtaataacttatttatgactttaatggacgcccgcaccgacaaggtttacaaagtgattgaggttcacggcgagggcaacgaaaaacgccgtttgctggatatggggtttactcccgactgtaaaatttacgttgcacactgcgctcctttcggcggaacgatacttgtagggctaaggggctttttggttgctttgcgcgaggacgccgcatcgcttatcgaaataggggaggcggactaaatggaatataccatatcgcttgccggcaaccccaacgtcggcaaaacaagtctttacaaccgaataactcattctctcgaacacgtgggcaactggcacggcgttaccgtaagcgaggtaagcaagactataatgtacgaccaccataccgtaaacatggtggatttacccggactttattctcttaccatttacagtatggaagaggggataacgcgcgacaacgtgctgtcgggcaaaaacgaccttatcgtcagcgtgtgcgaagtaaacaacctttcgcgcaatctttatctcacgcttcagcttttagagcttaacgtccctttggtgctggtcatcaacatgatggacgagcttaaaaaacagggaaaggtgcttaattaccgcaagctggaatcttatcttaaaattcccattattcccatgagcgccaagtatcacagcgacgtgcatcttttgatggacgtttccctcgattatatccgccattttcgcggcaacaaagtaaaacttacttatcttgacaaacttccgcttcaggacgttatgagtataataagcgcaaatgcatcgaatgcgggacttcagccgcggtgggcagccataaaggtgctggaaaaggacgaattcgtgctggaaaaacttgcgcttaacgacgaccagaaaaaagcgttggaggcaatgggcgactggcagtcgaaagtcgcgcaggcgcgatacgagtttatcgacatgattaccgaaggcgccgtatccaaagccgttgtcgacgaacatcgggaaatgcacgagcacgtcagtcaccacgtaccgcttgaaaccgaacccgctaaaagcgaagaaacgctttacgataaacacaagcgttatcacgatcagtataaaaacaattccaaactttatatgcaggcttacagccgcatcgataaagtggtgcttaataaatatcttgcgcttcccatatttctggcgctgatgtgtttgatttttttcgtaacgttcggacttataggcaactggctttcaaatcttctggactttttgattaccaagtttatttataagcctgtgacgaacgggcttacaagcataaactctccgctgtggattgtcaatcttgtgggagagggcgtaatcctgggcgttctgggcgtgctcaagtttttgccgcaggtagtgcttttgttcttcttccttgcgcttatggaagacagcggttatatcagccgcgtggctttcatgacggacgggcttttccgtaaaataggtctgtcgggcagatcggtttttacaatgcttatgggcttcggctgttcggcaaccgcagtgcttacggcgcgcggactcgaagacgatacaatgcgcaaaaaaacggtaattctcactccgttcatgtcatgttcggcacgtcttcccgtttatacggtagttgccggcgcgtttttcgcatcgggtaaatttttggttatcttcggcttgtacattttgggcgcggcggtttcgctgctgcttgccgtaatcttcgaaaaatgggtaaaaaatcttaaaagcggaaagctgtcttttattatggaaatgccgccttaccgaatacccactttcgagagagtcatgcagataatctttcacaacgcaaaagtctttatagtcaaagtgggtactgttgttttcgcgcttaacgttattgtgtgggttctttcaaacttttcgtttacgcagggttacacggcgggcggcgaaaacagtattcttgcgcttttcagcggattcattgctcccgttttcactcctttgggattcgggaattggcgagcggttacttcgctgttaagcggtttcgtcgcaaaggaagtagtagtatcgagtatagaatcgcttggcggagtaggggccgtgtttacgggcgaatacgcttctctttccgcattgacgttccttgtatatacgcttctatacattccgtgtatagcgactttctccgccgaaataaaggaagtgggcgtaaagtgggcgcttttcggattggttctgcaactcgcggttgcttatgttgtcgcgcttttgttccacacggcaggccttgctttcataatcaatcccggcattacggtaggcgttatcgtggtagccttgattgcagttgtgtgcgttgccgtgcttataaacagaatcaaaaaccgcggaaaatgttcttgcggttgcggctcttgttcgtactcctgcgcaaaacgcgacaaaaagtccggggaaaaggacagcgataaggacgggaaaaacaaataaaaccgcaaacctttgacaaaagcttttaatttagggtataatattaaaagttaaatattactattaaggaaaaagagatgaaaagaaagaagaaacccgttgaagttcagcctgccgaagtaaacgaaacggacgtaaagaagaaaagcaaaaaaccttggattatttctattatcgcttgttttctgggactttgcgtaatcgccttgggcattatacttccttttgcgcttagcgacgagtacaccgataaagaaggtgttaatccttacgccgtcatgaagctttccaacggtatgaccataaattacgaaatttgggaaaacgaatgtcctattgccgcaaccaacttcatttatcttgcggaattaggatattttgacggaacgataattttcgacagtcagaacggttgggttcgtttcggcggatggcaggcggattcgttgcatcgcggcgacgacaataaggagtttctttcaaagattaccgaccgtaaatacggcgaaagcgactacagcaacaataaattcggttacaggttgaaaaacgataccgcgcgttcttcttattatgataccgtcggcgttctttctttctgctacgagcgcagcgctacggaatttcaggttgccgcgtcttcggatttgtcgctgaccattcccaacgacaacaatcaggactggaaggttgcgcctttcggaatggcggcggacagcgaaagcatatccaacatagttgcaattgccgcgctttcccgcgacgaaacgggtgaaaaattcagacacgattattatcgcgctcctcttgacgaggacggacttatcaaaatcgagtccgttaaaataaccaaaaagaacaaggacaagtggaaaaactttgattttatggaatacgttaaaggtgaaaattcttcaaacgttctttacagttggtattccacaaaaagggttacgggaaccaaaagataaattttttaaataaacaggtataaaaataaaaaaattaccgaccattatcgtggaggtaattttttttatgacaatgggacttatcttgctgggcataatgatgctcgcattatttttcgaagtgggcaggtccgcgttcagggggcttggtctttccacgataggcgcctttatggtaattctggcgtttgcgataggtattatcgttccctcgatttccttcggcggtgttttctacatgaacgtcggcggatttattttacctatattagccatgttcgtgctgcttgtggttcttatacgcaataatgccgttttaagaggagttgcggctatgctttccgtagttgcggcgactgtgggcttattgcttatcatgcccgtaaacaacacaggtatgattgtgcttacttcgtttgtgctgggccttatttcgggcgcactggcgtttataataggccgtacccgcgtagcatcgctttttgcggtaacgggcggaattgcagtgggcgacgttatattctgtctgctcgattattttgtaattacgggcggagcgtttaccttaggccgggtagtagtgtacaattcgattttcgtcgcggcgctttttgcgctttgtcttgcggaaatagtcgttatgacgggcaaagctatgggcgaagaacgtaccaataagcgcaatctgaatttcgaagcgtccgaagaccgcgcattcaagtcaaaattatccgatgacgacgattacgaccgtttcgacgacgaattgttctgataaaaaacttaaccctatacggacggcgaaaagtcgtccgttttttgttttgcgccgcgcttataaaacaatggactttttcaccgccttatgataaaatagaaatatgagcaaaaaacctttagtcgccgttgttggaagacccaacgtcggtaaatcgacttttttcaataaagtgtgcggaaagcgcatatccatagttaaggataccccgggcgtcactcgcgaccgtatttatgcggacgccgaatggtgcggttataattttacgcttgtggacaccggcggaatagagcttaaaagcgaggacggaatgtttaaacacattcgcgcccaggctgaagccgccatggaactaagcgacgtgatactgtttttcacggatgccaaaagcggacctgttgcttccgattacgacgtggcggaaattttgcgccatactaaaaagcccgtattgctggtcgtaaacaaactggacaatttcgacgttcaaataacttacgatttttattcgttggggcttggcacgccttatccgatttcgtgcgagcaaagccttgggttaggcgaccttcttgacgaagtggttgcgctttttccccgccgaacggaaacggaagaggagttttcgcttaaaattgcggtggtgggacggcccaacgtgggtaaatcttctttggtaaacagaatgctgggctttgacagggtaatcgtatccgacgaggcgggtaccacgcgcgacgcggtagatactcagttcagatacatgggcaaaagctataccattatcgacacggcgggtatgcgccgcaaacgcagcatagaggatgaaagcgtagaggactattccgtcatgcgctcgataagtgcaatttcacgcgcagacgtggtcatgattgtgttcgacagttccgaagagatatcggagcaggacgtcagaatagcgggatacgttcacgagcagggaaagcccaacattatcgtcatgaacaaatgggataaggtggaaaaggacgcgcatacggtggaaaaatttaacgataagcttaaaaccgagcttgcgtttatggattactataaggccgtctatatttccgccgctacgggtcagcgtaccgaaaaacttatcgggctttgcgacgaagtgttcgtaaacgcgtcgcaacgtatttctacgggcgtaatcaacgacgtaattgccgaagccgtcgccatgaacgagcctcccacgcattcgggaaggcggcttaaaattctttacgccacgcagcccgaaaccaatccgcctaaattcgtcatattcgtcaacgacgaaaaactggtgcatttttcttacagaagatatcttgaaaattacttgcgtaaatctttcgatttttcaggcactccgataaagttgatattcaattcccgcaaggaggataagcagtaatggcggtttactacataaccatggttgcgcttatcttcggcgcgtatttgttcggtaatatcaacgtttcgataataatttcgcacttcaaaaaccgcgatgtccgtaacgaaggcagcggtaaccccggcacaatgaacatgctgcgcagtttcggtataaaactgggaattcttactctcgtactcgacgctgtaaaaggtgctgtccccgcgcttttgggctggtggctcttgggaaaaggagaaatgttttctttcggcacggataaaatcgggctttttatcggcggaataagcgttgtactgggacatatttttcccgtattttataagtttaagggcggtaaaggcgttgccgcgtccataggcgtttgctttgttgccgcgccgatagttgcgcttattgcttttttggtgggtgtggtatttattttaacggttaaaatcggttctcttacttcttttataatgacgggtattccgcttatttattgctccgtaaccgccttttcgtccggaagaataatcgaaggagtgcttgccgcggctgtttatgtaataatccttttggcgcaccgctccaattttgcaaggattttcaagggcgaagaaaagcagataatactgttcggcaaaaataaatcggcttcattaaacaacgttaaaccgccggcggaatcgggggacgaaaacaaattacctgaagaaaacgagcaaaccgacgaaacgcaggacgaaaaaatcgacgcgcaaaaaagttaggaccggccctgactttaaaataaaaacaattaaatcataatttctcaatcctccggcatatactctaatatcaagccttggaggatttgtttttaatggaacaatttgacatttataaagacatcagcgagcgcaccgacggcgatatatatatcggcgtagtgggacccgtgcgggcgggcaagtctacgtttataacaaactttatgaacaaacttgttattcccaaaatcaaaagcaagcacgtaaaggagcgcatgatggacgaacttcctcaaagcgccaacggtaaagccataatgaccactcagcccaaattcgtaccgggcgaggcggtttcggtgaaactcggggacaaaatcgacatcaagataagattggtggattgcgtaggctatcttatcgacggcgccacgggacatctcgataacgataaaccgcgcatggtaaagactccgtggtcggatgacgcaatcccgtttgaggatgccgcggaaataggaacccaaaaggttatttccgagcattccactatcggcatagttatgacttccgacggctccatcgataccgatcttgcccgcagtgcttatgttgccgcggaggaaagggtagtcgaggaacttaaatcgctgggaaaacctttcgtcgtcattctcaattccaaagtgcccgattcggcggaaacggtaaaactcggtaaggctcttacggagaaatacaatacccccgttttgcctatcgacgttttgaatatgggcgaagacgacattacgggcctgtttaaggaagtgttgatggaatttcccttgcgcgacatcgaggttaagctggacaaatggctgcaggcgcttccgcccgaaaacgagattattacttcgcttacaaccagactgcttgaaaaggcgcaaaacatgcataaaatgagcgattatacggcgcttgaggacatgatgagcgaagacgcggattttgcgggcgtagctctcaacgaggtggagcttggaaaaggtaaagttatgtatgaaattcaggcaaaacccgagctgttttataaggcgctgagttcttcgtgcggcatggaaataagcgacgattttacgcttatgtcatacatgaaagacctcgttcatgccaaaaaggaatacgataagttaagcgtcgctcttgaagaggttaaacgcacgggttacggcgttgtcgcgccttcgcccgaagagatgactttggaggaaccgcaaatcgtcaagcagggctcccgcttcggcgttaaacttaaggctaccgcaccttcgcttcatattatgcaggtggatatcgccgccgaagtaagtcccgtcatgggcacggagcagcaaagcgaagaaatggtcaaaaatatgctggcttccttcgaaaacaatcccaaaggcatctgggataccgatatgttcgggaaatccatgcatatgctggtaaacgaaggactaaacaacaagctcaattcgatgcccgacgacacccagaaaaaaatgcgcaaaactctttcgcgcatcataaacgagggtaagggcggagtaatctgcatcttattgtaagatttacaacggaaataagggcaatgcgattgctgaatagtcgtgtaaattaataaaaaaaagagcgccttaactcaggcgctttttttcggttatttaatgggtacagattcaacgctgaagtgctcccgtcgtttttttatcgcaataagccgcacgccgtaagcgattataaaaagacacgggattaacgtaaggatataaacttctgcactttctatcagaaatccgaagactgtaaataaaactaataaaactaaaccggttactataaccgcaagactgtaatttttttcatatttgattttaagttcggtttgttcggttataatgtttattagcatcaaagcaaaaacacacaagctcagcagaataaacggaaagtaagcgaaaaagaaatattgttttatttctacgattttctccaaggtaagttgctgatgccgcatataacacggttcgtaatctatgaatactacgccgatcatataataagcaaaacaaagcagtatcaaaaatacatgcagcaaatacaacgatatgcggcttaatttattaaagtataatccgacgtaatcatataagcatttcatgattttcctccttgcataaaagcaataaaaaatcgtaaatactcttcattaatttaattataccataaattaagtaaatgtcaatatttaattttttttttagaattttaatgctcaaacgacttttatttatattgcggtttctttaaattccgtgatgccgtttgcggaagccgtgtaattgaataaggcgccgtttgttttttttcggggcaaaacttttagtatatgcgtaatttaaggcccgcgcggatagcttcgttttttattaagcgataagggcggtaataaaatttgaaattaaaggttaataaagagtacatttaatttatctcaacgaaacagggaagagattataaaaactttaagtcggttttgcctcgggtttttcgcggacaaaaaaaaagacgatgcttacaacatcgtctttttggtggctcatccgggagtcgaacccgggacaccatgattaaaagtcatgtgctctaccatctgagctaatgaaccttactggctggggtggagagatttgaactcccgaatgacggagtcagagtccgtagccttaccgcttggcgacaccccaacgataaatatgggaattgttgattggctggggtggcaggatttgaacctgcgaatgcgaaagtcaaagtctcgtgccttaccgcttggcgacaccccaaaaaaagggaatggggtgagtaaagagagtcgaactcttgacctccagagccacaatctggcgctctaaccaactgagctatacccaccatagatccttgtggtgcgccagaagggattcgaacccctgacccacgccttagaagggcgttgctctatccagctgagctactggcgcaaagtggagcgggtgatgggaatcggacccacgcagccagcttggaaggctggaactctaccattgagctacacccgcataaggcttacacacaacgcttaagaatgatatcacactcggaaaaaaaagtcaacgattttttatgattatattaaaactattttaggaattaattttccgttttctattgttacgctgcaataagagggaaaacccactctcggacgggaaagactgccgggatttatacaaacgattccgttgcaaaactgtatatccgcaaaatgagtgtgcccgaaaaacgcgtaagcgcagtcgttttcgcgtgcgaaaagcgaaaggtttaaaagatctccgctttttacgtaatgggtatcgccgtgagtaaaaagaattttgcccgcttcgctgtctataattatatctttgggattattcgagaataagtcgcagtttccgcacacgctgataattttgcatctcaactttttttgaaaggggataaggtcatcagttccgtctccgagatgaaccaaaaaactgcccgagttgaatacgggtacaagcttttcgataacttcgcccgaaatccggtgcgtatcgcttattacgttgaatttaatcataatttttccgtcagatttttaaaagctcttgccctgtggcttaccgcgtttttttcttcggcacttgcttccccgaaagattttttaagttcggtgctgtaaaaaagagggtcatatccaaagccgttgctacctctcttttcatgtaatatttcgccttctacatcgcctgaagcggtgatttcacgcttcccgtcgtaaaaagccactacggatacgaattttgcgcgcctgtcggatattcccgaaagatttttaagcagtttaatattgtttttctcgtcgtcgtgctcttcgcccgcgtagcgagccgaataaactcccggctctccgtttaaagcgtagacgacaagtccgctgtcgtcgcttataacggggcaaccgcacaatgcataaacggcttttgcttttataagagcgttttcttcaaaagtttctccggtttcttcaatatcaacgctaattccggcgtccgacatggaaattatatcgtatctgtcggataaaagctctttgatttcgcgcaattttcctttgtttgcgcttgccacaattagtttttgcaaagttgcctccgaagtatgtgaatttttttatatcattttagcaaaaatgttacaaactgtcaaagtaattaaaataaaaattaatctaaattaaacaagaaatgcaatgttatttgcgcaaattgtaattgcaattttatttttcgtatattataataaagcaaataaatttatcgggagcttattttaaaatgaaggttattactttcggtgagttgatgctcaggcttcaaccggaaaattatttgagatttttacaatgcgaaaaattcgaggctactttcggcggcggggaggccaacgttgcagtgtcgcttgcaaattacggcgtggacgtcgctttcgtaagtaaatttcctaagcacgaaataggccagatggcggtaaattctttgcgtaaatacggcgtagatacttcttttatcgcgcgcggcggtgacagattaggtatttattactgcgaaaaaggcgcctctcagcgtccgagtaaggtaatttacgaccgtgcgggcagcgctattgcaacagcagataaatccgacttcgattgggataaaattttcgagggagtagattggttccattttacgggaattactcccgcgcttaacgacaacgttgccgcaatttgcttagacgcgcttaagaccgcaaaaaaacacggcgtaaccgtttcttgcgaccttaactaccgcaacaaactctggagcaaggaaaaagcccgcgccgttatgacgggacttatgaaatacgtggacgtatgcatcgccaacgaggaagatgcttccgacgtgttcggcatcaaagccgacaataccgatattaccggcggcaaactttcgcatgaaggctataaaagcgtagccgaaaaacttgtcgctcagttcggatttaaatacgttgcca

SEQ ID NO: 4037 - DNA, 17366 bp, Unknown
  16S sequences of unknown bacteria
cttgtcccgtcaataagcccgagagacgccgacgaaataagctccgagcataacatcccgataatctcacgcaccgcgttaagctccgcttcggataccggcttgagtgaaggatatttcttcccgcattcctcccccagacagttttccgcggcagataagagcttgtcatacctcagctttaaatcccgccgcctctcagcctccgcacaggagcaaacgtcctccgcctcttctccctctcctgccataacaatgttcccgcaatacgggcattcctttgcttcaagttccatatatacccctcccgaaaaatttcatataattatcaacatcctgtggacaacaaatttgaaaacctcaatatatagcgtcatatgccgtaagcccgggcaagagcagcctcgtaaaatccgtccacatcaaaactgctttcggaggattcaccgcaccccatccgcgcctgattcagatacccctcgaacttgcttccgaataaagtctccggacgaatgtagccgcgcatttttgagcttgtcccccagtcggaaattttgaatcgaatcaccgtgaaaaagtcctcccgattaaagccctccgaaaacctcgcggaaataaactgccgcgtcttccgtgaacttgaacggtacttcacccccgcctccgagttcagaaaatcaataatggcgttgtagtcctcttccgtcggctttttcgagcttaccccgttagcaccgtcaacaatagcttcaagcgcgagatacctctccatgctgccttccgccccgagcgcatactttataatgtggtcgtaagcgagaatcctctcgtcagccggaagaacgcatatcttaaccgcaagctcctccgaaaatataaacgactttttcataacctgtccccctctaaaaattcaatctcattcggcgcacagttcagcattgacctccccgccgcgtcaagtaattccaccctcatgtgtccgggaacacgcgagagcataggacccatcacagtgtagttgtacgaaacaatggtgtatttccgcccctccaccgaaacaggaagcgaacagtccatgtacctcctgattttcgccgaaacggaatttttaacggattttccactgccgcacgtctcacagaataaccgaagcagcgtcgggcagaccttgcatgccccctctcccgaatttcggcatgacgaaacctgaagactcagcttcgcgagtgacgccgacatctcggataacgatacttcggataacgattcagccattccaaataccccctctcttcgcaaaataagcagtaactccgccgagcatgagaaatataaaggataaggcggcgcattcctcgcagagagctattaccatgaaaacgcagaacagtaaaatcaaagcaatcaagttcttcaaagtaaaatccccctctcctcgcaaagcctgcggaaaacctctttcataatcatgcattcgtgacagtatgagtcgccgccgttatagtaatactgtccggagctttcgagccgccgtacatagttgtgatacctcgagcggagagccgaatccgaataccccgcccccctgaaaaatttaagcctctcgcggatcttgtcctcgttctttgaattgtaaagagtgaaaacctcgcttttgtccgacgtaatgacaatgcctttcattccccctcaccctcctcgtcaagcgcgaacggttccacaagccccgccgtcaatggaataagaagccgcgccgcaggttcgattccgaagtataaagccgcattgtatacatcccgtaaatccgtggtctccggctcgctctttcggttgtatatcgtagatatgctccgcttcagcgcacaggctacatcgtggtcggtcagaccgttgatagccttgagataatctacattcttccagaagatcttcgcttccgctatgtgcgtctttcttgcgttgctgattttcggcttgttcattttgttttcactcctttatgtaaattactccccccgagaatttcgagaagctcctccccaatctccccgtcgtaaatcatcacttcgtagttctcgcttaaaatcctgccgagatatttctccgccttcacttccgccggggtgagagaccccccacccacggaaatttcggaagcagccgtggaaagcgcccgggaataaccattgaccctctcgcggaaccggcgtatctcctccgtctcaaaagcagtcctgccgagcttcaaagtcgcgcccgaaaccttcttgtagtcccccgccaccttgaaaaccctctccgcaagagcctgcctccgcttgttttgcataatacccactccttgaaaaagaaatttgcctgtgttaaaaggttgataattcgatattaccgttcaccattatgaaagttcccggcttttcattgtggaatatcctataatctctcttgcccttgtactctatcggataacaccggaattcgttaacatagtttagaattctttcatcttctgtgtaaatgtctttcgcgtaatacgtgcctatgaatttgtgatctgcgtcatagtgatttttgataaccaaaccaaaatggtattcaccattctcaaaatacacgtcaactctgtcgtatgccttgagcgtgttcagaatttcgtcgcgaactgcttcgggaagctctttcagctgtttcatggttgtgtcctctctaaaaaattgaattacaaagtctttaaaaagcaaatgataataacccccgtcaccgccccgaaaatgtagaacagcacggaaataaagtcaaaatttctcatatccccctcccggaaaattaaagatttatcttgcggtaaatttcgattgcttctctgagcgtgttttcgaccatattaagcgcgtttgtgtcaagttcgtattcttctttcgagattgcaccaaactgtaacatcagcacgttgctatgccttgaattgcttatgagcttccagatagcattgaatgttctggttgatacaggttcattttcttccgtcaccaagtcgttaagacggctgtgttctttatagccgtgtctctcgataattttccgacactcggcgcgagtatccatataaattctttcggcttttttcattgaatccccctcccgaaaattctctccatacagccgttcacaatgcttttaacctgacctatcgtgtcggataacatatcgtcaatggtgcgaaaatgaatccgacagcgaatttcggttataatagcagatacagccgtacaacatatcaagcacatcaaaaactgcattaatttcatatccccccctccctaaaaaatcacgcctgcgaccctgtgggcgttttttcaattccaagcagctcgtcgatcgtgcagttgagaatgtgcgagagtttgataagaactcccgctctcggcttagattttcccgattcccattttgctatagtagacctgctcacgccaagaagtgacgcaagataacattgagtcatccccgctcttactcttaaattcttaaagttcattatagtaacctctgttcgctgaattgtgaagcaacttcacttgtatgtattatacgttacaaaacttcacttgtcaaggactttaaagaaattaagtgaagttttttcacttctattgatttgtgaattgttttcacctataatagatgcggaggtgatgaaatggaacgtcttaaagaattaagaataaagaaaagccttttgcaaaaggatgtcgccgactatctcggtgtaaacagaacaacatacgtaaaatatgaaacaggcgcaagccagccggacaatgataccctctcccgccttgcggattttttcggagtttcggttgactacctccttggaagaacccacgaaaaagccgacaccgactttgagaagaaatttgataatatcttccgcatagaaaaaaagaaataccccctcctcggagatatcgcgtgcggtgaacccctctttgccgatgaagagcacgaaagctacgtccttgccggaagcgcagtcgacgccgacttctgcctcagagctaaaggagacagcatgaccggcgcaagaatatacgacggagatatagtcttcgtaaaacaaatgcccgtcgtgaataacggagatatcgccgcggtaatcataggcgacgaagcaacattgaaacgggtgtactactaccccgaaaagaaaaagcttgtcctgaatgccgaaaatccaagatacgagccgtttgtgtatataggagaagaattaaatgaaatacgaatcctcggtaaagcggtcgcgttccaaagtatacttaggtaaaatcctccccgttattctcgcaatagcattaacaggttgcggatatacccctgaagataatacggaagaacacggacagaggatagactgtcctttttttgaggaagatatcacaatgtaccccggcgaggtcgtgtccggatggatgagcattcagggcggagacacagcatacgatgaagtcgtcttttccacagatgacccctccgtcgcaaaaataaacctcatagatacaagagccgataccttcctctattacgaaatatacgccgccggagaaggagatacatatgtctgcgccaaaaccgaggacggagaaaccctctccccgaaacagcacgtcacagtctcaaagaacgaaacggaaaccgaaacagaatccgaatattacatcaccgcaggaagaatagatgaaaccgcccccgagacaaaacgggaaaccgaaacagaaacagaacgtgaaaccgagccggaaacagatccccccgcggttttttatttaccccaaacacaaaccacacccgagacaatagccgaaacttcccccgaaaccgtaatagtgtatgtcgcgcccgaaaccacacccgaaacaaaacccgtccccgtaaaagacccctcccccgaaacagaaattataaaaaccgacgaaccctcctccatgaccgaagaaagaatagaagagctcgaaggcaaagccgtgttctgggcgccgacaggacataaggtgcatctggaccctgcttgctggtccttcaaactcggagtaacctacgccggcaccctcgaagaagcggaaagcgtaagagaaaaaggatggtgcggctcgtgcggaaatgctgatacatatgaaaaatacggaaatatcctcgcaacaaaagaagtcctcgcaggatgctatacctacgaagactacctcgccgaaatcccctcccgggtgtttgagtaaaaaaagattggggtaataaggcgcgaaagactgaggacaaaagagaaatctcaaaactaaggtaaagttttatgaaatacgagaggaaaaacgaatatcaggcaataaaaattgaatctatagacgaaatatacggtattataagcgaatacaataacttttggtcttctccacgaaaagaatgcggggaagaagtgcggacattctatcgaggtcagagcaacagccgatggggtattcagccgagccttttgcgttccggtaaaagagagtgtgaggtcatagcggaaatcagcgattatggcagctctctttttgaattaatttcgcacatacaacactataagaccggtacacgttttattgatttttccactgaccccgatgttgctatgttcttcgcgtgcagtgaaaacagtaattcggacggcgcgctgtttcttcaactgtttttgtgccatgaaccggattggtatacaacttgtgctgtctgtgagctttcaaagatacccgaaaacaaaataagcgtcaaagagtttgccgaaagattgattgacagtgacagacgttttgcggaacacttctccgataccgaacaactgagttttgcattaatgtctttccttgaatacggaatccccgtagtaccaagcgagaaagaaactgaaactaatgcgcgtatgagaaatcaaaaaggctgctttttcatatgcggagtagattttgtcccaaagttggaagaaaatcaagaatttcgacggctcttgagttattcatcaaaaaatgcattcaagccgcactccgctgttgttcctgacagcctgattgctctgttgaatgcagaaaaacaagacagagcatatccattaaaaagcggtaacagacttgtgaaaatcgtaattacgagagaattaaagaaagatatactctcatatctgagtaaagaaaagaacataacacgagaatacttgtttcccgattaaataaatcaaaaaccaaacttaaaacctcacttcaaaaaccactgtaagtgcagccgaagcataaagaaaggaaaaaatatggctacacccaagtataacaaaaacacacataaatattccgtgcaggtctatatcggcagagacgaaaacgaaaaacgaatctataaacgcttcaccgccgacagtaaaaaggaagtggaaagcctcgccgccgcatataagcgcgcagtcgaaaaacaggcgaaaatctcccgcaaaataacgctccgcgaagcctgcgaaaaatacctctcctacctcgaatcgaagaaaagctccgtcagcccctcgacagtccgctcatattactccctcgtcaaaaatcacttccaaagcatgatggataccgatatcatgtcgataacggacagtatgctccaaaatgagatatacgccctcgaagaaaaggtgtccgccaaaacaatagcgaatatagtaaacttcttcgttccggcaataaagcacttccgccaaggctacgagccgaaactcaccctccccaaaaaacagaaaccgaaaaccaaagtgccggataacgataaactctacgaggatctgaaatcacttgaaggaaaaagattgtatatccccgtagtcctcgcggcgttttgcggaatgcgtaggagcgaaatagcggcacttgacttgaaaacggatgtagagtataatacggaaatagagacagcagtggaaaagcaccgtatctgcgttattcatataaataaagcaatggtgcaggataaaaacgaaaactgggtgctcaaatccacaaaaacggaagccggcacaagaaacgtgttcgccgccgattggataaacgacctattgatgtcggcaagcgaagatccggaatataaaatgtataagccgggagaaatgtcggcaagattcgcgtcatgggcaaaacagcgcggaatagagtgcagcttccacggattgagacattacttcgcgtcgatagtgaaagcattaaatatcccggataactacgccatgaaaataataggtcattcgtccgactatatgctgaaacactatcaggagataatggacgaaaagaacgtggaagtaaacgaaacactgctgacattcatcgaaaaaatgcaaccgaaatatgcaacagtagtacccccccaccgcgaaaacgagagcaaaagccacgaaaccgaaagaaaacgcgagctttaacccccaccctcaaaggttcgagccccaatgtttccatgcgggcggagaagcctccgcgggcaatatcggcgcttttttggctttagggtgacgatatcccacgatggttgagcattactgatttatttccacaaaagaagcctccgcgggcaatatcggcgctttttcagttttatggtgacgatatcccacgatggttgagttttcctgacttacacgcgacaaagtaaactgcattctacacaaaaatttcctgcaaaattcccacagaaaggagcagcaatggacatacgcactgccatatgcgacgacgagcttaccgaccgtgaagttgtttcgcagtatctcacaagatgggcgaaggagcacgggcacactattacgctcagtatgttttcgtccgcagagagctttctttttaattttgaggacaacaaagcctacgaccttcttctgcttgacgtggaaatgagcgagataaacggggtggagcttgcgggaaggatacgccgtgtcaaccgtgaggtgcagataatattcatctccggctacagcgactacatttcagagggctacgacgtcgacgcgctgaactacattcttaagcctgtggactatgagaagctggcgaaggtgcttgacaaggctgcggagaggataaagaccgtcgagtgcgcgcttttccttgagactgcggacggaatggctcgcgtacctctttacgacattgtgtacatagaagtgcgcgggaactacatcactctccacactacagaaggcgagagcacggtgaaggaaactctctcgaagattgaagcggagcttgacgacagatttttccgcacgagccgctcgtatctggtgaatctgaaatacataagcagaacctcgaaaacggacgttactctgactacaggggagacgataccgctttcacgagggctttacgataaactgaaccgggcgttcatcaagcatttctgatatatagaggtaaaaatgataccgttcctttcgaaatatgttgacaaaaagctttcggcatatcagcatgaccttatcgagacgcactactccgaggtcgacaatatgtaccgcaaaatgcgcggctggagacacgactaccgcaaccacatacagacgatgaaggttcttgccgccgagggagaccttgacgcgctgaaaaaataccttgacaagcttgacgaggatttgaacactgtcgacgttgttgtaaaaaccggcaacaaaatgaccgacgccatactgaacagcaagatatctctggcaaaatcgaaggggattaacgtcatcgccgacgcaaaggttcccgtggagctgaaaatgtcggatattgacctctgcattgttataggcaatctctttgacaacgccatcgaagcttcccttgcactggcggaggaggagagactgattcggctttacatggacataaaaaacacgcagctatatatgtgcctgacgaacttcacgtctgtaaagaagctgaaaaagcagggcggaagatacgtcaccacaaagggagagggacacggcttcggtcttgtccgcgttgacgatattatagagcgctacggcggctacatctcccgaaacagcgaggacggggcgtttactacggaaatcatgttaccggttgcaaattaaagctttcgtctgtgctttccgtctggaaatcatgctccctgtcgcacagtgaaagttcacagtaaaaattgcaattcgtcccccaaataatacaattcgtccccgaaattacacgccggggattttttgtgttataatgcagtcgtacagaaagaaaggaaggcgataaaattgacagcagagaaaaagaagaaagagaaagcaccgaagccgaaatacaatatgtggcagaacgtcgggtttatggtaaagaccgcatgggtcgagaaagagaagaaggtgcttgtcacgacgctgcttcttgcggtgctttcggtgataaacagcctcatcggactttacgttactcccgtgcttctcggacaggtggagagcggagtttcgcccatgcagcttgtcttgactgcggtatcgttcaccctcgcgcttatgctttgcggtgcggtcacggcatatattcgtgaatgtgagatgtacggaaagatatctacccgcagcgctctcatcagtgcgatgaatgaaaaaggctgccgtacctcattcccgaaccttgaggacgaaaagtttattaagctcggctcaaaagcgtcggatgcagcggcgggcaactcacaggcgacagaagcaatatggggaacgcttcagtcgctcatcacgaacattgcgggttttgttatctacctcgtaatgctgacaaacgtagatcctcttcttattgcggttatccttgcgacaacagttgtcggatatttcataaacaagcagctcagcggatacagctaccgtcaccgcgatgaagaaggcgagatagaaaacaagctcaattacagtgcaaaacttactcagaaacagggaatttcaaaggacatacgtatcttcaatatgcgtccgtggcttgaggagctgtatacaaaggcgcttgacgcattaattgcgttcaaaaagaaagagtcgaacgtagcagtatggggaagcatagcggatcttgtgctgacatttctgaggggcggtgtggcttacttctacctcataaacatggtaataggcggcgggctcagcgtgtcacagttccttctgtacttctcgacagtcgggggattcactgcatgggtaagcggcattctcggcggatttacaacacttcacagacagtcgcttgatatttcctccgtgcgcgagtttatcgaatatccggagctgttcaaatactccgacggaaagccgcttgaagcagacaagaaaaagcagtacgaaataaagctcgaggacgtatccttcaaatatcccgcggctgaaaaatacacgctcgagcacataagcctcaccattcatcccggagagaaaatcgcggttgtcggattgaacggcgcaggcaaaaccacacttgtaaagctaatctgcggcttctacgaccctaccgagggaagagtgctgctcaacggcgtcgacattcgcgaatataacagagaagactactataagctctttaccgccgtgttccagcagtttgtggttctccccggaagcgtggcaatgaacgtgtcccagagcattgacggcggggacaggaacaaggtaaaggaatgcataagaaaggcaggacttacggcgaagatagagtcgcttccgaagagctacgattcaatgctcaacagaaagataatagaagacgcaacggagctttccggcggcgaaacacagcgtctgatgcttgcgagagcactttataaggacgcgccggtaataattcttgacgagcctacagccgcgcttgacccgatagccgaggcggacctctacagcaaatacaacgaaatgaccgagggatgttcttctctgtacatatcccaccgtctcgcctcgacaagattctgcgacagaattatcttaatcggcgagcacaagatacttgaagaaggaacgcacgcttctctcatgaaactcggcggacactacgcggagctgtttgagattcagagcaaatactacagagaaggggaggacttcaaaaatgagtaagaagaaagacaaaacaatgacgttcggcgaggtttttaaaattaatctgcgctcactggggctgctttacaataatatgccgaatatgtttatcgcaaagataatcggcattgtctggggtgcgctgacaccttacgtcggaatatatctctcggctctcctcataaacgagctgtcaggtgcgaaagacccgaagagactgaccacacttgttgtgctgaccttgtcctctgccgcgcttatcacacttgtgtcggtacttttcaataagtggatagacctgcaggaatctgcattttggtataaaatgaacaagatgtattcggacaaaatgctcaagatggactatgttgacgaggacgacccgaaaacacatcagctgctcagtactatacagcagaacatgaacggtggcggctggggactgtacagactttacgtcaacattggtacacttctcagtgctgtactctctctcttcggcggtattgcaatgactgctacccttttcacaaggcgcgtacccgattcagccggagcatataccgctttaaacaatcccctgttcatcgtgacgataatcgcagtcatgcttgccgtcacgtttatctctcctatactcggaagcaaaggagagagctactacgcacagaacgcggacacacataaccttgcaaaccgtcttttcgatttctacggcttcatgggaacatacaacaaagaagcggcgaccgacgtgagaatgtaccgcatagataagatatgcgaggtgttcaataaggataagacatctacattcgcgtcaaacggacctttcgcaaagatagcgaaaaaaataacgggcttttattcggcaggctcggcggcggtatcggtcatcttcacgggatgcgcgtatgtgtttgtctgcatgaaggctcttgcgggcgcgttcggcataggcgaggtcacacagtacgtctcgtccatcacaagagtatcgggcaacgtctcgtccatagtgtcatgcataggagagatgaagaacaacgcggagtttttgaagctcgtgctcgaatactttgacataccgaacaatatgtacgagggaagcctttccgttgaaaaacgcagcgaccgcaactacgagatagagttccgcgacgtatcgttcaagtaccccggaagcgacacatattccctccgccacgtcaacctgaaatttaaaataggcgaaaagcttgcggtcgtaggtcagaacggaagcggcaagactacatttataaagctgctctgccgcctatacgaccccaccgagggagaaatactactaaacggcataaacatcagaaaatacaactacaacgaatacatgaatgtgttctccgtagtgttccaagacttcaagctgctttcatacaccctcggagcgaatgttgcggtaagcgaaaaatacgacggtgcaagagtaaagaaatgcctcacagaagccggcttcggagacagacttgaaacgctcgacgacggacttgacacgtacctctacaaggatttcacaaagaagggcgtgacggtatccggcggcgaggcacagaagatagctcttgcgagaacgctttacaaggattcgccgttcatcatcctcgacgagccgacagccgcgcttgacccagttgcggaagccgagatatatacgaagttcagcgaaatagtaggagacaagaccgcagtctacatctcccaccgcctgtcctcctgccgattctgcgacgagatacttgtgttctccgagggcagcgtagtcgagcagggaacacacgaaaatcttctcgaaaacgaaagcggcaaatatcacgagctgtggttcgctcaggcacagtattacgcaaacgacgaggcggtatcgaaattattcgcgtaagctattgaaatatcggcgaaaaaatgttataattgttgcgtccacaacatacatttccggctccatgtggtaaaatcataacagaggaataaataatggaaacaagagttgctgttatcagcataatcgtggaaaacgcggagagtgtcgcaagactgaacgagcttctccacgaatacggcgaatatatcatcggcaggatgggcataccgtaccgtgccaagggtataaacataatcagcgtagcgatagacgcgcctcaggacaagataaactcgcttaccggacttataggaaagctcgacggtgtctcagccaaagccgcgtactccaagctgaactaacaaaataaaaaagtcccgcctgacgccgaaattggaagtaaaaacttcgattaaggcgaaagtcaaggattcacagtgagataagcgagatagttttgtgcgtctttctgttttccgattatcaggtcggggcagaaggacgcttttttatgccaaaagacataatgaaactgctctccctcacagataagctcgacgacggagaaaagctcacacatgacgagtggaagacacttctcgatgggaggtgcgctgaaactgccgaatacgccgccaagctcgctgtggacaaacgtagaagagtctacggctgtgacgtgtacgtgcgcggacttatcgagattagcaacatatgcaaaaacgactgcctgtactgcggtataagacggagcaacaggacctgtgagcggtacagacttagcgaggacgatattctctcctgttgtgacgacggatattccctcggcttccgcacattcgtcttgcagggcggcgaggattcatactataccgatgaggtcgtgtgcggtattgtcagccggattaaggaaaaatatcccgactgcgccgtcacactctccctcggtgaaagaagccgcgagagttaccgtgcaatgtacgaagccggggcagacagatacctcctgcgacacgaaactgcaagcgaagagcactacaaaaagctgcaccccgcggaaatgagcttcaaaaaccgtatgcagtgcctatataacctgcgcgacatcggatatcaggtaggatgcggattcatggtaggctctccctatcagacaaacgacgaccttgcccgcgacatggagtttatctcggagtttcagccggatatgtgcggtataggaccgttcgtgcctcatcacgccaccccgttcgcttcattccccggaggtacggttgagttgacaacatacctgctctcgcttatcagactgctcaaaccgaacatactgctcccctccaccaccgctctcggcacgatccatccgaagggaagagaaatgggaatcctcgccggagcaaatgtggttatgccgaacctctcccccacatctgagaggaagaaatacgagctgtacgacaacaaaatctgcaccggagacgaatccgcacagtgcaagagctgtctctcacgccgcatggagtcgataggctaccgcgtcgtcacgtcaagaggagacataataaaatagataaatctgaggggtaagacataattctctctgcccccgaagaaaggataaaacaatggcaatatttgacccgaaatccctcaaagccgaggaattcatcaatcacgaggagattctcgaaacgctgaaatacgcggaggaaaacaagaacaacgctgagctcatcgacagtctgctcgagaaggcaaagccgaagaaaaccgaaaagggagtacactgcgagggattgactcaccgtgaggcgtccgtgcttctggcgtgcgagcttcccgacaagattcagaaaatgtacgagctggcggaggagataaagctggcgttctacggaaacagaattgtaatgttcgcgcccctctatctttcaaactactgtgtcaacggatgcgtctactgcccgtaccacatgaagaacaagcacatcgcgagaaaaaagctcacgcaggaggaagtacgaaacgaagtcatagcgctgcaggacatgggacacaagcgtctcgcgatagaagccggtgaagacccgaaaatgaacccgatagagtacatactcgactgcattaacacgatatactccatccatcacaagaacggcgacatccgcagagttaacgtgaatatcgccgcgacaaccgtagaaaactacagcaggctcaaggaagcgggaatcggcacatacatacttttccaggagacataccacaaggaaagctatcttaaacttcatccgacgggaccgaagcacgactacgactaccacaccgaagcaatggacagagcaatggagggcggtattgacgacgtaggtctcggagttctgttcggactggaaatgtacaaatacgagtttgccggacttctcatgcacgcggagcaccttgaagccgtacacggagtaggacctcacacgataagcgttccgagaataaagagagccgacgacattgacccgaacgtgttcgacaacggcatatcggacgaaatgtttttaaaaatcatcgcctgcataagaatcgccgttccgtacaccggtatgattatctccaccagagagagccagagcgtccgtgaaaaggcattgcaggtcggaatatcacagataagcggcgcgtcacgtacatctgtcggcggatataccgaggaagaacgccctcacgactccgagcagtttgacgtgtccgaccagcgcacccttgacgaggtagtagagtggcttatggagatgggatttattccgtcgttctgcacagcctgctacagagagggaagaacgggcgaccgcttcatgagcctatgtaagacgggacagattcaaaactgctgccatccgaacgcgctgatgacgcttacagagtaccttgtggactacgcctccgacttcacgagggagacaggctacaagcttatcgagagggagcttgacaaaatacccggtgaaaaggtaaagagaatcgccgcggagcatatcgaggatataaagaattcaggcaagagagatttcagattctgataaaaggagagagagcatgagtttaaacagcaccccttccgcaaaccgcgtacatatcggatttttcggatgcagaaacgccggcaagtcaagtctcgtcaacgccgtcacagggcaggagcttgcggtagtctccgacgtcaagggaactacaaccgaccctgtatcgaaggcaatggagctgctccccctcggtcccgttgtgataatcgacactcccggatatgatgatgaaggcgcgctcggcgaaaaaagagtgagaaaaacaaagcagacgctgaacaaaaccgacattgccgtactcgtagtagacgggacatgcggcatgaacaaatacgacttcgagctgctttccataataaaagaaaaaaacatcccctacatcatagtctacaacaagtccgacgcgggagaagccgtatcggtgatagacggggaaaactgcattgcggtaagcgcggagaaaaacgaaaatatatacgagctcaaggaaagaatcggcaagcttatgacatcggatgacggaaagacgcttgtcgacggaataatgagcgcgggagacactgccgttcttgtgattccgatagacgaagccgctccgaaaggcagacttatcctcccacagcagcaggtgatacgcgatatcctcgacattggcggatgcgcggttgtgacaaaggagaccgagcttgcagagacacttgacagactgaaagacaagccgaaggtagtgataaccgacagtcaggcgtttgctatggtgtcgaaaatcgtgccggaagacgtgccgctgacctcgttctccatactcatggcgagatacaagggctttctcgaaactgcataccgcggagttcacgctatagatgagcttagcgacggcgacactgtcctcatagccgagggatgcacccaccacagacagtgcggagacataggcacggtgaaaataccacgatggcttgcggctcacaccggaaagaacattgagataaagacctgctccggctcggaattccccgaggacctcattccgtatgctgccgtgatacactgcggaggatgcatgctcagcgaaagggaagtgcagtacaggatgaaatgcgcccttgactttggagtaccgttcacaaactacggcatattcatcgcctatgtgacgggaatactcgagcgcagcgtgaagatgatacccgagataaaataaaaaatagtagaatttttctctctgccg

SEQ ID NO: 4038 - DNA, 11665 bp, Unknown
  16S sequences of unknown bacteria
cgccaggagggaacggtgatcctaccggtttcatcgatctcgaaagaaagttttttgagaatggagatcatttcttcgtgggatacgtcggtgcccagcagggcgttgatcttctccggctccagtttcaaaacggtggggttgggcacatagttcagaatatcgattacaccgtccaccacttcgccggcgccgagcagttccaccaattcgcaggcgcggttgacagcgggcagagtgttgagaatatccaagcccttttcaaatttggcgctggcctcggtgcgcatgcccagagacagggcgcccttgcggatgcaggtgccgttgaagttggcggattcaaacaccacatccacggtgtcggagacaatttctgaattttcgccgcccatgatgccggccagacccacggcccgggtgtcgtcggcaatgaccaggtgattgtgcgtcagcgtacgcacattgccgtccagggtggtaaggctctcgccctcctcggcccggcggacgatgatcttgccgccttttacataacggtaatcaaaggcgtgcatgggttgaccgtattccagcatgacataattggtgatgtccacgatgttgttgatggggcgcacgcccatgctccggaggcgttcgcgcatccatttgggggagggagcgatttttacattgcgcaccatgcgggctgtatagcgcgggcacaggtcagcggccggtgtttccacatccagcagttccgccagattgcccggcgcaccgcctttgactaccggctcatgcagacgcagctctgcgtcgaacgttgccgcggcttcccgagccagaccgatgacgctcaggcagtcggggcggttgggagtaatctcaaattccaccacatgatcgtctgcaccgatgatgggcttgatatcgtcgccgggcttgcagtcctcgcggaggatgaaaatgccgtcgctgatgcagtgggggaactctgcctgctgggcgtgaagatcttccagggtgcagatggcgtccgtcttggtgttataggccaccagatcgccctcgtggaggttggcgcataccgtatcagggcaggcggtggagccgcccagatccagacaggtgtggaaaatgccgttgggctggggaacgcactccaacactctggcgcaaaccacggggccgtagatcttatccccggcttggatgtcggcggagagggagggcttatccttgtccagaggcttgtagtctcccagaatagcggcagcagtaatggcggcataagggaaatcccgctcgtccaagcccagctcggaaagaccgcacatcataccgttggacgctatgccgcgcagcttgcccttttcgatttttacgccgccggggagtgtggatttatgcagcgctacgggcaccagatcgccgggatggatgttccaggcgccggtgacgatttgtaccggttcggcctgcctcgcgtcgatttggcagatccacatatggtcgctgtcagggtggcgctccatggacaggatgcggcccaccactacgttggaaatttctgcgcccagatccgcggtggtttccaccttggaaccggagagggtcatggcttcgtcaaattctttatcatcggccgcaacggtgacaaactcgttgagccattttctgctcagtaacatggattcgttctcctttttatatggaaattggactcctgcatagggaaagggcggaaccgtcaaaactgttccaggaagcgcacgtcgttctcgaaaatcaggcgcaggtcggcgatcttaaagcggcccatggccatgcgctccagccccatgccgaaggcccagccggaatatttttccgggtcgatgccgctcatgcggagcacgttggggtggatcatgcccgcacccagcacttcgatccatccctcgcccttacaggtagggcagccgcggccgccgcatttgtggcactggatgtccatttcgcaggaaggttccgtgaaagggaaatgatggggacggaaacgggttatagttccttcgccgtaaagcttttcgattaccgtgttcagcgtgcctttcaaatcagccatggtcacgcccttgtcaatgaccatgccctctacctggtggaacatgggagaatgggtggcatccacctcatccttgcggtacacacggcccggcgcgatgatacggatgggcaattccatggtttccatggcgcgtacctgcatgggacttgtctggctgcgcagcatcacgcggctgtctttatcaaaataaaaggtgtcggaccaatcacgggatgggtggccttcttcggcgttaagcttgtcaaaattataggaggccagttcgatctctggtccgtcgagcacggtgaatcccatgcctacaaaaatatctttgatctcgtccagagcgatgtacatgggatgtttatggccgattttttgaacgttgcccggaatggtcacatccaccgtttctgctttgagctgcgcgtccagagcagcttcttccagcttgcttcccatttcttccaaagcttgttccagtgcggcgcgcacttcgttggccagctgtcccatgacaggccgttcctcggcgctcaaccgtcccatctgtttgagtacggcggttaactcgcctttttttccgagatactgcacgcgcagggcgtccagttccgctgcggtttgtgcggaagaaaatgccgccagcgcttccgcgcggatctttgccaattgttctttcatattcataaactcctttgtatgagatagtatggcatgcatcaagagatgcgggaaaatcccagataccgggtttcctggaaagggacgtcatatgtggtggatgtgggggtagctataaaaaataccttccatccctctatggggacgaaaggcaaaccttccgcggtaccacccgcatttccgcaccaatcgggcacggacacttcaaaccctgctaacggagggatacccgttctgctctcacagaccgctcccggacgaaccaagcggtgcgcactgaatcggctttcagccgccggccgtttctctctgaaaggtgcacatgctccgctattttcccgttcatagctgatatcattaccatttatagcataaaagccattgaaatgcaagaggggaatggagtaaaatgaagaccaagccatatggacgccgaaagaaaaagccggcggtcagaggatcgatgcgtgtttgagaaagcggatggccgggaggataaaccgtaatgatgagaaaagtaaagattacagtgctgaagacaacgcttgacgaggagctggtgcaggagtatggtgccgaaggactttcggcatgccctatgctgaaagcgggacaggtgttttatgctgattacgccaagccagagggcttttgcgatgaggcgtggaaagccatatatcaatatgtctttgctctggcgcatggcgctggggagaatgtattttattttggcgattggatccgcaaacccggcgttgcgatttgcagctgcaatgatggactgcgtccggtgatttttaaactggaggccacaaacgaggcggcacaaatcaattatacgccggtgcgttgaaaggagaatgggacgatgaaactggcttttgctgcacagatgaaagagatggaccgcgttgccatagaagagtggggtattccctcgctggatctgatggagcgggcggcggaagagatcgccgacgtggtggaagagctgaccgaagtacaggaaagttctgcaggtcgggaaaagaggctgtttttgccggaggcaaccggtgaagtttcgattggagactgtcgccggatgtggacaaaaatgcctgggaagggagagaaacgcgtcgctgcgtttgtcggaccgggcaacaatggtggcgacggagtggcagcggcccgattgctgaaagagcggggctgggacgccgccgtgtttctggtaggggatcggggcactctgacgcccgatacggctgccatggagcggagattagcggaagtcggcctgacgcttcggccgtttcccacggataccaccggtttatgtgagttgtatgcctggtgcgccgggtgtgacgcttttgtcgatgcgctgtttggcgtgggcttgtgccgggaggtaagcgggctttttgcccttgccattgcgttgatgaatacatacgataatattcccacggtgtctgcggatattgccagcggcctacatgccgacacgggaaaggtactgggctgtgcggtgcgcgcggcggccacggtgaccttttctttggccaaacccggtcaattcatcgaccagggcgccctgtatacaggccgcctgatggtccgcgatatcggtattccgggggatgtgatggttgctcaggcgctgaatgtggaaaccatcgatgctgcggtggtgaaagagacccttccgatgcgcaaagcggatgggcacaagggcgattttggaaaggactatattctggccggcagcgtgggctttacgggcgccccggtgctggcggcccatgcgtgtgcccgcatgggggcgggactggtgacagtggggacgccatcttctgtctggagcattgtggcgggcaaatgtctggaagagatgccctatccgctgccggaacaggatggaaagctttccgcggcggcttatgaaaaaattatggaaaagctgcgggggtgcgatgcggcgctgatcggtcccggactggggcgcagcggggagagcgatgccctgctttgccgcttggttgctgaaattcaacagccccttcttttggatgccgatggcataaatgcactttgtgcgcatatggatagtttgtaccagcgtgcaggacgagtcactgttttgacgccccatgacggtgagtttgcccggctgggcggtgatttggaacggaccgaccggctgacggcggcacgggattttgctgcgcgctggggctgtgttttggtgctcaaagggcatcgcaccattgtggctgcgccggacgggcgtgctgcggtgaacaccaccggaaattccggtatggccaagggcggcagcggcgatgcgctttcggggatgctgctggcgctcctggggcaaggcgtggagccttatgcggcggcctgtgccgctgtgtggctgcatggctgcgccggcgaccgggcagcgcaggagctgggcgaggtttccatgctcccctccgatctgatcaggcagattgccgcagtggtaatgggactgcagggccggtaaaaacgaaacgatacaggaggaacatgtgtgcgcggaaaagcagtttgtgtactgatgataggtctgggactgacgctgagcgcttgtgcgccggcgccgggcgggacagagcagaaagacggcgcgcagatgctgcaggaggaataccgcgcgctgacggggtgtgccatgacggcggatgtgcgctgtgaccgggaaaatgaggtggaaaactacacgcttcaatgtgactggaatgcagacggttctgcccgggtggaggtgctcgcgccggaaaccctggtagggattgctgcggaatttaacggggacgatctgtcgctgcactacgatgatatgagcctggcggcggggccggtcagcagccaggaactgactccggctcagatcctgcctatggtggtggatgccattcgagaaggctatattctggaaaaagggacagaaagcatcgacggcgaagagtgcctgtgcctggtgtttgacaccaccggtcaggacgacggaaaaatcgactatacagtctggtttgcatccaatcatttgccgctgcgcgcggaggttcaaacggaggggaagactgtatttaccgtgaccttttctgaattttccgctgcggaaggtacagcggatggctcagtataagaaaattggcgggacgcactgcgcgtcccgcttcttttttgcaggcaagaaatatttgtaccggagaggagagtgtgctatacttttttgcagacacaatgcgtgcttgttaacatgcaaatcaacaggattcggaggcattactcgtttatggagaccgatttgagaagaacctggacagagattgatctcgaccatttgctgtataattatcatgctctgcgccgccgtgtcggcatgggtgtgaagtttttgggagtagtcaaggcggatgcctatggccatggtgccgtacaggtggcccggacgctgcaggatgccggagcagattacctggccgtatccagtctggatgaggcgagggaattgcgcagccacggcatcaccatgccggtgctgatcctggggcatacgcctccggagcaggtgagcgaactgatccgtttggggatcacgcaggcggtgtctgccaaggcaaaggcggaagaatacagtgcggctgcggagaaatgcggcggcacgttgaaaattcatattaaagtggatactggcatgtcccgtttgggatttttatgtgcaggagaacattttgaggggggagtggcgcgtatcgcccattcctgtgcattgcctgcgctggatgccgaggggatttttacacattttgccgtgtccgacgaaccgggtgcggaaaacgaagcgtgtacgcgagcgcagtttcagctgttttgtgacgtgattgatgccctgaaggcccagggaaggacatttgcgctgcgtcattgtgccaacagcggtgcagtggcgtattatcctgatatgtggctggatatggttcggccgggcatcctgctctacgggttgacggaaatggctgaagaattgggactcaaaagtgtgatgagcctcaaaacctgtgtcagcacgattaaaatttatgaaccgggcgcggccatcagctatggacgcacctataaaaccgaccggcgcagccgggtgggcgtgcttcccattggctatgctgacggcttcttccgcacgttttccaaccgctttcaggttctcacagccgatggccctgcgctggttctgggccgtatctgcatggacatgtgtatgattgacctgacaggctgccccaatgtgggggtgggggacgaaatcgaaatctttggtgcgcgcaattcagtaaatgccatggcgcgcatggcggaaacgatcccttatgaaatcatctgtgccgtttccaagcgtgttccgcggctgtattaccgcggcggtcaggtggtggaccgcaagctctggatcaccgaatgacaccattcgccttggcgatacatatgctgacatagggccgcggcggaatttttcggcggggcggtataaaatttcgcccgctgtgggagaatgatagtacctgctcttcccatcgctgtaaagcccttgcggtatccgggagaacgggaaaatgattcttccggcggagtgtgagcgttttggatacgaatgtgaaacggggcgatatctattatgcggacctgagtccggtggtcggcagtgaacagggaggtgtccggcccgtgctgatcgtgcagaacgacacgggcaaccgctacagcccgactgtaatcgctgcagccattacctcacaggtcaataaggcccgcttgccgacgcatattgaactttccgcacaaaagtatggactgaccaaggattctgtggtactcttagagcagatccgcaccttggataagcgtcggctgcgggaaaagatggggcggctggacacggaactgatggaaaaggtggattctgctatcgctgtcagttttggcttgcccaacgaccgcctggtgtgatatacttgcgggcatggggtgcctggccccatgcccctgtgaaaaaattcgtgcacaaaggagaagcgagcgtgaaaaagaaatggatcgtgcgcgcggcctgcgtggctgccgtatgcgctctgactgtgaccggtgtggccgccgccggcagcgccggatcatctgaggatccgctgattacatacagctatttgaacgataccttcaagaaagaagtgctgtccgaagcgaacggcggtttcgttctggtcacgctgagcagcggacagacgctgaagggcgaagtgggcactgaggtgatgctccgtgtgggaacggcttcctgcgcggcttcttctgcgcccggcctgatcgacaccacgaccgccggcgtcatcgatcacggcgcggcattaacgaaaaatcatctttatatgatgaccatcgaggatcggggtgtcaaagccactgccgccaccgtcaaaatgctggtgcggggcagctatacgatttcctgaaagcgaaaaaatgtagtataaagcatggccgcctgtgcatatcattgcacaggcggctttttgccccagcgaggtggatgatcatggaagaatatctgatttatttcggcggcgcgccctgcgggagcttgcgcatggaaaagaaggggctttatacgcatttttccgcctgctgcggcgcgcggcagggacggatctactctttggtgctggaaggggagcggggagaaatgccgttgggcgtgccggagtggcaggacggctgttttgtgctccagcggacgctggccaatcatgcatggagtgggatcggcacggtgcagcgggtcagcctgtacgtgcgcagtgcagcggaaagcggggatgcagcgccggaggaagcggcggaagagggatggattcttcttcggcatccggaatatttttttcgcacattctcgccgcagctgtccggcgtgccggactgctattggaaaccggaaggcagcggtcgctccctggcggtgcccattgacgacgggcgtccgtttctgctgccgcgttatttctgttttgcccgtattgagcggctgtggggaaaggcttatgccgtttttgcctttgacgaggctggacaaccgatcctgccgtaaaaagggggaagaaaaagggaggtatacggtgcattcacaccgtatacctccctttgaacacggacgagcgttcaatgcttgtcctcatccagaagtttgttcagctcgcgcataaaggtattgatatctttgaactggcggtaaaccgatgcgaaccggacgtaagccacctcgtctacacccttgagcttatccatgaccaactcgcccacatgctcggtactgatctcacgctccagggaattctgcagctcctgttcgatttcttcgccgagtttttccagctgagccacggacaccgggcgcttttcgcaggcgcgcagcatgccgttgaccagcttgcgccgatcgaaagtctggcggctgccgtcgcgcttaaccaccaccatgggcaggctttccacagtttcataggtggtgaagcgcttgctgcaggagagacactcccggcgccggcggatactgttgccctcttcggcggggcgggaatctacgaccttgctttctttaaagccacaatagggacatttcatagcttacctccgtttctgccgaataggcagaattattttgttcttttattttattgcaccagcagtttttccccggccaaatagatatcgccggcgccgacagtcaggatcaggtctccttcctgggccagggaacgcagtgcagcggtcacgtcatccagtgttttgcaataaagagcaccgggaatggcgtcggccagatctttggaagagatgcccagcgtgtcggtttcccgggcggcaaagatctccattaaaatggctatgtccggaagcttcagctcttccacgaattcctggaacagcgctttggtgcgggaataggtatgcggctgaaaagcgcacaggatgcgccggtagcccagcgttttggcggtagtcagcagggcgtgcagttcaccgggatggtgggcgtaatcgtcataaacttctgcaccgttgtaattgcccttgtgctcaaaacggcggcctgcgccggtgaatgtggccaggccctgttccacggctgtacccgggatttctagggcctttgccgcagcggcggcggccagagcgttgaggatgttgtgccgccccggcacccggagcgatgcccgacagtagtgttcgccgcggcagacgatgtcaaatgcggggcagccgttttgcagcgtgatgttttctgctgtgatatcggcctccggtgcatccaggccaaaagtggtcacgggatgcgtcagcccctgtaccgaagccatggagcctgcgtcgtcggcattgacgatgatgcttccgttttctggcaccagcgcggcaaagcggtggaaagagtgctccacgtcggccaggtctttgaaaaaatccaggtgatcggcctctacattgaggattacggccaccgtggggaaaaagctgaggaaagagttgcagtattcgcaggattccagcacaatcgtgtcaccgtggcctacacggtagccggaaccgagcagcggcagcgtgccgcccaccatgattgtgggatccagggcggcagccatggtgatatgtgtcatcatcgaagtggttgtggttttgccgtgagtgccggagatgcacacggcgtttttataatgctgcataatggcgccccaggcctgggcgcgctcaaatacaggaatcccctgcgcatgggccgcagcgatttcggggttggaatcgtgcacggcggcagtgcggataatatagtcgcagccgcagatattttcagcacggtggccaatggagacctcgacccccaagctgcgcagatggtctacggcatcgctctcgcgcatatcggaaccgtgtacggtaatgccggcgcggtgcagcacttcggccaaaggggacatggacacgccgccgatgccgatcaaatgtgcgcatgttccggggaccatataatgacggatatcttccataaaaacctccaacggatgatcagccgccgcaggagagcgaagcgcggcggttgcaaaatttcaaaaaagcactataatattataatactgaagcccgcagagtgcaacacggtttttgcgtcgtgaaagggactttgggcacattttatggaaaagggacgaacaaatcggtaaaggaggcgaagaagcatggaagtcatcgcaccgccggcgcggcgggttctggaacggttggagcgcgccgggtacgaggcctatcttgtgggcggctgcgtgcgggatcttctgctggaccgcaggccgggagattgggatattacaactgcggcccggccggaagaggtgctttctctttttgcgcctcaggccgcggccaccgggcttaagcacggtaccgtcactgtttttgagggggcggcgtctttcgaagtcaccacgttccgcttggatgggacttatgccgatcaccgccatcccgacgctgtcacgttctctgactcccttgccgaagatttgaagcgccgggactttacggtgaatgccatggctatggatcaagccggcgagatcacagatctcttcggtgggagagaggacttggcgcgtggcgtgctccgctgtgtgggacgcccggaacaacgcttggaagaggatgcgctgcgcattatgcgggcgctgcggttttcctctgttctgggttttactcttgcgccagagacagcagatgccgtctttcagggctgtctcttatacacatctgacgctgccgacgagcgatctagtgtagatc

SEQ ID NO: 4039 - DNA, 32759 bp, Unknown
  16S sequences of unknown bacteria
tcgttaaaagtagtaaatgagtagtaaaatcaatctgcaaacctgcgaatatgcccgtaaatcaagcatttttcaagacaatcaactaattttatgtaaatacaagaaaaagcttgttgttatgcgggatttttaacttgtggaaatgacttccactagttgtaaccttagcctccctctgacgagggaggtggcaaaactttagttttgacggagggagagaatatgaaagaatataataaagcaaatatccctcttgcaaaaactttaaggaaaaatatgacaccttgggaacgaaaactttggtatgagtttttaagatattaccccataagatttcaaaggcaaaaagccataggaaattatattgttgatttttattgtgcaaaagcaagacttgtagttgaacttgacggtggcggtcattataccccagagcaaatagaaaaagacaaagttagaacaaaagagttagagggtatgaatttaataattttaaggatttgtaatttggatattgaccgaaattttagcggagtatgcgagtatatagacttgaatgttaaaaaatctctccctcagtcagcttcgctgacagctccctcgtcagagggagccgaaaactaatttgttcctaatttaacacaagcataaaatcaaaataaaggaagtttttgggggggagcatatgaaaaagaacggaaagaaaaaggtttcggcaataaaaaataatttttattttttaaagcttgtttggcaaatttctccggcggcggtcatactcaattttttcacaaccctgctcggttttgcgcagtgggtgttttattcggtatttttcttgcagtatcttttcggcgcgtcaggcgagcgtaagtttaccgatattctcatttttatttgggcggcggctgttatagatgttcttataagcatatacaacgcttggttttacgaaagctatatgtatagggaatatattaaaataggctatcgccttaatttaaagctttttaaaaaggcgcaaactgccgatatttcctgctatgaaacgccggagttttacaatatttacaccaaagcggcttccgaggctgccgcgcgcgcaatgtcggtgcttaataattgctccgctgccgtttccgcgctcatatcctctgtaaccgttattgttacaatggcaaaaataactccgcttgcgcttatatttatagctctgccgcttataggcaacctgtttttcggcaaaaagttaggtcacgtaacctttgagatagacagggattcaacccctgcgcggcggcaaaaggattatgtaaaccgtgtgctgtatttccgcaaatacgctgccgaaatcagaaccaccggatttttcggcgtgcttaaagaagcatatgggcttgccgccaaaagaacggttgaggtggcacggcaatacgcgcttaaaaaatcgctttattcgggggcaaaaagcattttaatgtttttgctcggctacgagggaatgtggctttgcgccgcaatactcggcataagcgggaaattaggcgtttccgatttaatagtgcttttaaacgcgatagtaagcgtttcttggatgcttaacaattttgagcggtctgtttcggggctgtttaccgacgcggagtttatagaaaatttaaagcagtttttcgcgtataagcctaaaatagacgagaccgcgggcggatttaaaatgccggagcgcgtggaaagcatagaatttaaaaacgtatattttaagtatgacggagcggaaaattacgcgcttgaaaatataagccttgttttaaacagaggcgacagaaacgcgcttgtgggtataaacggcagcggcaaaagcacctttttaaagctgcttatgcggttttacgaccccgaaaagggcgaaatacttttaaacggcgttaatattaaaaaatacgacgttaatgagtaccgaaagcatatgggcgttgcctttcaggattttgccatgttctcggcaaccgtggcggaaaacgtgcttttagacgaggtgaagacagccaaagaccgcgaccgcgtgataacagcgcttaaaaagagcgatgtttacgaggatattttaaagcttaaaaacggtatagacaccgtgcttacaagagaatttgacgaaaacggcgcagagctctcgggtgggcagcggcagaagatagccattgcccgcgcagtggcgaaaaacagcgacgtaatactgcttgacgagccctcaagcgcgcttgacccgattgccgaatacaaaatgtttgaaactatggcggggctttgcaaaaataaagatgttttatccgtaatagtatcgcaccgcctttcatcggctgcggtgtgcgagaaaatatttgtttttgataagggcaaattggcagagcagggcacccataaaaagctgcttgaaaacggcggggtatacgccgaaatgtttaaaaagcaggcgcgaaattatttgacggaggcggcgtatgaataagaaaactcccaaaaaacacagcaccctgtcaaatactcttttcgcgcttaaatggcagtttgaaattgcgcccggctacaccgtgtttacgcttatgcagacggtgctcggcgatgttgtaacgctttttgagcacacgtttttaacggcatatattataagctgcgttgagcagaagaaaacgcttaccgacgtgctgtattttttaattccggtggcaatagcagtgtttataaagctaatgcttaacacctttttcgacgcttacatagcgcccggtgaaagggaaaaaatacaaatgaaaatgcgtatgcggcttcatgaaaaagcggcttctttagagcttgcaaggtatgacgactcagaattttacaacgactttgtttgggcaatgcaaaaagcgcccgaccacataacgggagcagtcggggcgtttaatacgcttttaagccgaattacggtaagcattatcgcgggtgcgtatatcgtttcggttgacgcgtcctcgcttttaattttagtctttttaattccgtttacatatttttccgggcgtgcgataaataagcgcgcaatgaaaatgcaagaggaaattgtgcccgtgcaaaggcgcagcgactatgtgagcagaattttttaccttgccgattatgtaaaagatctaaaaaccggcaatataagcccgaaactggaaaaggatctgtccgattccacagaggatatgcgcgagatagttaaaaagcgccaaaagcccataattgcgctgaatgtcgcaacaaactccgcagccgaccttataataagcggcgtatatctttcctacctgttttttagggctttggtgctcggcaagttcggcttaggctcgctgctcggcgtttataattcaacccaaactcttaacggaaaggttttgaccgccgtttcaaatttatcggaatttcaaaaccacagcctttatattgaaaagctgcgccgcttttcggaaaccgaaaacactatggaggataacgggcgcacagccctgcctgcgggcggcgatatagttcttcgcaatgtggaatttacataccccggcaacggcgagccgaccctaaagggggttaactgctcatttaaaaagggcgaaaaggttgcgcttgtgggctttaacggcgcgggtaaatctacgcttataaagctgattttaaggctttacgacccgaccgtcggcgaaataagctacggcggggagaatataaaaagctaccgcatttctgattacaggggttgcttcggcgttctgtttcaggattacgagcttatagcaaccgaccttgcgcacaacatatcagccgataataaaccgcttgatataaatagggcggacgaggcgcttaaaagatctgcgttttgggataagtttaaaactctgccgagcggctatgaaacgcagcttacaaaggaatttgatgagagcggctttaacccctcgggcggcgaaaagcagaaaatagcgcttgcgcgggtgctttacgccgattccgatataataatattagacgaaccctcgggcgcgcttgacccgattgcggaatatacccttaataaaaccgtgaccgagctatcaagcgataaaacagtaataattatttctcacaggctttccacaacccgctttgccgataaaatttatatgctggcaaacggtgaaattattgaaagcggcactcacgaaaaactgatacagcaaaacggcaaatacgccgaaatgttccgcttgcaggcggaaaagtacaggtgaaatctttttaaggtagagaccttgcacggtctatctttgaaccctgccgctgccgtcgccgccggcaaggctttcaacctctgccacgcttacacagttaaaatcaccctcaaccgtgtgctttaagcagcttgccgcagccgcaaattccactgccgattttgcagagtaattattaagcagcgcgtaaataagcccggcggaaaagctatcgcccccgccaacacggtctactatgtgcatacggtattttttgcttgtgcagcagctttcgccgtcataaagcattgccgcccaatcgttatcgcttgcgcttaaattagttctcagcgtcagcgcaaccttttcaaagccgaaggtgcttttaagctttttggcaaccgaggcggcgcctgcattatcgggatttttcaaatcaaagcccttatcatcggatattattccgaataaatcctttgcgtccccggggttggttatgcaaacgtccacgtattgcataagctctgtcataactgccgatgctttttcaagcccccagagctttgagcggtagttggtatcgcagcttattttaacgcccagctttttggcggcttttacagctgctaggcacatttcggctaaattatcgttaagggcgggggtaattccggtaaagtgaaaccaaccggcgtttttaaaaatccgctcccagtcaaaatcagccgccgcagccttagcaaaagcggaatgagcacggtcatatattaccttagacgggcgctgagaagcgcccttttcaagaaaatatattcccagcctttcaccgccgcgcgtaataagcgaggtatcaaccccaaacctgcgcagtgagtttaccgcagcctgacctatttcatgctcgggaatttttgaaacgaaagcggcgtcagccccaaactccgcaagcgagaccgcaacgttagcctcgccgccgccgaaggtggcaccgaagctttcagcctgtaaaaagcggtaatttccggcgggggagagccgcagcattatttctccgaaagtaataaccctcattttcttatctccttcaaaagcgtgaccgcgtcggcggtcattttttctatttcggcaaaatttccgctgtttattttatctgaaggcaccatccagctgccgccgcaggcaaacaccgccttacagcttaaataatctgcaaggttagcggtatttatgccgcccgtaggcataaagcgaaccattgtgtagggcgccgccatagcctttatcattttaacgccgcccgccgcctcggcagggaaaaatttaagatatttaagccctaatgacagcgccttttcaacctcgcccggtgtgcagacgccaggtataatcgggtagcccttattcttacaatgacgtaccacatcggggttaagcccggggcttactataaatttcgcgcccgctgccatagccttatccgcctgctctgcggtaagcacggtgcccgcagcaataagcatatcggggtatttttcggctatctgctttatagtctcctctgccgcgtcggtacggaacgttatctcggcgcagttcagcccgccttttcttaacgccttcgccagttttacggcgcttgcggcgttatcaagctttaccacaggcactacgcccgcggcggatatttctttaattaaattttccatacgtacctccttgtttcacaatgtaaaacaacgtttcaaaatctacaattatattttatcatcaggcagaaatatgtcaagcaataattgcaaaaagccgcgttatatgataatattgtgttacacttaaaaaaggcggtattaaatatggctgagcaaacaacggttcaatcggttgaacgcacattcggcataatagagctgttatgtgaaaaaggggaaagcggtgtaactgagctggcggcattatcgggacttaataaaactaccgttttcaggctgctttcaacgcttatcagcctcggctacgcttacaaaaattccgctacggaaaaatatggtcttacgcttaaattcctgcaaatttcgggggacactattgcaaatattgatataaggcgttacgcaaggcggcagcttgaaataatttcagccgaaacgggggagaccgtgcatcttgttgagcgggtcgggaatgatattgtttatatagataaggtagaggcgcgcaataattcggtcagaatggcttcgcacatagggctttcgctgcccatggtatatacggcggtcggcaagtcgataatggcgcgcttaaacccggctgaggcggaaaaaatatggcaaacgaccgatattttcagcaaaaccgctaacacaataaccgattacgtcgagtttttaaaggagcttgaaaatgtacgcctgaacgggtacgctgtggataacgaggaaaacgaacgcggcgtgcgctgcgttgcggcggcaataggtgatatttacggcgattatcgctatgccgtaagcgtttcggcacctgcggcgcgtatgaatgaaaaaaagattattgaaataggaaaacttgtaaaaaatacggcagaaataatatcgggcggtgtaaaacaggcttaaaatatggtgaatattatataaaattaaattatttctgaaaaattcaaaaaaactctttatttttgctttaaaacttggtataatggtttggatacctgtgttaaggtactttgttaacaatggattttaaatccataaaaaattcaggaggtcgattcttaatgagtcacaagtacgtttaccttttcagcgaaggcaacgcaaaaatgcgtgagcttttgggcggtaagggtgctaaccttgcagagatgaccggcttaggtcttcccgttccgcagggcttcaccatttccaccgaggcttgcacccagtattatgaagacggtcagaagatcaacgatgaaatccaggctcaaataatggaatacatcgagaagatggaagctatcaccggcaaaaagttcggcgataaggaaaacccgctcctcgtttccgttcgttcgggcgcacgcgcttcaatgcccggtatgatggataccattcttaacctcggtcttaacgaagaggttgttaacgtaattgcggaaaagtctaacaatccccgttgggcttgggactgctacagaagatttattcagatgtactccgacgttgttatggaggtaggcaaaaagtacttcgagcagcttattgacgctatgaaggaaaagagaggcgttactcaggacgttgagcttaccgccgatgaccttaaagagcttgcaggtcagttcaaggctgaatataagtctaaaataggcaccgatttcccgactgatcctaaggagcagttgatgggcgctatcaaggctgttttccgttcatgggacaacccccgtgcaaacgtttaccgtcgtgataacgatatcccttattcttggggtactgccgttaacgttcagatgatggcgttcggcaatatgggcgacgattgcggcacaggcgttgcgttcacccgcgacccggctaccggcgctaagggccttttcggtgagttcctcaccaacgcacagggcgaggacgttgttgcaggcgttcgtactcctatgcacatttccgaaatggaagaaaaattccccgaggctttcaagcagtttaaggatgtttgccagagacttgaaaaccactaccgcgatatgcaggatatggagttcaccgttgaacacggcaagctctttatgctccagacccgtaacggtaagagaacagctcaggctgctcttaaaattgcctgcgatttagttgacgagggtatgattaccgacgaggaagcggttcttatgatagacccgcgtaaccttgatacacttctccacccgcagtttgacgctaaggctttaaaggctgcaaccccggttggcaaggctctcccggcttcccccggcgctgcctgcggtaagattgtattcaccgctgaagacgctaaggcttggggcgctcgcggcgagaaggttgttctcgttcgtcttgaaacctcccccgaagacattgagggtatgaaagccgctcagggtatactcaccgttcgcggcggtatgacctctcacgcagccgttgttgcgcgcggtatgggtacctgctgcgtttccggctgcaccgctatcaatatggacgaagaaaacaagcagttcacactttccggcaagacctatcacgagggcgattatctctcacttgacggctctaccggtaacatttacgacggcattatcccgactgttgacgcatctatcgcaggtgagttcggcagaattatgggctgggctgataaatatcgcaagctcggcgttcgcaccaatgctgatactccgagagacgctaaaaaggctgctgagctcggcgctgagggtatcggtctttgccgtacagagcatatgttctttgagggcgacagaatcgactacttccgtcagatgatctgctcatctaccgttgaagagcgcgaaaaggctcttgaaaatattatccccttccagcagggcgactttgaaaagctctatgaggcacttgagggcaagccggttactatccgtttcctggatcctccgctccatgagttcgttcccaccgaagaggctgacattaagaagctggctgacgcacagggcaagagcgttgaagatattaaggctatcatcgcttctctccacgaggctaacccgatgatgggtcaccgcggctgccgtcttgcagtaacctatccggaaattgcaaagatgcagaccacagctgttatccgcgctgctatcaatgttaagaaggctcacgccgattggaatatagttcccgaaattatgattccgctcgtaggcgacgttaaagagcttaagtatgttaagaagaccgttgttgagaccgctgacgctgaaatcgcggctgccggaatcgaccttaagtatgaagtaggcaccatgattgaaattccgcgcgctgctctcacagccgacgaaattgctaaggaagctgaattcttctgcttcggcaccaacgaccttacccagatgacctacggcttcagccgtgatgacgccggtaagttcctcgacgcttactatgacgctaagatcttcgagaacgatccgttcgctaagctcgaccaggttggcgttggcaagcttatggaaatggctgttaagctcggtaagggcgtaagaaaagacctccactgcggaatctgcggcgagcacggcggcgatccgtcctctgttgagttctgccacaagattggtcttgattatgtttcctgctcaccgttccgtgttccgattgctcgcctcgcagcagctcaggcagcaattaaagacagcaggaactaatcgagttgttgtccccgtacactcccttttatcccgattttactcaaaaagggcaaaatcgtttagcgtgaaataaaaggaaaaaacgggaaatacaaagaaataaaagacccgcgtgtttgtagagtaatctgcaaacgcagggtcttttttattatacttcatagcttaccgttttttaaaagaaaaaatggaaaaagcacaaaaagtaacgtcttttttcatattgtgaaaaatccgaaaatgtgttataatattttgataaatacgatttggcggtgatgatgtggaattgctgtatattgcaataattgcacttatagtgattattattgtttcaattttggtgtcaaacggtaattccaacagcacttacggtggaacgctttttgaagacccgaaacgaacagccgggaaatatggagaactaagggcaacatcggtaataagaagcgttctgcgagacgatgacagtctattttcaaatgtcagcattatttacgaagacagacctgccgaattggattgcgttgttgtaaaccgatacggagtgtttataatagaggtgaaaaactatgccggatatatcgtcggcaaagaaaacgattataaatggaaaaagtacaaaatgacggacgccggaaacatatatgaaaaaacggtcagaaatcctatcaaacaagtaaaccgtcaagtatatcttttagcgaaatatcttaattattacggcataagagtttgggtaaaaggatatgccctgcttatgcaaggcaacagtcctgtcaacaacgaaaatattctgcgaaacgcaggtgaaattgataaagcgatacatacaagggacagagagcttttgtcgcaaaatacaattgagcaaataaaaaaactgctcggatagcttttagcataaatagcaggatattttattaaaatacataatcccctcgtcacgcatacgcgctgttcctccctaaaggtttgggaggctgaataatttccgcaaaatttgacacaagcatataataagtaaaatatcaattgggagatgatatatcataaatgtttgaagcttatgagataaataaggataatactgcccgatttaatttgggccgatatgttagtaaaccgctggtggtgtttggaataaacccaagtacggcaacaaaagaaaaaaacgacacaacaatctcaattgttgagcacatttctgcaatgagaaaatgcgacggatatattatgctgaatatttatcctttaagggctactaatatagacgctaattttgataaatcgtgtaataaaaagctttcggatgaaaatttgaaatatatagccggcagtattccgatgaacgctgaaatagttgccgcatggggagccaatatcgctgcacgcgattattttattgatatactaaagcaaataaatgcgatagttgagaataaaaatgggaaatggatttgtttatcgcttacaaaatcaggacatccgcaccatccgacaagattagcttataataagatgacatttaacacatttgatatagaaacatacataagtaaatttcaaaaattacagagtcagccttaataaaaataccatctacagttaaataggtggtatttttttgtatgaaaaaattggcatatgcttttcctatgctgttattacaattatatggctgaaaatagtaaatttaatattttattgtcgtaaaaatgtgtcgaataacggaataaacagtaatttaatagttttttcgcaaatatttgcactatttttgtattatcgcttgcaatttctgcaagaatgtggtaatatatgtaaaacgataaaatattggaggaacaaaaaatgggaaaaaagctaaaagtcgtgattgcggaaaacggaacggaactgggcaaaagctgcgaaaaagcactaaagggttacggtatggatgtaattatgtgcgaaaaagacggctcgcttttgcttgaaaaaatcagaaccgaaaaaccggatgtagtgctcgcggatatttttatgcaaaatcaggacattctgggcgtgcttgatgaaattaagaaaacagacgctaaggaaagacctatgattatggcaatgtcaagctttgataatccgcggcttgaaaaggaaacgcttaacgccggcgcaagctattatttcttaaagccgtttgatataaacgcaatggcagaaagaataatacggctttcgggctggcgaaacgaaatttcaccggttgtggttaaggataatgtggtaaccgaccctgagcttgagcttatggttaccgaaataatacaccaaataggcgttccggcgcatataaagggatatcattatttgagagaggcaataattctttcggttaaaaacagtgaaattataaattccgttacaaagcttttataccccacagtagctaaaaatcacgggaccacctcctcccgggttgaaagggcaatacgccatgcaattgaagtggcttgggataggggagatatagacgttttaaactcctatttcggctatacaatacagaacgaccgcggcaagcctaccaacagtgagtttattgcaatgataagcgataagctgagattaagacttaaaataagctgagaatacatataaaaaggtttttacaaaatcagctctcttggaccgtgggagagaaaggtaaagcctttatgcattttaaaacctttctctccttccgtctcggctgccgcctcggtcggtgcttctgctttgcagaggtgcccaccggacacccgcccccctcgtcagagggaggcttttttgtttaaagcggagcatctgtttttttgacagataaaacacagaattttttaaataaaaccgcttgtttttttatttgctacagtgtataatctatttgtaaaaaactttataatctttcaggggaggttttcatatggaaaaaagaattataacggtgagccgtcaattcggcagcggcggaagaacggttggcaagcaccttgccgaaaagctcggcgtaccgttttatgataaggagcttgtaaaaaaggttgcggaggaaacagggcttgacgcggcgtttgtagaggaaaagggcgagttttcgccttcaaaaagctttttcagctttgctatgtcgcagggggttcagtgtatgcctaacgggctttcgctctctgattttatttactgcgcgcagcggcaggttattctaaagcttgcagagcagccctgcgtaatagtgggcagatgcgccgattttatactgaaggaccgcgaggattgcttccatacctttatccattccgatattaagagccgtgcggagcgcattgtaaagctttacggcgaaagcgagaaaaagccggagcagcgccttgccgataaggataagaaaagaaaaatgtattataagcattataccgaccgcgagtggggcgacgctataaattacgatatttgccttgattcgggcaggctcggcatagataaatgcgttgatttaatacttgatgcactgaaataaaaaggaattttaaaaaatgaaatttgattcaaagagtatgcgcgagggccccatactcaaaagcgtgattgtttatactgtcccgataattttaaccgggcttttgcagttgctttttaatgcggcggatctgatagtagtcgggtggttcagcggcagtgattcggtggcggctgttggtgctaccggcgcgcttactaacctgattatcaatttgttcataggcttgtctgtcggtgcgggcgttgccgtggctcagggtttgggcgcgggcaacggcaaacagacttcagaggctgtgcataccgctgttcccgttgcggttataagcggtatatttttaacggttataggcgttcttttttcaagaaattttcttgagcttatgggaacgcccgacggaaaacttttaaggcttgcgtcggtttatatgcagatttattttgcgggtatgactttcagcatgctttataacttcggctcggcaatactccgcgccgcgggggatacgcgctcgccgcttattttcctgacgatagcgggcgtgctgaacgttatacttaatattgtttttgtggcgcttttcaagcttgatgttgcgggcgttgcgcttgcaacatccatttcgcaggcggtttcggcaattttggttttgctggcgcttatgaaacggcaggacgcatgccgttttgagtttgaaaagatgcacatttataaaaatgcgctgctgagaatggtgaaaataggcgttccggcggggctgcagggctcgcttttctcaatatccaacgtacttattcagtcctcggtgaactcgttcggcgcggcgcatatgtcgggcagcgcggcggcttcaagtattgagggcttctgctatgtcacaatgaactcattccaccagacgtcgctgaatttctgcgggcagaactacggcgcgggcgattttaagcgtgtaaagcgcataacctgggtctgccttatgaccgttgcggttgcgggctttgttgtgggaaatctttcatacattttcggcagagaattgctcaaaatatatattaccgactctcccgaggctataaattacggtatggagcgccttaaatttatggttgtgccgtatttcctttgcggtataatggatactaccaccggctcaatgcgcggtataggctcatctgtaataccaatgattataacggttgtaggggtttgcgttatgcgcattgtgtggatatacaccgtttttgcgctgccgcagtatcacacattttcggggctgttcatttcttacccgatttcgtggctgcttaccttcgccgcgcttttcatttcgtttactgttgtaatgcggcgcaaggagaaaaaagcaaataatcttataggagctgttcagtgaaaaaattatcggctgtttttgcaatactgtttttgctgtgcgcttttcgcgtatcggctgagggcgataaggcgcggcaattaacactttcggggcttgataaaaagctgaccgacagcagctaccttacctctgccgattgcggtgagataaaaatatccgccgacggtgaaatttcatcgctttatattatatttcacagcaaggcgcaggaatttaaagtaaaatctggcgagaagacgaaaaccgttaaaaccgattttcttcatacactaacagatgtttcggagcttaaaagcaatgacttgaccgtggatttcggcggtgcgaaaatcagcgatgtttacgccttttcagccggcacattgccggatttcgtgcagaactgggaaaagccgctcgaaagggcggatatactgcttaattcctcccattccgatgacgaccagcttttctttgcgggacttctgccgtattacgcggcgcgcggctgcgatattcaggtggtgtattataccgaccacaaaaacgaaccccgccgccgtcacgagcttttaaacggactttggacggtgggtataaaatactaccctgttataaataattttcccgattattattcggaatcgcttgagggcgcgcttaaaaccattgcaaccgagggctttaccgaaaacgacgcgctgggcgttcaggttgagctgctgcgcaggtttaagccgcaggtggtggtaagccacgattttaagggcgaatacggtcacggtatgcacattttaaacgcagctatgctgaaaaaagcggtggaaatttcgggggacgataaaagctttcccgaaactgccgagaaatacggtgtatataccccgaaaaagctttatgtgcatttatataatgaaaataaaatagtaatggattatgacacaccaagcgagtttttcggcgggaaaactccgtttgaaatgtcaaagctcggctttttggagcataaatcgcagcagggaacatggtttaaaaaatggatgttcggcaaaaacggcgaaattaccaaagcctcgcaaattaaaaaatattccccctgcgaatacgggctttattttacaagcgtcggtgcggacgtgcaaaaaaacgatatgcttgaaaatataaccctttactcagaacaggagcgaataaaagcggaggaagaagcggaaaagcagcgccttgaggaaaagaaaagggcggaggaaaaggcaaaggctgaggcgggaaggaaagcgcaaaaggcgaaaaaacgcaaaataataatcgccgccgtagctacacccatagccttatttgtcatatttattattgcaataaatattgcggcaaggtgcaaagccgcaaaacgcagaaaaatgcggggaaaaagatgaatattgtaaaacaggatatatggcagtatttaaaaacaaccaaaaagcccgttgttctttacggtatgggcaacggtgccgataaaattataaaagcgcttgaaagtgttgcggtaaagccgtcgggtgtgttcgcaaccgacggctttgtgcgggataagctgtttcacggtatgcgccttacctcatactccgcgcttaaagagcaattcggcaatatgacggtgcttttgtgcttcggctcatcaagacccgaggtgcttgagaatataaaacgaatatcagcggagcaggagcttttggtgcccgatgttcctgtgtatggcaggggactttttaataccgagtatgttgcccgtaactgggagcagcttttgtgggtatattcacatcttgcggacgataaatcgcgcgagacctttgaaaacacggtgaattacaagctgagcggaaagccggaatatctttatcgttgcgaggtgccgcaggatgagccttacaacagctttttgacgctcggcaaggcggaaaactatcttgaccttggcgcatataacggcgatacagcgcttgaatttgccgcgcgggttgaagaatataaaagcataacagcagtagagcccgataaaaagagctttaaaaagctgaccgttaataccgcttgtcttgaaaatataacgcttataaacgcccttgtgggcgaaaaaagcggcaatgcggaattttcggcgcacaaagggcgcggctcaggcgtcggtgcgggggagtactgccgaatgatttcggttgacgccctgaacggcgatttttcctttataaaggctgatgttgagggcagcgaggtacagacgataaagggtgccgaaaacacaatttcgcgctgccgccccaaaatgcagatagcctgctaccaccgaacgggcgaccttacggatataccgcaggctgtttgtaatataagaaacgattaccgcatttatatgcggcatttcccgggtctgcctgcatgggatataaattattatttcgtataatttttaaaataaaaagaatataatatcgggaaataccgtttatgaagaaaatgcacagtgtaatattaaaattgacggtaaaacagacattcttgatttaattaagcttaaaaagcttgttgcggaaaaggcatagtaaaagtaaaacagtttgcatacaacaaagactccctttacacaagggagccgattttgttactatcaaccacttacacaggtgaggggattttctcaagctccgcaagccaaagtgcggctgacgcgtcggacggcatacgccagtccccgcggggggagagggttacagagccgaccttcggaccgtccggtatgcaggagcgcttaaactgctgcgagaaaaagcggcgtataaatgttttaagccagtgcataattatatcgccgctgtaaacgccgtcaaatgcgataatcgctaagcggtagattttagcgggcgtttcgccgaaacgcaacatatgataaagaaagaagtcgtgcaactcgtaaggacctactaaatcctcggtcttttgcgctatttcgccgtttttatccgccggtaaaagctcgggggaaacgggggtggcaagaatatcttcaagcactttttgggtatcgccgccggcgcactctgcctcgtaacgcaccaaataccgcacaagcgttttgggtaccgaggaatttacggcgtacatagacatatggtcgccgttataggtcgcccagccgagagccagctcagataaatcgcccgtgcctataaccattccgcccgatttattagcaatatccataagcacctgcgtgcgctcgcgcgcctgcgaattttcgtaggtcacatcaaggcaagcggggtcttgaccaatatccttaaaatgctgattaactgcggcggttatattaacctctttaaaggtaacgcccaaaagcgagcagagggtttcggaatttgagtgggtgcgcttggttgtgccgaagcccggcattgtaacggcgcaaatatccgaaagcgagcggtttaataatttcatagcccgcaccgccacgagcagcgcaagggtgctgtcaagcccgcccgaaacgcctataaccgcggttttggcacgtgtgtgctcaaggcgctttttaagcccgtaggactgtatgcgcaaaattgcctcggcgcgggagcttaatgccgctttatccgacggaacaaagggcgctttatcaatttgccgcgtaattttggttttttgaatttcctgcccgaattttataaacgtaacgtcagccaagggctcaaaacttgtgtttttatgccgttcgtaagccagctttttaacgtcaatttcggtaacggtaagctccttttcctcaaagggcttgttttcggcaagcgaggtgccgttttcggctataatgcagtgccctgaatagactaagtcctgcgttgactcgccgctgcccgacgatacataaatatacccgcacaaaagccttgccgaagtggaaagcacaagggtgcggcggtatgcggctttgcctataacctcgtttgaggctgaggggtttatcattatatgcgcgccgccgcggcagagcctttcggcaggctgcgccgccgcccagatatcctcgcatatttcaacgccgaatgtgtactcgggcatttcggaatgtgcaaatacaagacccgtgccgaacggagcagaaacgccgcaaatatttatttcggcgtttttttcaacctctctgcccgaagaaaactgccgctgctcgtaaaactcggcataattcggcatataggttttgggaacaatgccgagaattttgccgccctgcaaaacggcggcgcagttgtaaagttttgagcggtacaaaagaggaacgccgactattataatagggtatttccctgcggtgtattcgcaaatttcggcaagcgcactttcagcggctgcaagcagagcctgcgaaaagaaaaggtcgccgcaggtgtatgccgtaatgcaaagctccggcagagccaaaagatttattttttgcgcgtttgctttatcaataagcgcctttatttcagcagtgttggcagccacgtccgccacggtgcagcgcggaacgcccgccgcaacttttataaaaccgtctctcatatgattcattccttaaaatcgtttgtaattattttaaagctttttttactttatgtcaatattatttacatatacggcggggtttaaatgcaaaaatcaggtgaaaaattaaaatattgttaatttttttacaatcttattgaatttggaaaaataatcgcttataatataggctgacgaaagttttactttacgaaaaggggatataattatgaccaacaacaaaacggttttgaaatggcttgacgaagtcaaagagcttgtcagccccgacaaggtcgtctggatagacggcagcgaggagcagctcgagggcatccgtaaggaagctgttgagagcggcgaaatgataaagctcaatgaggaaaagctgccgggatgctacctgcacaggacccgcccgaacgacgttgcccgcgttgaggacagaacctttatctgctccaagacaaaggaaaacgcaggtcccaccaacaactggtgcgacccgcaggaaatgtacgaccgtctttataatattgcccgcggctcttataagggcagaacaatgtatataatcccgttctcaatgggaccgataggctctccgcttgctaaggtgggcattgaggttaccgattctaagtatgttgttctcaatatggctattatgacccgcgtaggtcagaaggtgcttgatgttttgggcgactcaaacgactgggttcgcggtctccacgcatcctgcgatatcgaccccgaaaagcgctatatctgccagttccccgaggataacaccattatttcggttaactctgcttacggcgggaacgttcttctcggcaaaaagtgctttgcgctccgcatagcctcttaccagggctggaaagagggctggatggctgagcatatgcttatcttaggtctccagaatcctaagggcgaaattaaatatgttgccgccgctttcccgtcggcttgcggtaaaaccaaccttgcaatgcttatcccgccgaaatatctgcgcgataagggctacaagatctggaccgtcggcgacgatatttcctggatgaagataggcgaggacggacgtctttatgctatcaaccccgaaaacggcttcttcggcgtagcgcccggcaccaatgctcactcaaacttcaatgcgcttgaaagcacaaagaagaacaccattttcacaaacgttgctttgaaccttgacgataacacggtttggtgggagggtcttaataaggatcttccgcagaactgcattgactggaagggcaacaagtgggacgcttctaagttcgataaacacgacaagagcacctatgctgctcacccgaactcaagatttaccgctcctgccaagaactgcccctgcatttccgatgaattcgataagggcgcaggcgttccgatttccgctattatattcggcggccgccgcgctaagtgcgctccgctggtatatcaatcaaaggattgggtcaacggcgtgttcgtaggctctaccatggcttccgagaccacagctgccgctgcgggtgccgtaggcgttgttcgccgcgacccgatggctatgctgccgttctgcggatacaatatgggcgactacttccagcactggcttgatatgggcgctaagctcggcgataaggcacctaagatcttcaacgtcaactggttccgcaccgatgatgagggcaactttgtatggccgggcttcggcgacaatatgcgcgttctcaactggataatcgaccgctgcgagggcaaggctgacgctaccgaaaccgctatcggctatgttccgaagccggaggatattgaccttaccgaccttgacatggatatggataccttaaagagcatattaaaggttgacaaggatatttgggagaaagaagctgccgaaattgaagagcactacaagaagttcggcgataagctgccgcacgagctgaaagaacagcttgaaaaccttaaagctaaccttgctaaaatgtaatatatagcttgacattcgcccctcaaagcagccgcaatgaggggcgttttgcacaaaataacgaaaaactcaaaaaaatgcttgacaaatgctcaggtatgtattataatcatagcgttgcaatccaaagacagcaggtgaccgcataggtcgtaagttttcgcctgccgaggtgtgcgcttaaataattatgcttatttatgcccgtcctatcgtctttggacgggcattatttatactttcggaggtgaaaattaaatgccaaacgcttcagttcttgcacaaaagcagcagcaggtggcagagcttgccgaaaaaataagcggcgcagttaccggcgttatcgttgattataagggtattaccgttgccgacgatacagcgctccgtaaagagctccgtgaaaacggggttgaatacttcgttgttaaaaacactattttaagccgcgctattgagggtacttccgttgagggtatgaagtctgttcttgagggaacaaccgctattgccctttctaaggaggattacaccgcagcagcacgcatactctgcaaattcgccgagggccacgaaaactttaaggttaaatcgggcttccttgacggcgaggtagtagatattgctactattgaatctcttgcaaagctccccacaaaggaagttcttcttgcaaccgtttgcagcgcgttccaggctcctatcgcagcctttgcacgtgctttgcaggcaatcgtcgataaagacggaaccgcagacgcggaataatttttaaaaactaattataaatcggaggaaaataaaatggcatctgagaaaattgcagctatgattgaagaaatcaaagctcttaccgttcttgagctttctgagctcgttaaagcagtagaagaggaattcggcgtatccgcagcagcggcagtagcagtagcagctccggcagcaggcggcgcagcagcagctgaagaaaagaccgagtttgacgttgttcttaaggaagttggcgctgaaaagattaaggttattaaggctgttcgcgagataaccggtctcggacttgctgaggctaaggctattgttgacggcgctccgaagaccctcaaagaggctgtagctaaggatgaggctgaagctatgaaggctaagctcaccgaggttggcgctactgttgagcttgcttaatcggcaaaccttataaaacataaaaaatcagtccgtaagggctgatttttttatgcctaatcattttcggtgtaattttcgtcaaaaatctgcacggcgtataaaagcgctgacaaaacgtaatcgtcggtctcatttgcctgtttaattctttttctcatttctttgggagtcatagacaatacaatcaggttacaatgcttcccatagcggaaaatttgtccgtttatattgtctcgtcatttgaaatacgacagtattcctgcactcctcgacttcataagcgaaaaaattttctagctatgggtcaaagattttgtaagaaaacggcgctgtttaggggcgcggcgcccgaccgaagaatactgtcgtattgtgagcggagggggcgttgccgataacggcgccgtttcttcaaaaaagcattgtaccctgattgtattgtctacccgaattttcacacatttttttaataatactaaaattattgattataaatactattgctttttgctcgttgggcggcagcttacctaattcctttaatagcttatcaattaactctttcctgttttttcccataatttttgctcctctttatattcgttatttttcgggaaataatcagtgtattcaacaattcccaagggtattttatcaaataaatatttgtttgacaattcctctatatagatatatatctatatgtgtatatagtttcaaacaacccctccgtcagctatatggctgacacctcaccttgcacaggggaggcaacggtttgcgcaagccataggctcccttcttttgcgtaagcaaacagaggggagctgtcaacgaagttgactgaggggtattttctaatatctatcgtctaacatctaatatctaatatctaatgtctaaggttgacattctctcctttcgcgggtatactgaaaacagtaactatcggaggggttttatgaaagcgcttatactttcctgcgggacaggcgggggacacaacgccgcgggcagagcaattaaagaggaattagagcgccgcggcgactcggttttaatgcttaacccctacgaccttgcgggcaagcacaccgcaaagcggatagacgaaacgtatattaaaaccgtgcaggcggctccgcgtgtattcggggcggtttattcggcgggaaacgcttacagaaatctgccgttccgctcgcctgtgtattttgcaaatgcggctatgataaataagctgcaaaggctttttgaaaaagaaaagcccgatgtggtttttatgccccacctttttcctgcggaaataataacgaatatgaaaaaccgcggtatggcggtgcctaaaaccgtttttatcgcgacggactacacctgcataccatttaccgaggagaccgactgcgacgcgtttgtgataccctcaaataagctgacggctgaatttttaaggcggggaataccgcgcgataagctgtaccccctcggtattcccgtgagccgcgcgttttccgagcctttaacgcgcgaaaaagcggcggaaataacggggcttgataaagataagcgctatatcttaatttcaggcggaagtatgggcgcggggaaactggttttggcaataaagcttttatacgaccgctataagaatgataaaaaaaccgggcttgttgtaatttgcggcagtaacaagtggctttacaagcagcttcacgggcgttaccccggtaaaataaccgccgttcggtttaccgataaaatggcggcgtatatgcgtatggcggatgtattcgttacaaagccgggcgggctttccaccaccgagggggcggttctcggcgtacctatggtgcacataatgtccattcccgggtgcgaaacgagaaatatgcgctttttcgcgcaatacggaatgagcgttcccgttaaaagaataggtatgggtctgccgaatgctacagacaggctgctaagcagggcagaggctgaaaaggtaaccgaaaatcagcggaaatatataaattccgctgccgcggcggatatatgccgactggcggaaaaacttataaataacgggttatagcttttttgccccgaacacttgaaaaaaatttaaaaaaatattataatatgtattgttcgcgctttttcttccataataaatatgatgataaaaaacggaggaaaagcgaatgagcaccgaagaaaaaaaggaaaacaacaaatcggacgaacgcaaggcgcagcttgaagaaattaaagaaatgggctcggttgccgcgtttgacggaaagcacaagatttattgccttaccataataggcgaaattgaggggcataacgttctgcccgagcagaacaagaccacgaaatacgagcatgtaataccgcagcttgtggcgattgaggaaagccgtgaaattgagggcttgctggttgttttaaacacggtgggcggcgatgttgaagcggggcttgccatagcggagcttatatcgggtatgaaaaagccgaccgtttcgtatgtgctgggcggcgggcactcaataggcgtgccgcttgcggtttcggcaaagcgctcgtatattgcgccatcggctaccatgacggtgcaccccgtgcgaacaacgggtcttgttataggcgtgccgcaggttatgaatcattttgcacgtatgcaggcgagaataaccgactttgtggtgcgtaattcttcaattacagccgagcggtttaccgaacttatgatgaacacgggcgaaatggtgaccgatgtgggcagcgtgctttcgggcgaaaaggcggtaaaagaaggacttattgacgaaataggcagtctcggcacggttttagacgggctttacaagcttattgagaataaatagagcggtcacacggccgcgcattacataaggagcaaaaattaaaatggcagcgaaaaagaaaagcggcaaatcgcgcgcgggcagtgccacggcgacaaaaattcaaaacagcgcggcaagaaaagaagcggtgcagggcaggcggcagttactttcggtgatctggtttgccgtagccgtgtttttgctgtgcgtggtttttattccggggcagaacgtatggcttgcaatacataactttatattcggcgtgttcggcgttacggcgtatttctacccgtttttgctgggttttgtagccgtgcttttcgcaatggataaaataggcggctctatgaacgcaaaggttatagaatcgggcatacttgtaatacttgtgggcgcggcggtggatattttttcaaagcataacgacgcgcttaccttttggcagcacctgacagcagcgtataaatcaggctcgcaccttaaaagcggcggctttttgggcgcactggtgggtcagccgctctaccttgcgttcggcaaaacgggcgccgcaataaccgcaattttgctgatattcgtatttttaatgataattacgggcactacgcttatgtcgcttttccgcaccatggcgcgccctgtaaagagcatatccgagcaggctgaaaacgcttatcaggcgcggcttgaacgcgaaagcgaagaagcgcagagcggcaagcagctgaaagtaataaagggctttaatgttgatattccggtagacgatattcccgaaaagcggaatatacccaaaacctcgcttgatgaaaagcagcgcaaggtagtttcggcttattacggcgaaacgcccgagagcgagcctgaaaagccggctgtacccgagcctgaagaaaagacggacgatataaagccggagattgaaacggcgcttaaagctgcaaaaaccgaggcggaggcagagaaaagggatataccccccgaaaaagcggcagagccgacaaagcccgccgagttctccgtgcctgaaaaggacgcagagcctaagacggagggctacagctacccgccgctgtctctccttaataaatcaaaagcgaccgataccgccgcgctttcggcggaacttgaccacaccgccgagcatttggtggagacccttaaaagcttcggggtggaaacgcgcattgtggatataagccgcggaccgacggttacgcgctatgaattgcagccctgcgcgggtgtaaaaataagtaaaatcacaaatttggctgatgatattgccctgaaccttgcaacggcgggtgtaagaattgaagcgcctatacctaacaaggcggcggtgggaattgaggtgcctaacaaggcaagcgccgttgtgggcgttcgcggcatacttgaatcccccgcgtttataaacgcaaaaagcaagctgacggtagccctcgggcgtgatataggcggcaacgtggtggtaaccgatattgcaaaaatgccgcacgggcttatagccggcgctacgggctcgggtaaatcggtttgcataaactcaataatcataagcctgctttacaaggcgactcctgacgaagttaagcttttaatgatagacccgaaggtggttgagctcggcatttacaacggcataccgcacctgctggttcccgttgtaaccgacccgcgcaaggcggcgggggcgcttgggtggtctgttaccgaaatggagcggcgctataaaatgtttgccgaccgcggcgtgcgcgaccttgcgggctataacaagtttgttgaaaacttgggcgaccccgaggttcagaaaatgccgcacatagttataattatagacgagctagccgaccttatgatgaccgcgcccaacgaggttgaagactccataaaccgcatagcggcaaaggcgcgcgctgcgggtatgcaccttataatcgcaacgcaaagaccgtctgttgatgttgtaacgggcgttattaaggcgaatataccaacacgtatcgcttttgcggtgtcatcgcaaatagacagccgaacaattttagattccgcaggcgcggaaaagcttttggggcgcggcgatatgcttttcagccccgtgggttcaacaaagcccaaccgaatacagggctgctttgtaagcgacgaagaggttgaggcggtagttgactacataaagagcgaccacaccgtagattacgacgacgacgttatggtggaaatagagcgccaggcggcaatagagaaaaagcagaaaacaggtctgcccgaggacggccccgagggcgacccgatgctcgacgaggcaataaaagtggttgtggaaaacggtatggcttctacctcgcttttgcagcgaaagctgaaattgggctatgcaagagccgcgcgcatagtggatgaaatggagcagcgcggagtggtaggcccgtatgaaggctcaaagccgcgcaaggtgcttatctcaaaagagcagctgcttgaacgcgaggcggcgggggaagtaaatgaaacggcggagtaaacggaaaattgccgtatccgccaccactgcgctgacactggcgatatttataattgcctttgcaaacaagcttttcggtgataaatttcgcagcacgcttgcgcctgcggctcccgattttgataaaacgcaggattttgtgaaaataatggacgtgggtcaggcagacgcggcgcttatttattcaaacggctgctccgctgtgatagacgcagggcttacatcttctgccgatgatatttcggcggatcttaaaggtgcagatataaaggacattgacgcgctgcttataactcacctgcatatggatcacgcgggagcactcgccaaaatagccatgagttttcccatagataacctgataatacccaaccgcgacagctccgccgaggctatgcccacagtgaacgaggctgagaaacgtgtggttgccgaaaagggtaaggttttcacggcaacagagggtatgaactttaacataggcgagtttgaggttacgctgctggcgtactttcccgacgctacaaaggaaaacgaccgctcgataattactatggcgaaaataggagataagaagttccttttcacgggtgacgccgagaaagcagccgaagcagatgtactggctgaaaaactgaatatcgactgcgacgtgcttaaagtgggtcaccacggcagcaactcttcaagcacagcggcgtttttaaaggcggcaagcccaaaatacgccgcaatatccgtcgggaaagataatatgtactcacacccgagcaataaaactattgttgctcttaaaaattgcggcgctgaggtttacagaaccgataaaaacggcgacataagcttttatgttgaaaacggaaatattcgtgtggaaaccgaaaaatagcgctttttgaaaaaaaactattgacaaaaggtatggtttagtgggataatatataaggttatatagaccttattatacttatcggtgatacaaatgcgaattataacaggtacggcaagaggaagaaaacttgtcgctcccgaggggcgggatgtacgcccgactcccgaacgcgttaaagagggtattttcagcgcgttacagtttgatattgagggcaggcgcgtgctcgacctttttgcaggctcgggtcagttagggcttgaggcgctaagccgcggtgcggaaagctgcacctttgtggacgcgtcggatgcttccttaaaccttgtgcgtaaaaatcttgaaagcaccgatctttcggaaaaagccaaggttgtgcgctcggattatgcggcgtttgccgccgcgagccgcgatacgtttgatattgtatttctcgacccgccctattcggcagggcttttaatgccggcggttaaagcggttttgccgcttatgagcgactacggcgttatagtttgcgagcatccgccggaagtaaagttggatgaagaaaccggcggttttaaaattgccaaagcctaccgctacggcaaggtgcttgtaaccgtttatcggaaaggggagagtgtatgactgagcgtattgcagtttgtcccggcagctttgacccggtaacctacggtcaccttgatattataacccgcgccgccaaaatgtttgacaggctcatagtggtagtggcttccaacggtgcaaagcattgctcctttaccccagaagagcgcgtgaatatgattaaaaagtgtattcccgatcttcaaaacgttgaggttgagcattatgacggcttacttgccgattacgccgcaagcaagggtgccaacgcaataattaagggtcttcgcgctatgtctgattttgaatacgaatttcagatggcgcttaccaataaaaagctgaatccgcaggttgaaactctgtttttaacaacggctacacggaatatgtatttaagctcaagcatggtaaagcaaattgccagtatgggcggcgatatatcaagctttgttcccgaggttatacgggcggatataatgaacaggatttttattaaaaaggatactacggaggaataaaaaatgacacttgacgaattacttgaacagtttgacgaggttttggacagcggaatcaagattcccggcaaaaaaactgtggttgatattgaaaagctccgcgcggtggttgacgatattcgccttaacattccggctgaaattaagcaggcaaagggcattgttgccgaccgcgcagatattattacaaacgccaagcgcgaggcggacggtattatacgcaacgccgaggagcgcgcaaaggctatgaccgcgcaggaggaaattgtaaagctggcacagcaaaaggcggctgaaataattgccacctcgcagcagaagagccgcgaaatgcgcaaagccgcgcaggattttgtggatgatattatgcgccgcgcagacgagggtcttaccgctaacctaggcgaggtaagaaagacccgcgccgctttaaagcagcaaataccatctgcaaaagagaattaagttaataaaaaacactttaaaagctaagacggagactgcggtttttaaaaaaagcgtttttaagcgacccgggggcggtgcaagcccgggaaacgcgaaaaaatcggtatcactcccgagctgacggctgaaatttttacagtaagccgctccggtattccgccgttagagggaacgcagattttttgtctgccgtaatgggtggtttgaagttttttaaggcttcgtcctgttatgggcgcagcctttttattttgaaaggagaaaaaacagtgtataagagtatatccccgaaccttaacttcgtggaggaagaaaaaaaggttgaaaaattttgggaagacgaaaatatatttgaaaaaagcatagccgagcgcgagggcgataagccctatgtgttctatgacggcccgcctaccgcaaacggcaagccgcatataggccatgtgcttacccgcgttataaaggatatgattccgcgctaccgcactatgaagggctatatggtgccgagaaaagcggggtgggatacccacggtctgcccgttgagcttgaggttgaaaagcttttggggcttgacggcaaggagcagattgagcagtacggcttagagccgtttattgagcactgcaaggaaagcgtttggaaatataagagcatgtgggaggatttctcaaagaccgtcggtttctgggcggatatggagcacccctatgttacctacgataataattttatagaatcggaatggtgggcgcttaaaaagatatacgaaaaagggcttttatacaagggctttaaaattgtgccttactgcccccgctgcggcactccgctttcctcgcatgaggtggctcaggggtacaaaaatgttaaagagcgcagcgcagtagtccgctttaaggttgtgggcgaggacgcgtatttccttgcatggaccaccaccccatggacgctgccctcaaacgtggcgctttgcgtaaaccccgaagaaacctactgcaaggtaaaggcggcggacggctacacctactatatggcaaaggcgctgcttgataaggtgctgggcaagcttgcgaccgaagataagcccgcttatgagattattgaagaatacaagggcagcgagcttgaatataaagaatatgagccgcttttcgattgcgtaaagcccgtttgcgaaaagcagaataaaaagggtcattacattgtttgcgatacctatgttaccatgaccgacggtacgggcatagttcatatagcgcctgcgttcggtgaggacgacgcaaaggtgggcagacgctatgacctgccgtttgttcagtttgttgacggtaagggaaatcttaccgaggagaccccctatgcgggcatattcgtaaagaaagccgacccgcttgttttaaaggatttagacgagaaaggattgcttttcgacgcgccgaagtttgagcacgattacccctattgctggcgctgcgataccccgcttatctactatgcgcgcgaatcgtggtttataaaaatgaccgacgtgcgcgacgaccttatccgcaataacgataccattaactggatacccgaaagtataggcaaggggcgtttcggcgattggcttaaaaatgttcaggattggggcatttcgcgcaaccgctattggggtacgccgcttaatatttggcaatgcgagtgcgggcatatgcactctgtaggcagtattgcggaattaaaggaaatgtcagataactgccccgataatatagagctgcaccgcccgtatatagacgcggtaaccataaaatgcccccactgcggcaagcagatgcacagagtgcccgaggttatagactgctggttcgattcgggctcaatgccgtttgcgcagcaccattatccctttgaaaacaaggagctgtttgaatcgcagttcccggcggactttatttccgaggcggttgaccagactcgcggctggttctattcgctgcttgcaatttccacccttattttcaacaaagcgccctataaaaacgttatagttttgggtcatgtacaggatgaaaacgggcagaagatgagtaaatcaaagggcaacgcggttgacccgtttgaggcgcttgaaaaattcggagcggacgctatccgttggtacttctacaccaactccgccccgtggctgcccaaccgtttccacgataaggcggtaaccgagggtcagcgcaagtttatgggcaccctttggaacacctacgctttctatgtgctttacgccaatatagacgaatttgaccccacaaagtattcgcttgaaaactgcaagctgaccgttatggataagtggcttttatcaaaactcaactcaatggtaaaggcagttgacgataacctgaataactaccgcatacccgagacggcaagagccttgcaggaatttgtggatgatatgagtaactggtacgtccgccgcggcagagagaga

SEQ ID NO: 4040 - DNA, 1692 bp, Unknown
  16S sequences of unknown bacteria
gttgaagacctggccgactccagcggtatccagaccggcaaaatcattttttatgaattttaccatgtagctgagcatccatcccgctactgtcgtataaaacatcatgagcaggtaattgcctgccaacgcgaaaccgccgtgaatgtgccatttctgacccggtttttccagttcgttataagcgctgaccgtacttttgcggctggcgcgtccgatggccagttccatagtcagaaccgggacggccaagataaccagaaagatcaggtagaaaagcacgaatacgccgccgccgtagtttccggcgatatacggaaaacgccagacgttgccgatgccgatggcacagccggcagcgatcagtagaaatccgagtctcgatttaaaactttctcttttcataaaatcctcacttgctttcgtatatccagcgtgcaacagcaattattatatagctttgtctgcttgagtacaatagcatggtgaagtaaaagtaaaatatttttgtgtacgaaagtatcggattttgtgatttctcttcctgtgatctctttatctctgttcaccgcggaggaccgtcaaaaggtcggtatagacttcttcccgtccgttttcatttaagatctcatggcgaagattgcgataaagcttcgccgtgacggaagagtagcccacctgtctcatgaaatccgccgagcggcagaagtgtgtctcgtcgatgaggcatacgtcctccgcacccgaggcgaagtggactggaagggacggatgattcatctgccatccatctttgtcatagacgtcgatcatcaggcggatcagggcttcatagccgtctgcggtaaatgtaaaaccgcagagtgcgtccatttcataggctcttacgaccgattcgagagaacagatccagctgacccgggaccgggacgtcctgtcttttgcgcggggcgccgccagtctgtcgatcagaagactgacgtggcgtcctccccggagaatcttcatcagctttgtcagcgccagagcgatgcgggcgcctcctttttcagatggagaaccgatgaggatcagcctttcgatctgatcgtcatatttttttgtgtaagctctcgctattagagaacccatgctgtgtccgatgaggaacaccggcagatttggccagcgcgatctggcgtaccgcgtgacggccgccgtgtcttccaccagaccgtcgcttccctgtccgtaaaagtaaccgagatctgcggaactcttcacgctttttccgtggcctctgtggtcgtggatgatgcagatataaccgtgagccgcgagaaattccataaaatggagatatcgttctttatgttccgccattccgtgaattagctggacgatgccttccgctttttccggaagctggggcagaacggtcagcgtgctgagattgaggccgtcgcagggcgactttacgaaaaattgctcttgcttcatatcttcctcccgctggtgctgttacagggattccggatccagagaggtgtgttccggatagatgccctggagataaccggtatagtctttattatggctgcgtacgaaggtcatactcacgttttcttcgtggcccggccagatcatatagtcatctgtcagcagagaatccagtttttttatcgatttttccatgtcttccgcagagccggt

SEQ ID NO: 4041 - DNA, 28944 bp, Unknown
  16S sequences of unknown bacteria
ggttctatgcggtgtctttcattaaaatccactcactttggggttgaccctttttttctacttctttttccctcatcccactacctttgacgatgagcgtttttgtgccagcatgctcgcaatccctttaaaatagcgggattttaacaagctataaatacaaaaaagccgcaagtgtttgaacttgcggcttttaaagtggcgggatggacgagactcgaactcgcgacctcctgcgtgacaggcaggcgttctaaccaactgaactaccaccccttgaattttgagtctcaattcaggcagattatgctttgtctgtcaacctgttttttttgcggagcttatttttttttctattccaataaatcaaagtctcttatctaaactgcatattttaaaatatcatgccaaccgacaaaattttccgaactttgccctttggagacttctattatttcggaaaaattttatgttcgacatttccgcgccaaaaaacacataatcgtattttaatcatggaaccgcacacgcacatatcgcagccgacttggcgccactttattttgctgtttccgctgtatctgcttgtgcgcctgtggcaggcaactatacgcatgcgcgcttccgacgccaaatcacttgaaaatctggaagacaaaaagcgcctaatcggccttgcatggcacaacaggattttcttcctgcccatgtgcaagtatattttcaggccgaatttcccgatgtcgggcctcgtcagcgcgagccgcgacggcgcttggctttgcgcctttttcaaatttcttggcattggcacagtcagggggtcgagcaagagaaggggcgcacacgcaattatttcaatggtcgaaaccctccagcatacctctgacattttcataacgcccgacggcccccgcggcccgaggtacgtttgcaagccaggtttcttgtcggtcgctaaaagcagcggcgcgcgcatactcttgttgcggattacaccttcttctttctggactatcaatgcgacttgggacaagtttatcctgccaaaaccattttcccgcgtgactgttgacgccgtaaattttgacaactacgaatcgtttgtcgcggaggcggaaaaaaacggaaagtcgccggtcgattttgcggagcatattctctccggggaatgagcctaaaaaatcccagactttaaacgcgcgccgttattttatttgcgatataatcttttgcatggcaacctattgctgtgaggtgtatttctatgaaaatatttcttttgctacttgcgatttttctctctgcatgcgcgaactccgattgcgcggattgctcttcgcggcagcccgaaaaagttccgacttgcgcattaaaaaacgccccgaaaaactttaacgcggagatcgctgatttttttgccttcgagaaaagaaacgagcgctattgcggcaaacttccggattctcccacgggcgcgccggactttgaagtgcagcttccgcgcaatacgggtggcaaaacagtttacgcggcggacttcgggtttaacgagtccaatccggattgcgcggcggcgataaacagggcgctcgactattgcaaaaaaacgcgggcctctaagctcgtgctcgcccgcggaacatacaaatgttttggcaaaaagggaattctaataggctccatggaggattttgaaattgacggtatgggcgcaaccctcgtattccgccgcccgagcgatttctctattttgccccaatacgcggttgttgaaaacgactctaatttcctaataaaaaactgcaagcgcgtgaaaatatccaatataaactcagactgggattgggaaaccgacccgctcggcgcgtttgtgcgcataatctccaagcacccttccgaaggtgggaagcccccatactttgatgtggaatttatcggatatgacagatacccgctttacggcaagccgacccccgttcaggtaatgatgcccatggcggattctatggattcgtttggcatgggtgctgctttttggtttggcccgtcggaagggcactttggttctaaatgcgaatggctctcccccaatacggcgcggatataccactcgacaaaggcggaggggcttccgatgtcaagcgcgtacgaccacctgtttaccgagtctaatagaaactttcaacacagggcggcaaaagtcggcggggtttaccgccttatgcattattattacgggaagaacgccttcaatctcgattccaacgaacatctcacacttgaaaacatagagattttatcttgccgcggcatgggggtgcatataggcggctcgcaaaaatattggcagatgataaatcttagggcgggcgcgcgaggcggcgggaaaatccgcccgtgctcgactaccgcagatgtcgtgcattccacaaattcgctcggttactgcaagatgataggctgctccttttcattaaaccaagacgacgttgtaaattttcacgacaggacgaccttcgcaaaaaaaatttcaaaaaacgaaatgcaaatagtcaacagccgcggcaactattatttcggcgcgcaggcgggcgatatcatagacctgtacgaagccgactgttcgcccacgggtttttccgcgaaaatcataaaaattgacggcgagaatctgtatctggattcggacgtgccggaggcaaagggcgccggattcctcgtttcgcgcaggtcgggcgcgacggacaatctgcttgtaaaagattgcgtttttgaaaactactacgggcgcgcgattttccagggcagaaacgtcacggttgaaaattgcgttttcaaaaacggcccgtctattccgcttaaatttcagaccgccttcactctcgacaaatgggtcgaggggcggggtgtttcaaatgtggtggtgagaggctgcacctttgaggacaataattttaaaatggggaaaactctcggctgggtcgcggaaatattttttggcgcgtctatcgactcgagaggtggatttaaaattccgtcgaaaagttgcgccgacggaattttaatagaaaagaatatttttaaaaacgtacgaggattgctgatgtatgcaaatgccggcagaaatataatattccgcgacaatgaaattatcggcgcatcttcggaaaaatgctcgtatgcggcgtccatatttgcggagaatgtcgaaaatgcatattttataaataatttgctttacacggattctcccgccgcgtgcggcgtaattgttagcggctctaaaagcgtggtcgcgtgcggcaatgccttaaagccagccgattccgcgcagccgcgttgacatcgggctgcccggatttttcggcgtggcggtatggacgcgcaaagtccctattctatgatgccggactttttagcgttccaatatgcggcaaggtgaaaaatcacggcgcaactcgacattttgtcgtagtctattttttcaatcggcttggcgagcaggcgcgcggatttttcgtcgaaatcctccgctccgcgtacgagcattgtaagcgccatctcgccaaaataacgcggtgtgcgcagaatatttttaaactcgcgcatatccggtttgccgttgggctgaatcgggcgttcttgagggttgggaagcggtgaggttagatcgagctttgggtccgatagggcgtttgaggctgacgcaaggcgctttgccgcaagggcgcttacgtcgcccattatgccttttattgcgttcctttcgctttcggattcagcaaacgagagcatcgcttcaagagatatctgcatttgaagctgcgcccacggcgccatattcctgtcgaaatttgccgactgcgatatcgactcttttgcgtactttttgtactcttcgagatattttttatcgccagtcacaaggtgcgcaacggcgtaaatcatcgggagccgcgccgcctcgtgggccgatactttccacattctcgacagcccgaaagtggacggcttgccgtctgcgttctgggcgtcgtagtttgtggcgggggtcattttttcaatcattctgtcagctacggcggagcatatttctgctatgatttttttatcgtcggcagttgaaagagggctgttgtaatatttccacaggccgtgtatgcagtgggtgtattggtcgcgcgatgttgaggggaaaaacgattttccgtcggaggtgcttactgcgcgggcgacgaatccccgagcttttggcgacagggaacaccttgccattccgcgcactatggcgtccgcgtatttttttagcgacgcgtcttttgtcacttcgtacttgtcgagcacggcgcacatcattatcccgccgagaatcattccgtcctccatgccggttccgtatccgttggggttggcgggcgccagcttttttatctgctcggcggtagggacaaagtcgagggaattttcagggtttagggatactattaggtcgtaaaatacgtccgttttggggctaaaaaatctcgtccatacgctattccacatatccttttcttgcgaagggtctatttttatagtttccgcaaaaatgtgcggggacagggcgaacgcgattatcaaagccaatatatttttcatggcagacaaatatttttttagaaacttgcggtcaatattaaataattgcaagtcgggcgcaaccttcgcaactctaatttgcgcgcgttaatccttaaaaaaaatcccgcattaaaaaaatgcgggattttctttgctaaaatgggcgttttaagggtgcggcgcaaagtaaaacgcgccggcgcccgaatgctaatccgccttcacgacttccgccgccctgatttccacagggccaatgaggcctgaaggcattggcttggagtcagcagtccagcctttgcttagcgtaaacgtatagcgcgaattgtcgtccgcccgcgacttcccctccaatacccatttcggtgtttcgccggcttttagcggcgattttatttcgtcgccgaccagcctgttgtaccaaaggtttgtcacttcgacttcaacggtgtttttccccggctttacaaggtttgtgatgtcggcttcgtacggaatcttccatagaattcccgcgtctttgccgtttactttaacccttgcggtctcgcgcacttcgccgagcgacaggagcactttgcggttttttgaaataaaatcttcgggaatgtcaaaagacttgctgtattttgcagtcccggagaaatattttatgccaaattcggggcgttccgtccacgatacgagtttgtcgaaggcgattttcccttccggtgcgccgaggtctttggcaaactccacgctccaatccgacgacaattttatcgggcgcgggagattttccacttttgtggagaattttgcgccgtccgacagctcgccttccgctgagccgttgatttcaaataccatggccggcgccccgtcgagcactgtcgggtatatcgattgcggggacatccattcgagacccttccaaaaatggttttcgctttcgtttactattttttccgtctcgcgcttgccaactttatatttaatataaagctccttgaatttattcgggtaagggtcgccaaacagtctgtttgaaacgctgaatccatcgggatagactttttccagtatttctttgacgtctttgccgccttccttcgtgccgcgaagcctgtattttgcctctattatatcaatgttttcaggctttacgtaaccctccgctttctgggcggagaatttttcaaagtgcttttgttcggctctgtcgcggagaactatgaattccgattccttcgggtcgaattcaagcgagaattttattgtttgcccgtcgcgcctccattgggggagcggcttgatttcaccggtcgcggggttccatatttcaggcgttttgtcgccgttagctcgtatggaaaattccccgttggcgttggacatatttgtgtttacaataaaatatattgaggcttcgtcgcaaacgcgcgctatgcacttgaagttctttgccgccgatatgacgggctcgatttttaggtcggttagggcgcgcaacgcggacacttccgggtacagcgtgcctttgccgactttccgcggattcttggaattgtccgccccccatatctcgtttacaagctttgcgtattcggcgtcgtcgtcggacaacgacgggctacctatcgggcgcattccgcataccgcaatgcctgcgtcgagcatcttctttacggctttaagcgtgttcaaggtcggccttatttcctccgcaagcgagaataccgagtactttactccggagggggcgacaatcttgccgtcggatatctttatggagtcgagcaagtctttcggagagcaaaagtcgaaatagtagcctgcgtaaacgacgggccagtcgtacgacgtgactctcgtcctgcggttcgggagggattctccggcgagaatcagcacgtcgctcggcactctgccgcgctgcaagagcgtctgggcacggtttaggtagtcaacccacgctttgccgtccttccaccaagtagtgtttacgtttatatgggagccgtgcgggccgagcgccaaaccggggcggacgtttacaagcggctggtggacgtagctgtggacgattatcgcgttcgtgccttcggtccacattatgtcgcccgagtcttttagcatgcgcggatgctgccgccaatatccgtcgtcgccgtcgcctgttgtgaacgattccgcccctgccgagcgcctgccgtggaagtttgcggcggagtgcgcgtgcctgccggtcgtgccgccgcttagccaaaattcgctcgtcggaatatccgccgtgcgcgagcagcggatgtcgtcaaaaccgccgccgtagctttcgagtatggaaagcatacccctgtcatggcagagttttgtaaagtagtcgaagtagttctcggcaaacaattccgcgaccgtcgtttgcaggtcgaacaggaatctcgatgatttggcggggctttcaactgtgtagcctattgcggcggggagccattttaaaatgtcgtagccgcggcgttttttaaattcggcgtcaaagccttccgtccaattttgtccgcctacttcaaatgagtctatagtagcgtatttgagcactccctgggagcctatgtcgctttcgagcacacccatgtagtgcggccaatgggcgtcgagcccgcgctttgagagcttgtcgcattcaagccctgaataggtcgtgggggcgttgtgcctattggtggttgtgtagcctattctaagaattatccagtctttgccgtcgccggtccagtttagctttccgtcgggggacattttgccggtcaaatcgagaatttctgacacagccggagctttggcgtcgggtttgccgacgggcggtttgtaggcgtaagtcgtttcagacgagtttgccgtctggacgttcggtattgtggagtcgttgtaaagttttatgctttttaagttaatcggcgtcttagacttattccacggggcgacttttttgtaggaaaagtcaaatctgaaaaactttgcctttaccgcagtcggcccaaaggacaaaaactttgggatgccaatatcgttggagtggttgtacgacagcgttcccaccttgcggaaattcttgccgtcgtccgaggcgtaggcgtcggcctcaaaatgtattcttttgccttcgaagcaaagttcggcggtgcgcgcctctacgctctctggaaattcgagaagcacggaggctttcccgccttcattttcgatgggaagcttgaaggaatttttattttcttcgtccgaaagggcatttggattggcggtttcgggaacggtcgaaatttttggagtcggcggaattttattagccgggattgcgagaactgcgatgtcgcggtaaaagccactgtttgcgggagggggcgcgagcgttatgggcgcggactgcttgccgcttatgcgtttttgcgaatgcactatgaatttcatcgaatcctcaggcttaatccacggcccgccagagctcgaccagccggggcagttgtgcacgcctatggaaagcccaagccgcttggcttcggccccggcatgccgcatgagttcgcgccacaggggggtcattatctgggcgtcgggcacattggggattttcccgtagcagttcggtatgaatatgtgcgcgccggaatagcctatgttttttatggcttcgaggtcgcgggtaatgccttcttttgttatgtggtttgtcgtaaagtgccaccaagtttcggcgcgcgcgtcgggagggggatttttgaagtccttctcaagattgtctgcgctgacggcgacggttgacgcaaataatgccaatagtgctgctatttttcctttcatcatatgttcctttttttttgtaagttttaaagaaatgtagataatatgtcaataaattttgaattttattgaaatatgttaattttttcggacgatgtattggtacgtttttttatcaaaaggttttctaaaacttgaccgcaacaatgccacatataatatagctacaaatgaagagaataatcgttatcgcagtattgaccgcgctgtcgctttgcctttacggcgcggataaaatatcatcgccaatcgtaaaagccggcgacaacgtcgcgtttgttggcgacagcataacccacggcgggcactcctccgaatatataatgctgtattacataacgcgctatcccgacatgcgggtgaagtttctgaatctcggcgtaggcggcgacagcgcaagcgggctgctgcgcagaatggattccgaaatattgaaggccgagccgaaggtggcgtttttaatgataggcatgaacgactgttcgcgctggctttattccttggactcaaagcaaacagccgaggagaaggaaaaaaatataaaacaggcaaataaagattaccgtagcaatctcgcaaaagtaattgagattctctcaaaaaacacgagaagcgtagtgctctttaccccgtcaatatacgaccagaccgctaaagtaaaaacgcccccatgtttgggcgttaacgatacacttaaactttacggtgagtacggttcagaaatagctcagtcttatccgaatgtgcttgtcgcggatatttggtcggagatgcagagggttaactcaatgatgcaaaaagacgacccgtattcgacaataatcggcagggacagggtccaccccgcgtccgccggaggatttgtaatggcgtacaaatacctaaccgacgccaaagaaaatcctactgtatcaaaagtgtcgataatagcgggagaaaagccaaaggtcgcgctattagaaaactgcgatgtttccgacctaaaaagcgtcgatggaggggtctcgtttaaaatattggaatttgcgcttccaatggttgtgtccggaaggacgctcgacggggaatcgcgcactgattttcaggaaaatctaaatagggaaatattgaaagtgtgcggactcgcaaacggagactacgagctgcgcatagacggcaagagtgtcggcaagtattccgcgtccgagctgtcggttggcgtcaacctggcaggcaatgataagactccccagtatgcgcaggctgtcaagatagcggagatatgctcggaaatacgcggaaaatacgcctcgcagcgcaatctgtattttgtcgagcactttttgcttaaagacattaaggatttttcggacgtacaaaaatgcgtgtcggcggcgcgcgctattttggatcgcgggaagatatacggttggggaaaatttgccgtggagttttatatagaaaataaggcaaaagaaaagcagatgctcgacgaagtgttcgctctgcaaggcgacgcctacgatgccgccgagacaaaaacgagaacgtacgaaatacttcccgtaaaataggcgggttgcctatcgacaaaatatcgggcaattcggcaaaaatatcgggcaattagatgccggactccgcatggggctcggcgtttttttgcagccataaaatagaatttttttagggttattattgctctaaacgcaaaaaagcccggaggttttttatccgggctaactccgatggttcaatgtgtaaaatccgagggtgccaattggctcgccgtataaaataccgcgccctaatctaattttttggcgggcatttcttatacagcggcgcgccgcaatgtcggcgcgcggcaattttagctatgaatttttttgcggtacactgcgtaggcgatggcaactaaggcgaatattgcggcgaaatccgaaggctcgggaactacaagccccaaatccacttttattgtagtcagtccggaatccaaatcctctatgaagctgagcgtaccttctatccctgtttgtgtttttagtattacatcgcttagcgagatgtcggagccttcagttttgaaactcatcaattcccagctgaacatatcaagttcccaggcatcaaggtatatttccagggtctcgcgtgagatatttaaatcgaatacgagctgcgccgaggacaaggacgagtcttttgtcacggtgccgtttatgcgtataaaatcgttttcaacttcggcgaggtcgaagagcagggttcctctataaaaggtcattgagtcaaactctacagtgcctatatcgctgcccatggaggttcccgctgcgctgaatacggcgtgagaattgttctcgtcgtaggagtagagcgacaaattgttgcccttcattccgtcatacattgcaatgtcgagcctgccggagcaaatttctacattgtttatattggcgttttcacattttacgtcccaaataaagtgcgaagatgaggaattgaagcgcaatgtttgctttccgtttagggcgtcgccgttcatgattatgttaagcttgctcgcagagccctgtttcattgtgaaatttgcggtggcgtcgtgtgagcttttgttggtgaggttcaaatcaacaactttttgcaatgtttcgtctgctgttgcgatatttaaccttatgttactaaacccgtttgagtttgcgtctccaaagccgccgacattgcgcactacatagtcgaagcttgaaccgacagataaattccagacattattttccaaatcaactacgccttcaactgtcatggcgctgttcatagttgacaatataaaattggagtccgtttttggccctgagtaaaggttgccttttacgtttatcaagtttccaacccctgtgtctttcaacgcgaataaaatccaatcattggaaccatttcttattccgttaatttcccagtcgttttcgacagttagggttgccctgtcgaagagttcccattggtacattctatatttccactcctccttatcaacttttgcaagagttatgtttgtgacgaggttgttgacctttaaagacgagtcattacccattataaaagatgatatatactcatttttgagaattggagctgactcagatgtgaaagtgtcgaatgatgtaatagaataggccgcaattttgaacgggtttaacgaatccctgtaaatgtaggcgttttgggagccgtcaatttcgcctgtaaatgcttgggagagggaagagtctgtgcaccagttcgcgggattatttatatacgacgaatctttgtcggtgcggttgttgaaatagatgtcggtctgggagacggccgtagaggataatataaaagcagacgagaaaatcgtcacaatttttttaattctgctgggagaatcgcaatttaaagaaagtattcttttcatggtaaaacaggttagcggtttatggtgaggttaagtggtataatttctataaatatccgtatttttagaaaaccaaaaaatcattttttttagtttacagtaaacttaaattattcttcttttcgccctctcgaatattttatctgccccgtatgagcgcaaaagagtcgatttttttggcaatcaataatttttacgggtggcgtccgcccctccattttagtttatttacgcttgcaaaagccgttggttggaaaaaaatattcacccgaaaatgaaaatcggaatcggacaaatcaatacgagaataggcgatttttcagccaatgcgaaaaaaattgaggaagcctgccgcagcctcgccaaagacggcgccgaattcgcggtcttccccgaatgctgcgtttccggatacccgctgaaggatttggcaagcatcaagaaatttatagagagcgcccaggttgccctgcaatccctttcaggcaagctcccgattcccgcgattgtcggctgcccgcgcttggagcacggctcggccggcgtccgaaactccgcctacttaatagacggcggctctattaaaaaaatttgcgataagcacctgctgccaaactatggcgcgctaaacgacgcaagaatcttcgaccccggctcggacttcggcctcgttaaaatacgcgggaaatcaataggggtgacaatttgcgaagatatctggacaattcctaccattcccacggcagggcggtacgagtactttccaaggccgctcgaacacttcgcaaatcttaaaaaaagcgatccgtccgcgctcgacattcttgtgaacatatccgcaagcgtattttcggccggcaacgacaccgttcgccgcaagggcggattgatgtgcgaagtctcccgcttcgtgggcgtgccgctcgtgtggtgcaacctcgtggggggaaacgacgaaatagtgtttgcgggcggtggcggatttttcgacgcgtcgggcgcggagccgaagtccaagtgcctaaaaaaatttgaggagtgcgctgaggttatcgacacctcctcaatagaagggtacgacggtgactctttcgactttttcggcgacgccgacttaaagcgcgcaatcgtaatggctctccgcgactttgtaaacaagtgcggcataaaaaaagtgcttgtggggttaagcggcggaatcgattccgcgctcgtggcggcgcttgccgtcgaggctctcgggagctcgcgcgtttgcggaatttcaatgccgtctaaattttcgagcggacacagcaagacggacgccgcggctctcgcggaaaatctcggcatagaataccgcagcgtttcgatagaaagcccggtcgcggcggtggagggggctctgtccgaaatttttgccgggctacagcgcgacgtggcggaggaaaacatacagtcgcgaatgagggggctaatactaatggcggtctccaacaaattcggggcgctcgtgctcaccacgggtaataagagcgaatgcgctgtcggctattgcacgctctacggcgatacgaacggcgggttcgcccccatttgcgacctatacaagacggaagtttaccgcatatcaaaccttgtaaaccgcgaagccggccgcgaaattatccctcaaaatacgatagataaacccccgtctgccgaattgcgccccgaccaaaaagacgaagactctttgccgccctacgatattctcgacgcaattttgcgcatgtatgtcgaggagggaaaatcggcggaggagatagccgcaaatggctttgacgcggcgactgtcgcagatgttattggcaaggtttcgcgcgcggagtacaagcgttcccaatacccaatcggcccaaaactttcaacttccgccttctcgacggatagaataatacctgtctccgcaaaaaaaggaatgttttaatatgacctcaaaagaactttttgctaaatctaaaaaattgatacccggaggggtgaactctcccgtaagggcgttcggcggagtcggcggagagccgttttttgtcaaaagctcgaacggcggaagaatagagacttgcgacggaagggaactcgtcgattttgtttgctcatgggggcccgcgctttttggacacaaccacccggttatacgttccgcgattgaatccgccctcaaaaacggaacttcatacggaatcccgtgcgaagccgaacttgaaatggcgcaattaatatgctcgatgataccctgcgcggaaatggtgcgcatgacaaactcaggcacggaggcgacgatgtccgcaatccgcctcgccagaggatacactggcagggatatgattgtgaagttcgacggctgctaccacgggcatgttgacagcctgctcgtaaaagccggcagcggggcgctgactttcggcaatcccaactcggcgggggttcccgcagatcttgcaaagctcacgcttgtcctgccgtttaacgacatctcggcagtcgaggagtgcttttcaaagtattcggataaaatcgcatgcgtcatactcgagccgtacccggccaacgtcgggctgattgcgccaaaagaaggattcctaaaatccctccgcgagatatgcacaaaatacggaagcctgctgatattcgacgaggtaatcaccggattccgcgcgtccgccggcggagcacaagcgagggagagcataatgcccgacctctgcgcgctcggcaaaatcatagggggcggccttcctgtcggggcgttctgcggaaagagggaaattatggagatgctcgcgcctatcgggcccgtttaccaggcggggactctcagcggaaatccgctcgcgatggcggcgggaattgccgctctaaaaatgatacgcgacaaccctccgtacgaattgcttgagaaaaaatcttcgtttattgtggaagccgcgcgcagcgcagccacaaaaaagggaatagctttgcagactccgaaagtggcgtcgctattctcattcttcttcaatgaaaatccggtggaaaattgctccgacgcgatggcgtcttccgccgatctttacaagaagttcttctggggctgcctcgacaggggagtatattttgcgccgagcgcatacgaaatatgctttatgagtgccgcccacaccgacgacgatttatcgcgggcggcggaagccatctccgagagcatagcagccctgtgattcgcactctttgcggatttggcattctcagacgctaaaacaaagtgcgcctaaaaaattctggcacaggatagtgcaggggtatgcggcgcaatctgcttgatagttagcactaaaataaatctttaaatttctattgagctttttgtttaagcggaggtcgcaaagttcgattttttaatttacaagatatgtaaaacttcggaaaatacgcttatgaaaactttatcattgacactcattgcagcagccgcgctcgccctatgcgggtgcgcttcaaccgctcctaaaaacgacgacgggtttgtcgatttgttcaagccagacctctcagacgcaatatacgaaaaaggcgtatggagctttaaagacggcgtattgcagtcaaataaagaccagattatattcacaaagggcgattacgaaaattttgaaatagagcttgaatacaagctggaaaaaggctcgaacagcgggatagtggtatattgcaccgatacaaaggactggataccgaattccatggaggttcaaattgccgacaattcagacccccgctacgcaaagaggccgataacccataacggcgcgatattcgggcatgttcctccggaatttgacactactgtcccgcttggcgtttggaaaaagatgagggtcgtttgcaagggcaaaaatatcgacgtgtacgtggacggaaagcatgcgtcgaaaatcgacttgtcgcagtggaccgacaacaaaaagggaccgaacggagttgtgataccttcgtggctcacaaagcacaagaaggctgaaatcccaactaagggaaagattggcttgcaggggttgcacggcactgcatctactgcgttccgcaatataaagataaaacaactttaattgcctttcaaaaaagtttttcgcaattctttgcggctgaaaagagcccgcttttataagcgggcctttttgtttgtatagaccttggtttgcggacattttgcgtctcgctggcatacgcaatttattctgcaaatacactgaaattgctttgagttgcattgcagtaaattattttttgtggctttttatgttcgcggaaaacagttaaaatttatttcggctcacggcgcgccaaaataaaatccgtaaaaaatctaaaaaattgccgacgcaatattttgaaaagtgaaaaaattttccgcccaaacttgcggcaaaatttttttggttaacctttggcagacttcaaatatttttgcgaattaccgaagctttttgccgccgtttgggcgaagggaatattcgcgcaagagtttttttgccgcctgtttaaagttcgcggcaaagccggcgtcggcgaatttccgcgtaatcgtggaatcgggattgcgggctgaaataaacttgactatgccgcgatattatagggtaatatcgcataaatcgccgattagtttgcgcggagttctccattttctcgctaaaataaaatatttatagaactttgtattgattggggcggtcgcaaatattatgcgccgttccgcaaaatatcgcgcgctgaaaatattaaaaaaaatggatatattcgtaaaaaacctgccttttgaaattacagagcaggaaattaacgaagctttcgcccgatacggcgaagtttccggcgtgaaaatgctgtttgacaaagtgtcagggcggttccgtggaatggcgtttgtgacaatgcaaaacttttccgaggcgcaggccgcgatagactctctaaacggagctgatttaggtggcaggccaatgcgcgtggaagtaagccgcccgcgcgagcagcgcataaccggttttggcggcggatttagccgcgagaaaagaagcttcggttttaaaaggcgaaactttgataggagcgccgcggacggcggagatgccggtaatacccaagagccggagggagagggcagatttaagccccgcaaaaaattcggctggcgcccgcatgaaaaacgcggattcggcggcgaagaaaagccttttaatagaaaaaaaggcggctttaaaaaacgcccttacgacggtgattttgaaagacaaaaccgccgcccgcgcgattaccgcggagagtccgacttcgaagaataaaaatcttccgcgtttttttgtctcaaaacgcatttgaaaccgcacacagaatttgcgtggcgtttcgctttggcgctcgcattagcttgtcttttcgtgcggcggaatttctgcgcgtggaatttggtgcatagaggcgaaaactggtataaatatttttgtattgggcgcctgcgggagttttgtgtagtgacataacggcttggcgaaagtcgatatagctgtttattaaggctgaatcgcagctttaccttatcgattctctcataaatgcaacagcgtagataaaatgaattttcttgcgtgacggaacttttcccctagtcccccgcggagattttggcgcataggcggggcggcaaagtttgcttggcagtgcaaatccctaattaaatgggtcgttttattctcaaaaaaaaacggcaaagctccatgaagccttgccggtaaagtttgttttaactgcgcccgcctattaattgaatatgttggagagcttttggttgacttcgcggactttttcttcgtcaactttcaaaacttttctgtcgtaagtgaaaagcccgtttacttctatttcgacgtctgtggtctgcgtgtatatcgcgccgaaacagccgtattttgtcatgtctataaatctgttggttagctcgacaaacctctttgtcacttcttcctgcgagcgcattttgccgtatccccagttcttgtctttcacccacaggtgcccgtcgacggcgcagcctatgccgccgtactcgccgacaacatttactttttgattgttgaacatgtacattatggggttgccgtagtcgtggctatcgactatgtcgccgcagtcaaagtagttgccgccgcttgcggaattgacaaggcgggaggggtccattgactttgtccattccgtgatttcctttgtcttaaactgcccccaggcttcgttgaagggaacccatatcgctatgcagggataggagtgcaggctctccataatttccttccattccttgcggtaggtctcttcaaattttttgcttaccgttctttcttcgccctggaaaaatcccctgggctgccagccgttgccttcgccgaacattgagggcatatcctgccagacgaccattccgagcctgtcgcagtgcgtgtaccagcgggcgggctcgacttttacgtgctttctgatggaattgaatcccaagtcctttgtcctttgaatgtcgaatttcaaagcttcgtcggtcggggcggtgtagagaccgtccggccaccagccctggtcgagggggccgaatgtgaaaaatttcttgttgttgagtgtgaaatctacgcctccgaatctgccgtgttttgcaatggaaaatttgcgcatagcagcgtagctctttacgctgtcaacctgttcgccgcccttgtttgacagggttatttcaaggtcgtagaggaatggggactttggccaccaaagcttcggattctttacgggaatgtttgccgttttattcgctgcggcagtcgtctgggcgacgactttgccgttgtcgagaacctttatggtcgccgtcgcggatttgtcgtcggagtcaactctgatgtcgaaactcgatgagtcgaggtcgggcgttatttttaggcccgatatgtgcgaggcagaaaccggttcgagccacacagtctgccatattcctgaaactgacgtgtaaaatatgccgcggggattttctatctgtttgccgcgcggaagcccgttgtcggtcgaatcccagacgcgcactgcgagggagttttcaccgtctttgagattttttgtgatgttgaatgagaacggtgtgtatccgcctgtgtgttcgccgattttattgccgtttacgaaaacttcggctttccaatccaccgctccaaagtttaggaggacatttttgcctttccagtcttccggaatttgaaatttgcgttcgtaccaaaggctttggtcggctttaatagttttgccgacgcccgacagcgatgattctatcgcaaatggcacgagtatcttgccgtcaaaagttttcggaaggggggcgtccttctttgttattgcgtagtcccaaaggccatttagatttagccattgtgggcgttccattatcggccgcggatattcgggcagcacattttggggatccactttgtccgcccattcagtttttattttatctccggcgggcttccactgcgagaaccctgcgcacgcgaacgcgcatatcgcaattattgcgggaattgtttttctcatatgtatattattttatttgttaatagaagttaaatagcagtacaacaatttgtgaattttgcgataaagtcaattttatacacaataaattaaataaaaaacgcgcgcaaaacaaaatttgcgcgcgcccaaaaattgtttttttaagagcgtttatgactgcggaaaaccgccaacgcaagcgcgccaagcccgataagcgcggccaattcggcaggctcgggaacagacgagaaggtcgcctgcaacgtattgccctccaagtggaaaatcgcgtatgcgccgtctattttcgcgatgaagtcggattcgtccatagcgcttccgtcggagttttcaaaacccccgttcgcggtcataatatcgtaaaagtttccgtcgtccaagagatattggtcgaaatttgtgaagtcgataagtactgattcggcgtcgcttacgaatttgtcgcccaatacgatttggccaggttcgccccctattgcgcttgcgtctatgatgatttcgccaccggaatattttgcggagccgagcgatatgccgctcgacgggtcgagcgcgccgaaagcccctccagatattgtgagcgaagcggaagtgtttgccttgtttacgagcattgtgccgttctttacctctattgccgagagtagatcgccgccgttgccgatattcatgctttgcgagcccgcgccgtccattatgaaaacaaaagtgttgttgtttgagccgctgaatgtctccacagcgaggtcgcctgtaaactgcgtatttacgccagcggcgtttgtgaacgtcaaatatgaagtgcgcctattgtcggccgtgctgcttaactttgttatgagtttcccgccgccgcttaggccgcctatggatatgtgcgaatctctcattgcgcctgctgtcgtggttggggtttcattccttcccaaatatagagtggcgtaggtgttgctgcctctgttcatttgtatgacgccgtggactgtcgcccagtcttcgtcgccgacgctcgtgccgcaaaattcaaatcttatgttgccttttgaggcgtcgagaagtatcgcagttttatagccggttggcgagtatatgcccgcgttttccccaacgttcatggaggtgtagtgctggttaatctgcgttccgccgaatgacagtccggaatctaccgcggttgtgccgtcattttttgtgggcgcaagcgttatagagccggcaatgtcgatagtcgaattttcgtagaaggacctaaaattcattatagaccaagaattgggtgtatagaggttcccgagaaaaatgtttccgttgatatttacattttgctgggcgttgaactgaaagcgctcgccgtcgattattgtggcgttctcaaaagtcatgttgtttacggcagtcaatccttccattccagaggcagttccgaaagacggagtgtctttgaatattacgtcgtcggcagctccagggccggaacttccgggagtggggctccaatttgatgggtcgttccatttaagtgaagttcccgaagtaacaaccgtattttgccaagtgtatgtttcagcattggcggatatcgcagtgatagcgagggctgttgaggccaaaaatgcttttttcattttgtaatttttcataataaagagaatttaattttttctacgcaaacgtttgaggtttttcaagcttttttaatatttacgaaaatagttttaagatgaagttatgatatatcagtataataggtaaaacttttgtcagttaataggtcgttttcttcggaggggcggaattgagagactttttagctctgacggacaacggataacgtccaaattcttttagcggcaaatgaaaactttcaaataatctgaacccttttttagatttttttagaaattcaaaatcggctggaaataaggagaattattttttttcggctcattcgattgagcctgatgccttcccaaaagacttttcgcgcaatttttccgcctaaaaacggcgcaaaaaaaatttcttacgtagaaatttcatacgcttaaaaatagttgacgaaacgcaatgaacgggaataaactaagcagttaatatttaatctctggaaattttcggcttttgccgggtttttcaaggcttaaaacaaaatttataacaggactatatgaaaagcaaaaatagcgtgattacggacggaaacgaagcggtagcttcaatagctttccgagttagcgaaacaatcgcaatataccccatcactccctcttcgccaatggcggaaaactgcgaggagtgggcggtaaaaggcaaaaagaatatttgggggacaactccgtcgataagccagctgcaaagcgaaggcggcgtcgcgggggcggtccacggcgcattgcagacgggcactctgatgactacttttacggcgtcgcagggcctgctgctgatgattcccaatatgtataagatagcgggcgaactgacaagctttgtaatgcacgtgtccgcgcgcgccgtagcaagccacggcctctcgatattcggcgaccagaccgacgttatggcatgccgccagacagggttcgcaatgctctgctccaatagcgtccaggaagcgcacgacctcgcgctcgttgcccactccgctacgctcgacagccgcgtgcctttcctgcacttcttcgacggatttagaacttcgcacgaggtaaatacctacgatatgattcccgacgaagtcgtgcgcgaaatgattgattacgacaaagtgctcgatatccgcgcccgctcgctcgatcccgacaggccgtttatccgcggcacggcccagaatcccgacgtcttcttccagtcctgggaggctcgcaattcgttctacgacaagtgcgccgacataatcgaggaaaagatggaaaagctcggcaagctaaccggcagaacttacaagccctaccaatacgaaggcgcgcccgatgccgaaaaaatcatcgtcataatgggcagcggcgccgagacagttgaggaaaccgtaaaggctctcaatgccaaaggcgaaaaactcggcgttctcaaagtgagaatgttccgcccgttcagcgtaaagaaattcgccgcagccattccgcagactgcgaaagtcatcaccgttctcgacagaacaaaggaactcggcgccatgggcgaacccctctatcaggaagtcagcgcatccatttcggaagcccgcgcgagcggattcctcccccgcagcttcgaccccgttatcctcggcggcaggtacggactcggctccaaggaatttactcccgcgatggtcaagggcgtgttcgacaacgcttcggcgcagtcgcccaagaaccatttcagcgtcggcattaacgacgacgtcacccacaattcaatatcctacgacgaatccttcaagctcgacgaaaacggcgtgatgagcgcagtgttcttcggactcggtgcggacggcactgtgggcgcgaataaaaacaccattaaaatcatcggcaacggaaccccgaactacgcgcaggcgtacttcgtgtacgactcaaagaagagcggcggcttgactgtttcgcacttgcgcttcgggccgaacccgatacgcgcgccgtacctcatcaataacgcgcagtttgttgcatgccaccagttctcgttcatgcagaagtacgatgtgctttcatgcgcggcggaaggggcggtcttcctcctcaactccatatacgacgccaataacgtatggaaccacctcaatagcgacgtccagcgcacgattatagaaaagaaactcaaattctatgtaatcgacgcctacgaagtcgcgaagaaaaccggcatgggcggaagaatcaacaccgtcatgcagacctgctatttcgcagtttccggcgtgctcccgaaagacgaggctattgaaaaaattaaggccgcgattgagaagacgtacagcaagaagggcagacaagttgtcgaaaagaactttgcggcggttgacgcatcggtcgaaaactgccataaagtggaagttcccgccgaagtgacagccgaaagcggattccctgcgacggtttccgacaaggctcccgactttgtaaaacgcgtgacggccgcaatgatgcgcgaacagggcgacaagctgccggtatccgcattccccgtagacggcacttggccgtccgctacaacccagtgggaaaaacgcaatattgcgatagaaatacccagttggaatcccgaactttgcatacagtgcaccaagtgcgccacgatatgcccacacgcggcaattcgcgcgaagttctataagaacgacgaactaaaagacgctccggaaggattcaaacatacggcattccgctccaaggacaatccggactgctcgttcacaattcaggttgcgcccgaagactgcaccggttgcggcttgtgcgcgacagtctgccccggaaagagcagaacacaagagggcgtgaaagcccttatgatggtcgcccaagaacccgtgcgcgaagtggaagaaaagaacttcgagttcttcctcaaactgccgaatcccgataggctcaagctcaccgactccgttaaggacgtccagttccgccagccgctcttcgagttctccggctcctgcgcgggctgcggcgaaacgccctatgtaaagatgctgactcagctcttcggagacaggctgtacgttgcaaatgcgaccggttgctcctcgatatacagcggcaacttgccgacaaccccgtattgcgtaaacgaattcggcagaggccccgcatgggcaaactcgctctttgaagacaacgcggaattcggcttcggatacaggatttccctcgacaagaaaaaggaaatggcttccgaaatgctcgtaaaaatggcgtccaaacttggcgacgacttcgtaaaatcaattctcgaagccgaccaatcgaccgaggcgggaatcgccgcacagcgcgagcgcgtcgcagccctcaaagagaaattggcggcagacggttcgctgatggcgaaggcgctttcggcgctctcaggggatctcataaacaagacagtatggattctcggcggcgacggctgggcgtacgacatcggatacggcggcctcgaccatattttggcgagcggcaagaacgtcaatataatggtaatggatacggaagtgtactccaataccggcgggcaaatgagcaaatcgacgcctctcggggctgtcgcgaagttcgcttccgaaggtaagtccacaccgaaaaaggacctcggaatgcttgcgatagactacggcaatgtatatgtcgcccagattgcgctcggcgcaaacgaaatgcaggcgattaaggcgatgaccgaagcaaacagctatcagggaacgtcgataatcatagcgtactgccactgcatatcgcacggatacaacctcacacttgggccggcgcagcaaaaggcggcggttgactcgggatactggccgttgtaccgctacgatccgcgcaagatagcgttgggtgaaaatccgttcaaattggattcgcgcgacccgaagattccggtttcggaatatatgaaggtcgaaaaccggtttaagatgttgcagacgtttaatccggaaagggcggcgatgttgaatgcggaagagcaggaattcatcaactcccgctgggctaagtataagtatctcgccgaacgccatttgacgaataaggcgggcgaatagctccgttaaaataaacccccgagaccgctcgcgtatgtcaatacgcgtcgcgccctcgggggtttttttatactcgctcttcatcccgccttattgcgtcaaatggtgggtgggataggtgaatattgcaaaagcaagatattatgccattaaaagaagtttctaaagactgaacaagaaaacttgtgaggtttaaactcgggggaaaatttataattaatctcatcccgccttattgcgtcaaatggtggggtaggggagtattgcgaagataaaatatattacggggcgaatagctccgttaaaatgaacccccgagaccgctcgcttatgtcaatgcgcgtcgcgccatcggaaaaataaaaaatttatactcgcgcttcatcccaccttattgcgtcaaatggtggggtatgggtgagtattgcaaaagcaagatattatgccattaaaagaagtttctaaagactgaacaagaaaacttgtgaggtttaaactcgggggaaaatttataattaatctcatcccgccttattgcgtcaaatggtggggtaggggagtattgcgaagataaaatatattacggggcgaatagctccgttaaaatgaacccccgagaccgctcgcttatgtcaatgcgcgtcgcgccatcggaaaaataaaaaatttatactcgctctttttctatattactgaattagattatcgataagggaaaattttatagaaaaataaaatctgtgaggataataccttaatagaaagaatattttttatggaattatttttattttaacaggcatttttcctctcttagtttacgtataaaatgcgttgaggataggccaaaatttcccttgaagtagtgttcttaaagtgcggcaagcaaaaaagacgcgcataaatatgcgcgcctctttttttaattctatctattagaaggaaacgccgtattgcattccaagcaccagcgcgtccggatatttgccgccgcatgggttcaatacgaactgtatgttgggctgcacaaatgcaaatctgtttatctggtatttgtaattcagttcaaacaccatttcataggaacctctttcgtagcttgtgagcttgtcggaatatttgccgtaagctacgccaaagcatataacgtcgtctgcgcgtgattcaaacggggcgttaaagagcagtccgccgctcgcaaagtaaggcatgtaggcgagattctcatacgggtcgtattggaatacgccccacaggattatcccgcgcaaatcgcggtatttctcgctttccctaacaatgtagtagggctcgtctctttttatatagcccatattatatatcatataattggcttggaaataaattgagcagttaaaaggcgacgtaacgaggggattgtcgttgtggggggcgctataccagctcgcaattatgcctgccgaaatattgcccggcgaacgtccgctgttgtcgtggtttatatcccagccgatttcatagttagtgttaactccgtcgccgtcaaaagaccagtcgagcccatgcatgctaatggagtcttggcgggcggtatttatcttgtaaacgcccgctttaaaatatctgccttcagagtcggttatctgccccattgcgccccatgttgagccggggtatgccgagagcctagtctggttaaaagctcccaccggattgccgtcaaatgcgttattttgatagagccaatatatgggctttgtcataaaattgtcgcctgcggagattctgccaaatttaatcatcatatggtaatcgccgccgtcgatgtcggaattgtacgaaagatacagagatgatagcaaaatagactggccgccgtagttttgctggacattaaatgtgttgcctatgaattcttttgtaagggaattgccgaatctccacgaccatgcgttgataaggttccaacccttgagttccggtatctgggtgagctcggcaaggtcgagaccgtatccgagatagactgccgaagtattcgtggagcttttatgatttccgcctaccggattgcccgcgaagtttccgaggtaagtaataaccggcacaaatccgcgattttcaagtttcttgcgaatgccaacccagcctcctgagaagtgcggtccgttgaaccattcgtcgaacgacaattcccagatgtacttgtcttttatgatattgtcatagtactgcgcaccgtgattgattggcatttcgctgatttcgtcgtattcaacgcctacgaagtattcgcgctgtatagccaacgaggaaacggccgccgaaaaacctaagatgaccgtaaataactttttcataattattccttgtcttctgtggtgttagtttcgcttttttctgtattgttaatggttttgccgagcgttataagagaaataaccggcgtgcataagaaacgcactggaagcctgctcgtgccaagcccgcgggttacgaaaatggtttttgggccatcgcgatattcgccttcgataagcttgtcttttgcaaaagtattggagaacaatgccccgataaacggcagttttacttgcccgccgtgggtatgcccggaaaatgcgattgaggcttcggttgggatttccctgaaaacgtccggcgtgtgcgataagaatatgaccggcgaatttttttccacgcctttgagagtctgcgaatacgagtagtcggcagagagcggatccgcaattccgctaatgtagaagcttccctttggagtatcaacctttgcgttggagttttccagaagttttatatgtgtagagtttatcatcttgcgtatttgccccgcgccgtagaggtaatcgtggttgccgaggattgcgtaaactccgaatggagcccttattttcgaaagcatagatgcgagcttatcgaggttcatggaagattggtaccacccgccgttgacaaagtctccgacaagcaagacgatatccggggagagggagtttattttgtctacgatttttttcacgcgccaatcttcaaagaaaggttttccggcgtgtatatctccgacgacagcaatttttaggttatcgaggttactgtcccatttttctattttaatcgggacttcctcgacatccaagataatgtgcggttcgataataaacgcccatatccagagacagcaagccgggataaaaagtagcaattttagaaaaatattcatctttctttttaaagataagtattaagaggcgtaaaggtattcaagcgaaaatattaaaaaaagagactggataatgtagcgcgggggataaattgataattaaatgaggcgggaaatttttttcttgcgactttttagaattatgtttgagtaaaagctttcaaatcaggagaggtggcggagtggccgatcgcgctggtttgctaaaccggtgtaggggctaatacccctaccgtgagttcgaatctcatcctctccgtgatttgaaataaatttgtgccgtgaattaagaataaatttgcggagcataagagtcaaagaggggatatagctcagttggttagagcatctgtatcacacacagggggtcttcggttcgagtccgaatatccccaccatttggcgaatgggcgaaccgcgttaaacagggcggttcgcttttttgca

SEQ ID NO: 4042 - DNA, 18967 bp, Unknown
  16S sequences of unknown bacteria
gcggctatcccctgtggacttgccgtccgcaaacggttttgacaaaccgtttgccgccagcaagtttgaagattagacataaacaaatcctccgcatggtctaagccatacggaggattaactgttttacggacacccgtctatcgtgcgggaggtttacttttcgttggctgacagcagtcggttgacagaacaaatcaacggtttgtttgcattgcgcttgatacagattcccccgcggcacggatcggcagtatggacaaattcacagatttgaattataatgaattcaacgcaaagttgagagcagttcgtttttaagtcgcttcttatctttcaggtcatgtgctacaatgtagttacggtaccgatatattctgtttgggaggtcatattatgtcatcaatgggacaaattatcaaagatctgcgtaagaaaaacggatttacgcaggaagagcttgccgagcggctcggcgttacctatcaagccgtttcaaaatgggagaacggcacggggatgccggacatttcgcaggtcgttccgcttgcatcgatattcaaagtaagtacagacgtgctgttcggtattgcagacacgacggagaacgaagaggcacggaaaattgttcagcatgccgacagaataaagaaatacggtgaagcggaaacatatctaaaagcttatgatattttgcttgacggactgaagaaataccccgacaatccgatcatcatgatcaactgcatgaatctcggagtttcgctttcttcgccggaaaacggatgggtttacgccgaagaacgggcaaaagaaatcgtatccgaaacaattcgccaagcgaatttcattacggcaaattcgaaaaatatcaccgatattctatctgcgcgtcaggtcttggtttttctttactgtaaccgggaaaaatttgatttggcgtcaaacgaagcaggaaactttccgccccgcgccgatttgaccatgtattcagctatggcagccgtcagtgaatgcatggcggatcacaaaaaagcggcagcgtatctgtgcagcaatatcgactatacgctgcaggcttttgaaaatgatacggcacggctcggaaaggcatattgcagcgacggtaaatatgaggatgccgttaccgtatacgaaacatttttcgaagtaatgcgtgtaatatttaaggatgaaattccgccttcgtatcatgactttgattcgggagactgttatctgctattggcagaggcgtatattgcggcaggcaaaacatcgaaagcaatggacgccgtggaaaaatccgttatgtattatattgatctttacaatacatatacggaagaaaatattttacagcgcagccatataaaatcgcctgtcgtaagggaaaccgaattggtcacatcgttgccgaagaaaatcataaagcagaaattgctttacaagttatctgcaccgggaattcaagccctgaaccgtgaagcgcgattccttgaattgtcggagacggtgaacaacctgtcatgataatcccgcaatcacaaaatccgatacatggattcatttgcgggtacggcgcagcgagtctgaaagaactcggtcatttacagcgcatctaaatcaacctgtcaagtcaaagctcccgcgcagtgtgaaagatcgtccgatctcacgcgatacgcgggagctttttatttctcttatccgatgtgcttcagagtctgcgcggcaagttctgagaccgacacctcctccacgccgaaaacggaggtgcgaaccgtgttgttgatcggcttcgtccagctttcgtctatgcagccgatccccttcgccattccgacgacggagccgacggtcgcaccgttgcagtcggtgtcgaatcccgtttccgcagccatgcataccgacttcgaaaaatcgccgcccccgtagaggatggccgccgccacgatcattgcgttcggcacggtgtggcaccatccgtgctccgtgtgctcgtcgtagcgtcggtgaatatcggcaaagcattgcgcggcgggaacgccgtttcggtatccgttcagcacgtcggtgacggcttcgtgcaggcgcgacgtgtacggtatctgcgcaagtccgcacgaaacgaccgcctcgaaatcgtcggtgcaggcggcagccgcgagcatcgcggcgacgaacatttcgccgtatatcccgttcttcacgtgcgaaatgcacgcatcgcggtgtgccatctcggcggcaagctcgggatttcccggattgatatagccgaagtaatccccgcgtatctgcgcgccgatccactcgcggtacggattcttgtaaactgcgctctcgggcggctcgtacccgtttacgaaattgcggtaagcgacacgctccgcggtgcagcaggagtacctgccgataagcgtcatccagtccctcgaaacgtcgtatgacgtgaagtctcttccgtgcctgtcgacgatccgctgcgcaagcaccgtgtaatttacgtcgtcgtcgatcggcattccgtcgataacgtccgccatgcagaattccgctataccgaatcggtacttcttcatgatctccgcgtcggcatcgcgcttcatgatatagcggtgcatcggatagttaccgcaatccttcagaaacgggatcagctcgtcggtcctgaccccctcgatcggcttgccgagcaggcatccgcagattctgccggtccacgcaccgaggattttcccttcaagcgcggacttgtccggcggcgacagcgccggagcactgcggcgcagtctccgtatcccatcgagatcggacggctcggtgtacgggtagccctccgcagttttcgcgttgaggacgatatcgaaaataacgtcggcgatccgcgctttggcatcgttccccggcaaaagagagaccgcgcggaaaagctccccgtattccttcaggtcaagcccctcatatatgcactgctcgtactcgatgggaaggtcggcgcagtatatctcccacttggacattttttcgtatttcgggcggatctttcttccgaaattaatgtcgtcggcgaagcgttcgtccctgccgaggatcagcgcatcaagcgaaatcccgaaatgctttgcgatccggatcagcttgtcgagctcgggaacacacgccccgctctcccatttctgaacggactgccgcgagaccccgagcacctcggcaaagcgctcctgcgacatatttccgtccgtgcgtaatttgttcagcgtattttcaagcgacacggcattgtcctcccgaaaagatttacgcttttattataactcccgccgccctggctttcaagaaaggaaatcatactttttcggcaaccgtgagttgcagcggcggtgaaggcggcgcaaagcggaaatcggcggcgcttttctcccccgcgatgccgaaagcgcggggacaggacgtcaattgttcggattatgcgtgcgccgcgttatgcgtaactaaatattttgtccgcattttcacaatttattaccgaatttcatatatatgttgaaaaaattgttgtgaccgcgattcggatatggtataatagacacggtattacattattctgtagctgcacgctcacttaccgtgtccgcgagaaatgggcagtgcccatttctccgacgtgatgccgagaccgacacacggtattacattattctgtagctgcacgctcacttaccgtgtccgcgagaaatgggcagtgcccatttctccgacgtgatgccgaacttcgattttactgcgtaatcctttgcggcatactccgcaccgcgctttgcgcgcacataaccgcaccgcaatatccccctccgtgccgaacggcacacacagcgcattccgcccccggcggcacgttccgccgcatactgcgtatagcgcatttcgcacaccgcgccgtccgcacctcataccccatcgcatcgcgcataccgcacaccggcaaaattctcgcacatgcgcataaataaaccgaggcacgctcatgcatgccccggtttttcattttattatgcggttactcctcgatgccctcgtacatggcgtcgatcctgtcggtgtactccttccacacctgggacagcgcggcgaaatcctcgtcggtgaacgtcatgctcgggaaaggcgatacgccgtagatatccggcacaccgtattcactctgctcgagcatgcagcgcatcgtgtcgcgcttggtgttgtatccgccgttgtccgtgtcgatgatcgaatcgggcgtggcgatcttgtacatcttcgcgcggaacataagatcctcgcggcagaagcggttctttccgtcgtagtcgtgaaggcgcgcctgatccacgagatgcgcgaagtacggatggcacgccgatgcgttgatgatcgcgtgaggcttgatcttctttgcaacggtgtaaatgtgctccatatagtcgtagagaagctcaacgccgtacttgccggaataagtcttgaacttgcgtccgatgggattcatgaacgcatagtcgatcttgattccgtcgcagtcgtagcatccctcgtcggaggagaagatgcggtagagcgcgtcgtcgagaaccttcaggaacgcggggctcgagggatcgatcttctttgcgggaggatcgagcttgccgccgcccatgtcagccgtcacgcatgcatcgtcggaaagtccttcgggatcgaacaccttgaaccaaagcatcgtgtgaacgccgttctcatgctgctcgtcaacaaacgcgcgcagatcgggccacttctcgggatcggcggcgtcaacggcatattcggactgccacttgtcgtcgatgatgaggcagcgcgggtaaagtccgcccgcgtggagcctgtcgagatagtccctgtacactctctcgcaggagcgtccgagcgcgccgccgggaacgtcggcgcgtgcgaactgctcgatccatccgcatgccatcggaccgtaccagaacttcggagggatctccttctttctggggcgggcgataccgcttgtgtagtagtacttcgaatacttctcgcatacgtcgtactcatcctccgcaccgaagccgatgatgaagggcgcggtccattcgccgtcaacctcggtgtgaccgtgctgatcggtggagaaccaaattccgccgtggctgttgaaatcgaagctctggaagttgtgttcgcccttttcggctacaaggccgataccgagctgacgcttcagcccctcggtgcggaatgcgtagcagaacatcggaggaaccatgagaaccgaccagcggtggcatccgagcatcgctctgaagtggtaatcctcttcgttgaagagcgagagacagggggtgaatccgtcctgaaactcatatccgctcagtctgttgccgtcggcggagcatccgctgaaatacagaaccccgtcaaccttgcccttgccctttacggtgacgctgtatttgaagcgaagcggatcgcagacgagcgtgtagatcttttcttcccagagattgctcttcgacgtccatctgaaggtgacggtgtgaccgtcctccttcaccgactcgagaacgggaaggcaggtgtccgcatcgtccgcggtctcgtaattttcgtcgagagtatcgacgccggtcgcaatgtcgagttcggcgaccgtgcatccgtcgagaatgacgcccgcgcggcttccgtcgatctcgagagagtatttcgcgcccttgtaagtgtacataattttcccctttcggtgcgggcggaggaaggtgcgccgtcctcggggactcgcgccgcatccgcccgatgttaatcaaagtcaggctcattttaacatattgcacggtctcttgcaagcaccttcggaaaaataatgttcaaaaaagaaaaacgcggaaagatccgtgtttttcggcagtttgatcggttttgttttcgggcatcgatccgaatttccgatattattccggtcccgtccgaccgacggcgctccgattatttcagatcggggatcgcggcgaagaactcccgcagtctccaaagctgcgacggcttgtcgtccctgagccacgcgcgcgaatacctctccgaccatgaagaaatgatcccgcgaagctcttccctgtcgcagtatccctccgcgccgcgcagataaagcgatatccggttcagtatttcgatcccctcggcggaaaggataagatcgccgataaccgtgtcccccttccgtccgagcgcctcgaggcggcgtatctccccgcggcagatttcgatcgcgtttaccgcgtcggcgtcggtcttttcgttttcgtaggtgaactcctcggtctcgcccatgcggaaattcttgttgtaccacgtcacgagatgcgcccacgtcgagatgctctcggcgcggcagagcgcaagaatcgtctccgtcatgtcgaattcgacgaccccgtaaagcctctccgatacaaggcgcgtgaaatcgccgcccgtttcggcatccgtgttccagctcttctgcgctccgtacagcgcaccgtacagattcgagttgaacgggcatatgtgtccgaaatctccccaattcgtgttgaggattccgagaacgccgttcttcttcgcgtgtgcggcaaagcttgcgatgttgccgatcccctcgtccgcattctcgatgaagcggctccacgaggacgtgccggggcagaagatgctccgatatcccatgtcgttgaacacccagccgagccaatcgggcacgaccttgtgatagcaccagttgagcacgatcacgtccgagggagagatgttctccttcacaagctccgcgtgagccatgcagacgtctccccagagcattgcggtcttgccgtgcgcgcggagcgcggagataagcttcgtcgcatggtgaacgaacgcttctcccgtatcgcgtcccgcattccttcccttgcagaggtcgagcgtctcgtcgcagcagatgttgaaatacttcgatctgaacagcggaatgtactgctcgatcatgcttatcacgacctcggcggattccggattgtacgggtctatcgtgtgatgccactgcttctccatccaataaacgcgcttcggctcgaagttttcaagctcgcacaggtgcttgtatttgtcgctctgaaggagcgtgtacatatgaccgaacgtggagaggctcggcacaagatcgataaagtgctcatagcagtaatcgtcgagcgcgagcatctcggcgggggtgagcgcctcatcctcggtgacgatgccctcaagctccttgaacatgaacgcatcctcaacgtaaagctggagcatgtttatcttgtagtacgaaagcatatcgacaatcgcgaaaagcttcgacaggcggttcacccgccctctcgttatatcctgatagaatccgcggaaaggaaaatcgggcttgtcgaagatgcggcatacgggaacatccccgtcgcagaccagctgacggagcgactgaatgccccaatacgcgcccgccgcgccgccgctctccacggttatcctgtcctccgtgacctcgagagtgcagctctcgcattcgggatcgtcccccgcgcaaacgacgatgcagtgtcccttctccgcgccgacgcgaaacggcacaagctcgcccgtcttcccgccgatctccgagcacaggatctgcacggcgcgcgaaaggcgctgatccttcgccttcaagtataccgacacacccttcagggagaacgagccatctccctcgaccgccatgtacggcgtaggtataatacgaatcatatttttcctccgaaaatcactctgccgcaaaaggcggagcggcggcttcgggcgttcccgcggggcgatgatgccgcgtatcgcgccccgtctacggcatcgcgcggcaaatccccgaaatccgtcatatccccgccgcatgacgtgcggctgtgaagtaagtatatcatattttcggatttctgtaaagcgccccggcaaaggaaaacgcgcccgccgccgaaagccggcggataacggaccacccgaaaagccgcggcgcaccgaaagaaggagtgccgcgactgccgtgcatataaggaaagcatgaagcgcagtttccgcgcaccgctctttcgcatccgggaggttcaccgtcgaaatccgccgcactgcccacacctcacgaaaactcaccgccgaaaacaacccgcccgatcttgcacatccttaaagtacggcagcaaaatccgccatgccgcctccaccttcgcacgtctctcccatgacttccgccgtgccccattctccgctgttctgtattctttgccaccgtccccgtaacattcctcacagccgcactgcattctttgcagccgtccccgtatcattcctcacagccgcatcccccttcttcgcagcagctctgcctctccccccacgtgatcgccgccccgcacccttgcccgcattctttgcccccgcgaccgccgcctaatcacccgcgcctcacctccgccgcgcaccctccgcacaaaaaatgcggttttggtattgacaaatccggcgcagtgcggtataattgcttcaaaattgaacctttcaaatttgaacattccgcgaggtgtaagccgttgaatccgagtatagaattttcaagaaagctcggcgccgcatacgatgcgtcgtgcaagccgctgtgccgcgagctcgggataccgcagacagcgctcgatatccttctgtttctcgcaaacaatccgtcgtacagaacggcggcgcagatcgtgagcatccgaaagctcaaggcgaacctcgtctcggtcaacgtgaacaggcttgtcggcgacggatatctcgagcggcgagcagtcgaaggggatcggcggcagacggagctcgtcccgaccgaagcggcacagccgatcatcaggcgcgggcgtgagattcaggagcgctttttccgcgagcttctcgacgggatgtccgaggaacgaaaagcgcagtttcacgaaacggttgaaatcatggaaggaaatctcgacaggattctcggggaggaatgagcggtatgaatatcttaattacggtcgctgtcacgttttttgcggggatgggcgccgggctcggcacgggctttgccggaatgagcgcggcggcggtcatcagtccgatgctgataaccttcctcggaatcgagccgtacacggcggtcgggatagcacttgcctccgacgtgctcgcaagcgcggtttcggcatacacctacggcaaaagcaagaatctcgacataaagaacggccttatcatgatggcgagcgtgctcgcgtttacggttctcggaagctttgtcgcaagccttcttccgtctgccgcgatgggtaatttctcggttttcatgacgtttcttctcggaatcaaattcatagtgcgccccgtcatgacgacgaaggaggcgatgatgagcgtcgctccgcgaaagcgcgccgtccggtcggcggtctgcgggaccgtgatcggactgatctgcggcttcgtcggtgccggcggcggcatgatgatgcttctgatcctgacctcggtgctcgggtacgagctgaaaaccgccgtcggaacaagcgtgttcatcatgaccttcactgccctcacgggcgcgatctcccactttgcgatcggcgacacacccgatataacggtgcttgtcctgtgcatcgtgtttacgttcatatgggcaaggatcgccgccgtattcgcaaaccgcgcggagccgaaaacgcttaaccgcgccaccggagttgtcctcgtgattctcggcgcggcgatattcctgttttcgctcataaagtgaccgcacgcttcgcgcgatcgcgccgatcgggcgaaatcacaaaaaataacatcagccgcccggatgaactgtccgcacggctgccgaaatacagaaagggaggagcgcaaggctcctccctttttcactcagtaccggctcaccgacgcttcggctgccgcgtcgatgaagtcatgatcgtcatgcatgattatcacgcgaaaggagggaacggacgagtaccgaaactccgacacccattcgtgaaccgtctcaactccgcccctctcgcgggtcccgacatattcgaaatccgcgatgctgccgagatcggacaccggaacgcggtcaaactcaccgcagaaaagatcgccgatcttcacataggcgatgccgagacacggatcgtcgtgccccggaactgcgaaatactccggcacgggatcggtcccgccacgctcccaaaaacacattttcatgctcccgatcgaatacagatattcgccgtacccgttttcaaaggaatacgaagcgcgcccctcgggagtgtgcgctttaatcaccttgccgcgcttcgccgcagtttcggaatacggcaagcccatgtcggagaacagatcgccgttcagcgtgagatcaaccgacgctctccccgcgtcggccgagccgtgagcgcttttgtcacgccccgccgcggtgtccgcagtcgtctccgcgcgcgccggatcgggcgtgagcgacgcgtccgcctcacttccgccgcttctgccgcatcccgccagcgcaaggataagcgccaatgataccgcaaaaaatattttcttcatatccgttgtcctttcgtaagctgtcgggaacggagaaattccgcgccgtctgcggcggtcccgattccctttcacctataaagacgcgatttttcgccgaaggttgcaagaatacggaaatttgtaaaataaattttcgcaaatcggcgcagatcacgaatccgccgcagccccgaccgccgaagcgcatcgccgcacccgcgcggctcggaaaggctcaccgcgcccgagcacacctcgcgccgcataactccaaagacaaagaaagagaggaaagccggaggctttcctctctcttccgatccccgtcgcgccgcacactcaccgccggacggttatcgttgcattttcacatccttacagggttccggtaaccgtaagacgtgtgacgccgggcgtcaccgtccacgcgccggtcgccgtatcccgtacaaaggttgccgcaggcaccgtgataacgccgggaaccgtgacgaaagtccccgtcgcctgatcgtaggtgtagccttccgtcaccgccagcgccgtctcgttcagactgacgctgatatccgaaaggatcggattgaaagtatccctgaccgacacttcatcctccgccgtcgccgcgccgctgccgtagttctgaattataaaggtgtacgtcaccgtgccgttttcggtcacggacacgggatcgatgctcttcgtgatggtgagcgcgccggaggcgtccggtgtgacggtcgccgacgccgtggacggagccgtgatgccggatgccgtaaccgcagcggtatttacaatgctgtcatccgcgccgaggggcgcaaactgattcactctcgcttcgtagatcagcatcagattgcccgatgcgggcaccgtcagccccgaaaaaacgatcggcggtccctcaacgaccgtaggtgatgatgtctggaggacaccgttcacataaaccctgaccgatccgtcgacatatgccagagggtaaagtgttccgctgccgaaggtgtatcctccgagatcgtccgtaatgctcacacccgtaagcggagtactgcccgagttgaccgcgcttataacataggtcacatccccgccgcggacgtaattttccgtaaccgccgttttgcttaccgaaagaacttccacgatctcgccgaccgcaatatttgaattcacaacagctccgttgtacgaaagctgtgcctgattcgtaaaccgcgccatacttttctccttttaaaacaacaccgcacaccgccgcaccgtcaatccgacagtctgcatctccgccttgcggagacggatgtcggcagccgggcggtatattattatttccgaggggcaaacccctcgctgaattatatgagaaaagaaaggcaaacgtgcggggcgcaaagccgcggcgcgggacggatcgttcttccgctgatccggcgcgatacacggggcgcaaaacgccgggggaacgggtcccgccgcctccgatagccgagccttttgcgcacctccgcctgcgcgcgtcccatccgcgcacgtatcgtaatcccgcaatccgcacgaaaatccgaaaaatacgcggaaatcccgcacgcggcagggtctttcggcgttccccgcccgaattccgttgttaaaacaacgtaattcgaaattcaatcgtcaaaaaacctttacgccacgccgagaagcatcctgccgaaaggccttccgtgccgctgcgtatctcgggcagcgcacgccgcgacgcatccggtccccgatatctcccgcaatccgcacttttgaacgaaaaatttatatttttcaaatattttgtgatttatgaacttgacaaatattttttcataagatagaatataattgtaaaaaacttcggaggtaaccaacatgagtattttttgcggaaattgcggcgctgagcttcccgatgacgctcagttctgcaccaactgcggacattccgttccggcgaaaagcgcagagagcgaaggcgcggagactgtaaatgccgccgtagaaaccgacgctgcagcggagccgactgccgctgcacccgcttccccgaccgacagcgcctctcagcctgcagcggcaccgtcctctgccgaaactgctgcggcaccgtcctctgccgaaactgcaccggttcagaacaacaagaacctcatcccgataatcatcggcggtgctgcggcagccgttctcctgatcgtccttatcgtttccatctccctcggcggcggatacaaaaaggcgattaacaactactttgacgttatgttcagaggaaaagccgacaagatcgaaaagctctgcccgcccaagtattgggactggtacgaggatgagtacaacgaggagcttgacgacataaaggacgagtacaaggacaactgggaggatatgctcgaaaaattcgaggacgagtacggcaaaaactttaaggctacatacaagatcaccgataagaaggagctttccgacaagaagctcaagaccatccaggacaatctcaaggagagatacgacatcgcaaagaagagcgtcaaaaaggcttacaagcttgacctcgatgttgagctcaagggcaaggacgacgaggattccaacgagcttaccgtttatgccgtaaagatcggcggaaattggtatctctgcaacgaagacggttatttcctgagcgccggttattgatctgcggagtctgatgcggtcggatttatccggcggaaagtctcaaacaaacgaaaagcgaaaaaggaggatctcacgatcctcctttttgttgtgctttcgcctcgatctgccgtgcgggcgatttccgcgccgcgcgaaaacgatcagtcgaatattatgagagccatgaaaacgacaggctcgtcgccgagacatttgagtccgtgtccgtgaccgtcgggagtaaacgtcatgtctccggcggacaccgtgcgcttcacgccgtcgtcatcgtattcgcccttgccggaaatgatgtagtaagtctcgctctctccgtgatgctcgtgaaatccgagagaagagccgggctctatcgtcacctcggcataaagtccgcatttgccgttgagctgcttctcaccgagaatgtgctttatcttgacctcgccgtctccgccgcacatgttctttacaacttcacattccatgataattttcctccgttttttaagtagggggcggaaaagtcccctctgctgcgtattttagcacaaacgcacacggtattcaagcactttaacgaaaaaaacggaggaacgcggggacggacgaggggacggggggcgggggacggacgcaggacctttttgaaaaaaggtcccgcacccccaaaaacttttgaactgaaagtattttgagtgagtcgttctctcggaagacaaactgtaaaattccgctgcgctttacaggcacaggttttacgtcggagaaatgggcaatgcccatttctcgcggacacggtaagtgaatgtacaattacagctttacgctataccgtgctcaacttcagcttcacgttggagtttgacgcactgcgtcaaactcgcggacacggtaagtgaatgtacagctatagatttatgtaatccgtgtccttttgcctgcgggggcatccccgcccggggtgcaggggacggagtccccgcttgggtttgggacaaagtcccaacatgtaataatccctgcatggcattctccgaatgccatgccaattttgcggacgtacagctatagattcatgtaataccgtatccttcctcccgcgcgtccgtcccgtcagcctcggcttcacgttggagaatgacgcactgcgtcattctcgcggacacggtaagataacgtgcagttacaacttcatgtaatccgtgtccttttcagccggatatgccccgtttttccgcaaaacaaaaatgtttacacaaaaaacgaaagattttgacatattttcttctatcttattatttacattgcggaaaaaagagagtataatattatctgagtgtcggcgcagtgcgccgcaccgtaaacaggttcagttcaatcatttatatatggaggaaacacaatggcaagaaaaaagatttccatggacggaaatacagccgccgcgcacgtcagctatgcgttcacggaggttgccgcgatctacccgatcacgccgtcctctccgatggccgaagtcaccgacacatggtcggcgaccgataagaacatcttcggtcagagcgcgagaaacatcttcggcgaccgcgtaaaggtcatggagatgcagtccgaggcaggtgccgcaggcgccgttcacggttctctcgctgcaggcgcactcaccacgacctacaccgcatctcagggactccttctcatgatcccgaacatgtacaagatcgccggtgagctccttccgaacgtaattcacgtttcggcacgctgcgtagcttcccacgcgctcaacatcttcggcgaccactccgacgtatatgcatgccgtcagaccggatatgcaatgctcgcagagaccaatccccaggaagtaatggacctcggcgctgtcgctcacctctccaccattgagggccgcgttccgttcatcaacttcttcgacggcttccgtacctctcacgagattcagaagatcgaagcatgggattacgaagacctgcgcgaaatggtcaacatggacgcagtcaacgcattccgcgcacgcgcgctcaatcccgagcatcccgttctccgcggctccgccgaaaacggcgatatcttcttccagcacagagaggcttgcaaccgttactacgatgctctccccgagatcgttgagaagtacatgggcaaggtcaacgaaaagctcggcacgaattacgacctcttcaactactacggcgctccggatgcagaccgcgttctcatcgcaatgggctccgtctgcgacgttgcagaggaagttatcgactacatgaacgcatccggcgagaaggtcggtctcatcaaggtccgcctgtaccgtccgttcgttgcgaagaagcttgttgaagctatccccgcaagcgtaaagaagatcgcagtactcgaccgcaccaaggagcccggcgctctcggcgagccgctttacctcgacgttgtgaccgctctcgcatcctgcggagtttccggcatcaaggtcatcggcggacgctacggtctcggctccaaggataccccgccgtcatcaatattcgcggcattcgagaacctcgcagccgacgagcccaaggatcacttcaccctcggaatcgtcgatgacgttaccgggctttccctccccgagaaggactgccccgataccgctcccgcaggaacgatcgcatgcaaattctggggtctcggcggcgacggaaccgtcggcgcaaacaagaactccatcaagatcatcggcgaccacaccgacaagtacatacaggcttacttccagtatgactccaaaaagaccggcggcgtgaccatctctcacctgcgcttcggcgacgctccgatcaagagcccgtactacatcaccaaggcaaacttcgtcgcatgccacaacccgtcctacatcctgaagggatacaagatcgtcaacgacgtaaagccgggcggcacgttccttctcgactgccagtggtccgccgacgagcttgaccgccacctccccgcatcggtcaagtcctacattgcaaacaacgatgtaaacttctacatcatcaacgctacctcgatcgcaaagaacgacgtcggcaacatgaaggtaaagaacaccgtccttcagtccgcattcttcgctcttgcgaacattcttcccatcgacgaggcgatcggctacatgaagaaggccgctaccaagtcctactccaagttcggcgacgatgtcgttgctcagaaccacaaggctatcgagctcggcgcgaacgcattcgtcaaggttgacgttcccgcagattggaagaacgcgggcgaaactcccgcagaggctcccgcagagggcaagcgcgcggatctcgtcgatttcgtaaacaagatcgtccgccccgtatccaagatggacggcgactccctccccgtcagcgcattcgagaacatggcagacggtacctatccgcagggcgcggcagcttacgagaagcgcggcgttgcggtattcgttcccgtatggcatgcagaaaactgcatccagtgcaaccagtgcgcatttgtatgtccgcatgcgaccatccgtccgttcgcaatgaacgcggaggaggctgcggcagctcccgcacagaccaagttcaccgcaaagatgatcggcaagggctgcgaggatctcaagttcaccatggctatcagcccgctggactgcatgggatgcacgctctgcgtcaaggcttgcccgaccaagcccgagaagagagctatcgagatggtcgctcaggaaacccagctcgatcagcaggaggtgttcgattacgccgttgcaaacgtatccgagaagaagctcccgtttgcggacagcaccgtaaagggaagccagttcaagcagccgctgcttgagttctccggctcctgcgcaggatgcgccgagacctcttacgcacgccttatcactcagctcttcggcgagcgcatgtacatctccaacgctaccggatgctcctccatctggggcggaagcgcaccggcaactccttacaccgtaaaccgcgagagcggacgcggtccggcttgggcaaactccctcttcgaggataacgcagagcacggactcggaatcgcactcggtcagaagaccctgcgcgagagatacatccagaaggtacgcgacctcctcgttcgctacaaggagatgaacgtgaccgcagagtggaccggctgcctcgaaggctacctcgacaccctcgacgatgcagaggcaaacgccgctgcggttgagcatatgtgctcgatgctcgcagaggacgttgcacgcggaacctgcgagaccgttcccgcagagagagagatcctcgaaggcaaggattacctcgcaaagaagtcgatctggatcttcggcggcgacggctgggcttacgatatcggcttcggcggactcgatcacgttctcgcatccggtgaggatgtcaacgtgatggtatttgataccgaggtttactccaacaccggcggacaggcttccaaggcttccaacatcggtcaggtcgcacagtttgcggcagcaggtaaggcgatcggcaagaagagcctttccgagatcgcaatgtcctacggctacgtctacgttgcacagatcgcaatgggcgcagacatggcgcagacgctcaaggcgatcaaggaggcagaggcttaccacggtccgtctctcatcatcggctacgctccctgcgagatgcacggcatcaagaagggcggaatgcagaactgccagctcgagatgaagaaggctgtcgaggcaggatattggaacatgttcagattcaatcccgctgccgagggcgctaagctcacgatcgactccaaggctcccaccggagactaccaggcattcatcaccaacgaggcacgctacagccgccttgctcagtccttcccggagagatccaaggagctcttcgcaaaggcagaggaagcagccaaggagcgctacgaaagactcgtcaagatggcggagctttacaaagactaaaccgcataagataaaaagggactttcccgtgtgccgacagacggtaatttgaagaaattacaaaatcggctgccgtaaaacgggatcggaccgcaagcagacagcatccggcttcggttggatgctgtctgcttttgtgcgtttaaggggcgaaaagacttgcctgtgtgatctgcacggcaaagaccgcgaaacgggtgaagttgttatcgctttcgtgcggttattttgtaaaacagcgaatcgctggggagtgaataccgttcgctggggagtgcgtatatttgcggtcaagcaaaatacccctcaaaaccgtaaagtcgatagataggtatttcgatgcagagtatgattgacaccgggaaagcaggaaatcggcttgtattcgcagaaaagctgcattttagggcgataacttccgagtattctattgaaaacagagctatccttgtgatacaatgtgtgtatacaccagcaggtaggaaacacagcaaatgaaaaggagcagccaagtgacaatacaacataaaaacctaacaatccgccaagccgaggctgccgacgcaaagcagcttgccgcttggtggaatgatggtgctgtgatggcacacgcaggctttc

SEQ ID NO: 4043 - DNA, 3582 bp, Unknown
  16S sequences of unknown bacteria
gtgcgcagcgccggaacactgggccgcctacggcggcacagtgcgaagacaagcgaccgggtaatcctcgttgacaaaccaaaggtttgtcaacgatcagggctcccctgcgtaaggggagctgtcggcgttagccgactgaggggtcgttctactacgctatcagcaaagctgaccgatgggttagaaacttaaaaatcataagattgcgctatttaaaaataaaatcttgcaatttcgaataaaatatcagctttgtcaatgctctgagggctgtgaaagcacaacaaaagttttttcacaggcccctcctttcttttggttccgaaacctgttgcggttctacgttccaacgtcagccaatgcgccatctttgagaacgatttgccgcgtgcaatggtcggccaccaggggattgtgcgtggccaccagcaacgtcgtgccgcttttctggatggcttgcaaaagctgcataatatgcagcgctgtttccgtgtccaattgtcccgtcggctcatcggccagcaggatatcgtgccgcttggccatggcgcgcgcaattgccacccgctggcgctcgccgccggaaaggtgcgaaacccgttccttggccagatgcgcaagcccgacctgctccagcgcctccagcgccatttttttgccctgcgcataggaaatctctggatcgaacaaaaatggcatggctgtgttttccagggcgttgcggtcttccaccagcccgaaatcctgaaaaatgaatccgatcgtttggttgcggatgcgcgcttttttccgctcggatagcgcggcggtgtttacgccatggatgcggcattcgccggaagtgggcgcaaggatctggccgatgattttgagcaacgtcgtttttccgctgcccgatgcgcccatcagcgcgcacgcttcgccttccgcaatgcagaggtgaatgtcgtgcagcgcggttcgcgcccagcgctgccccgggtgatacactttggaaatgcccttcaactctatgggatacatggtctttctcctccgttcaggatttcggccggagcggccgcagcgttttgatcaacagggggaataccaacgccgctgccatccataaggtaaccagggtgatgggaatgtgcgtataggggatggtggtgtccgcatacaggagaaaaatcgcgcattgcgccgccaacaaaagaagcgtgacgggaatgccataggcgcatagcatgacggcgcgccattgcccgggtgcaatccccagcaggcggtatacgctcgcctgattttccagcttctctgccatattcgccataaagccccgcaggcctaccagcagcagcgccagcgaaagcaaggcgaccaggccaaacaccgcatctggccccgtgaaattcaaagcgagttcttgcgcgcgcatttggcgcagcgtgatgacgtcccctatgccatgccgcagcaggcacgcttgccaatccgcgatggcgtcttccacccgttcgccctctggcggaaagagcaggaacttactgtaggtgtattcatccgcgtccaggcccaattccgggcagctcacgcacagggcaatgcaatcgccgctggtatcccgggaaaaaatataatcgataaacgcacggctgccagattgcccgctatagggaagttcgtaatcgctcgcaaggtatcccgcaacgatcgccgggaagctgcgttcatttccccgaattttgagctccaacacatcgccgatggcataggtcgcgcggaggcgctcatcgagcatcaggggaatataggacgcataatccgcgcgctcgcgatgttccagcaaggcgcgggaaacatcgccgggcaaatccaggttgcgcagtagcgtttcattgcacacatagagccgaacccgttcgtttgcccctaagtccgcaaaaccggagtggcacagcgcccgctgggcaaggccatcgatgatttgccgggcttccagataatccggaaaatcgcggctgaaattccagttgcccgaccaacgctcgtgaaaatgcaggttcgcctggaaaaaagccgcgttttccaaaccagcgcccatgtatctcgcatattgcaccagtttggtcagcggcggcacacaggtgaactgtacgcataacgctgtgatggcaatgaggcacagcaaaaggccgtattgcagccccatagcgcgccaggcatagcgcaaaagccgcaaccgttttcgcacgaattctcacctctcttcccgggcgcatttgtgcacgccagcatggatgcccacagccaggagcgcggcggcaaagccggtgtaggccaggagcacagccagggaaatgcgcgcgtcgattgcccgctcgtagtccagcatcgtgtaagccatgtcagagggcacagccgccaatagatttcccaccaaaagcagcaacaaaaattgcaaaaagaattcgcgccaaacgcgcgcatgggtggcgccggcacagagctctgtccagatcaattgccggcgggccacgcacagcgatcttgcctggatggcaaccagacacaggcacagcgcaatgaaaggcacgcacaccgcggcgagcatgctgccccagcccgccagaggggagggaggggagagcggcgcgattgcttcctgcgcgtatgggttaaacaggctggcgattgcagcatgcgtttgcgcgctgggcgggcgatagaggcggagcgttacggattggatgggatagccgcaggcgagataattgcgcagggggatgaaaacgccatttcggatttctagctctgccatattatagagaatcatgtccaccacaccggcaactgtgtaagaattttcgcggattcgcacagaggcgtacggaaaatccaggcttgcgctatcgccccagaagtcggagcccatccaggcatagaattcatctgtcaaaatgaaatcttcttccacgttctgttgataccagaattcatccacaaatgcgttggtgcccaccaacagccaggaatcttccccgggcgggttcgcaaagacctggacgacgtcgttttcattggcaagttccaaaaagccgttgagagcggcggcgaggtccgcgggctgcgcatcctcccgaatggcgaaagtataaatgttcgtgttggcaaaatcggccacttcagagtgcgcggcaatgaccttggccgccgtcagaaccacaaagcccagcgcggtaaaggtgaggatctgggagaccaggtagcgtttgcggtacaggaagaggctttttaggttcagcaagatggaatagaacatatcctctcctcccttttgtcctgataagaaaattatatcatataaagcggcgttaagaaatatcgaatcctctcaaatttgttcggttaaaaaggaaaaaatctcccaagcaaagggaacttttcgcgctacgcatacatctaaaaaggcgttggcagaatttgccattgccgcagactgtcaaaaaactcaagggagagcgcgagagaagggcgaagccctttcgcacttcaatcgtccccggcggcgtgtacggcggggacggggcgattttt

SEQ ID NO: 4044 - DNA, 32759 bp, Unknown
  16S sequences of unknown bacteria
tttcttctcccattctactcttgcttctccctttattcagttttcagggtatatgcaccattagctcagttggtagagcacctgactcttaatcagggtgtcccgggttcgagtccctgatggtgcaccagaagctgaccaagagccacaactcttggtttttgtggcccgttggtcaagcggttaagacagcggcctctcacgccgttaacgtgggttcgattcccgcacgggtcaccaaaatattcctccttagctcagttggtagagcatgcggctgttaaccgcagggtcgttggttcgagtccaacagggggagccagataaaagcacttagcgtattgctgagtgctttttattttttatatggttcaaaatcatttgtttttttcgaaaaatgagctatactataagaatgtaaggtcgccttagagcgaaattgattttaatggacataggaggtatttctatggcaaaccagtatacaggcaccaaaaccgagaaaaatctgcaagaggccttctccggcgagtcgcaggcgagaaataagtacacctattttgcatctgtcgcgaaaaaagagggctacgagcagatagctgcactcttcctgaagacagccgataacgaaaaagaacacgcaaaaatgtggttcaaggagctcatgggcatcggcgatacgaaagcaaatctcggggccgctgcggacggcgaaaactacgagtggactgatatgtatgaaggttttgcaaaaaccgccgaagaggaaggtttcccggagcttgccacaaaattcagaatggtcggcgagatcgaaaagcaccacgaagagcgctaccgtgcgctgctcaaaaatttagagactgcacatgtttttgaaaagagcgaggtaaaagtgtgggagtgccgcaactgcggtcatatctgcgtcggcgtcaaagcgccggaggtatgtccggtctgcaaccatccgcagagctattttgaggtccacgcggaaaattattaagcgaactctatgaacggctgctcggttctaaatcgggcggtcgtttttgtgtcgttttgtacagtgctttcggctttttccacaaaccaaacgccgaaagactggcttgacaagcccctttttcggctctataatggcggtaaaagggaggagttttcatgagaacatccacacagatcgaaaccgcgtccgttctggtcggcgaagaaaaagccgtggaatacgtcgcaaaagccgggtttgacgcctgggatttttccatgtttgccatgtgcgattacgattggcgactcggcgcagtccgccccacaacacatccgcttgccggggaaaattatctcgcgtttgcgcgcaagctgaagcagatcggcctcgataacggcatcacctgcaaccagtcgcacgcgccgttcccgacatcttgcccggagattcgctcgtatttcaagcgcgcgattgaatgcacggcagaagccggcggcaagatctgcatcattcacccggataacgacaaatccgccgcagaaaatgccgaaatgtatcttgaactgttgccgtttgcgaaggactgcggcgtgaagatcgccacggaaaacatgtggaactgggatgatgcgaaagacgagtcctgctttgcggcatgcgccacctcagagagcttcatcgagcatatcgatgccgtaaatgacccgtatctcgtcgcatgcctcgacatcggccacgcggaaatgcgcggctccggttcaggcgcggcgaacatgatccgtgcgctgggccaccgcctgcaggcgcttcacattcacgataacgaccgttggcacgattcccaccagatcccgttctccatgtccattgatttcgcgcccatcgccgccgcgctcaaagagatcggttacaaaggctggttcacgctggaggccgatcattatctcaaagaaaagttcaacgtagaaaatgtgattgagggcatgaaagacctgcacaccgccgccgttcgctttgaaaaattatttgacgaagcctgaaatttaaatttcccgtatcttgaagtcaaaaaaccgaggtacgggaaaatttttcattccgaaaaacctgcaaaagccattttcatttcctgcggcgttttggcgctcgcgtttcttctgttgtttttaacgcccaccgttgcgaacgatacgcacgaatagcttgactgtgcagttccatagcttgtcaaaatcttgacaaaagcggaagaacagggtagaataaaaagaccgaaatatcctgtttgatgcggcggaatagcttaccgcacaaacgaaaaaagacattatttttgagaggaagtatcagcaatgagcgaaaattgtacgcacgactgctccagctgcggcgaggaatgtccttcccgtcagaatccggaaagctttcttgcgcccatgaataagatgagcaatgtcaaaaaggtcatcggcgttgtcagcggcaaaggcggcgtaggcaaaagccttgtcacctctatgctggctgttaccatgcagcgccgcggctttaaaaccgccattctcgacgccgacatcaccggcccgtctatcccgaagtgcttcggcatccacgaaaaggccatgggcagcgatgacggcctgttcccggtcaacacaaagaccggcatcgagactatgagcatcaacgagcttctgccggatgagacctccccggtcgtctggcgcggcccggttatcgccggtgtcatcaagcagttctggagcgacgtcatctggaatgaagtcgattatatgtttgtcgacctgccccccggaaccggcgacgcaccgctcacggtgttccagtccatcccgctcgacggcatcatcatcgttacctccccgcaggagctcgtctccatgatcgtctccaaagcggtcgaaatggcgaaaatgatgaacgtgcccgtgctcggtctcatcgaaaattacagctatgtcaagtgcccgtgctgcggcgagccgttcaaggtctacggcgaaagccacatcgacgaggtcgcggcaaagtacgacctcaaggtgctcgataagctcccgcttgacccgcagatcgcctccctgtgcgatcgcggtgccatcgagctcatgggtgacggccttctcgataacgccgctgacgccgtagaagccgcacatcgcgcgtaaagtgtcattgatattttcattttattaaaataaggtagttcaaagataaaccgttaaatgtttatcggagggcgacccgttcacacgaaacagaaagccggataaaatgcgggctgcaatgcctgtgtttatccggtttttattatttatttcacgttttgagggagtaagttatgcgcgaaatgcgtgagaccgcaaaagtgtgaagctttttgaaatttttgaaaaaacaattgacattgaaatgaaaaccagataagataagaatatatctaaaaacaagttttgtcttttcagatatacctcatataatacagagaaaatataaaagcgatgacgaagacagtgcgggctttcccgtttcagagagtcggcggcgggtgtaagccgatacgaaaagccctgtcacaatcccttccgagctgaaagccccaaagtgaacccaagtagggctttccgcgccatgctgcgtcagtgcatagggcttcatgggagcccgtgagtggccttttcaggcaatttgagtggtaccgcggattaactccgtctcaaagcgatttgagacggagttttttgcatgaaaaacaccaaaactatcgatatagccataccaaaacgaaaggaatgaagaaattggcaaatgaagcacaaacccccgtaacggaaaaaacagacctgaaagcacagctcgcagaggtggcggagcgcattcgcaccatgcgcgagatcatcggcctttccgaagaagaaatggcgcagcgcaccggcgtcacgctggaggaataccgcggctttgaaagcggcgagcatgatttcagcttcacgtttatttttaaatgtgcagagcgcttcggtatcgaccccaccgacctcatcaagggcacaagcccgcgtctttccacatataccgtcacccgccgcggcgagggcctgcccatcacgcgccgtcagggctttaagtatttaaatcttgccccgctctttaagggcaaaacggcagagccattttttgtcaccatgccgtataacgaggcggagcagaaggttgcgatcaagctttccacccatcaggggcaggaaatggacatcgtcatcaagggcaaaatgcgcgtgcagatcggctcgcacatcgaagaactcggcgagggtgattccatttactacaacagcggcacgccccacggcatgatcgccgtcggcggcgaggaatgtaccctctacgccgtcgtcatgcgcccgcagaaggagaaaaagcccgaaaaggacacgttcgaggcgctcatcaaggccaaacaggaccgtgccgaccgcgaaacggtcgcaagcccgttcgtgcacaccgagcttgacgaaaacggcatcttaaaatccatcgatttcatgaacgaggaaaagtttaacttcgcgttcgacatcgtcgataaaatggcggaaaaagagccggataagcttgcgatgctctgggtctccaagcaccacgaggaaaagcgcttcacgtttaaggatatgaagcgcatgtcgaataagacggcaaactacttcaaatccctcggcattaagcgcggcgatagagtcatgctcatcttaaagcgccactaccagttctggttcgccattttggcgctgcataaactcggcgcagtcgtcatcccggcgacgaaccttttaatggagcacgacctcgattaccgcttcaaggccgcaggcgtgcgcgcgctcgtctgcacgccggacgatcaggtcgcagatgaagctctgcgcgctgccaaaaactgcggcaccgtcgaatttttgatgatggcaaacggcgcacgcgagggttggctcgatttcgacgccgaggttgaaaagcagagcgacgtgtttgagcgtacagaggacgccgcctgcggcagcgatcccatgctcatgttcttcacctccggcaccacgggctacccgaagatcgcggagcacaactataaatatgcactcggacactacatcaccgccaaatactggcacaacgtcaacccggaggggctgcacttcaccatttcggataccggctggggcaaggcgctgtggggcaagctctacggccagtggatgtgtgaagcgcccatttttacctatgattttgataagttcgatgcacacgacatcttgcctatgttcaagcagtacaacatcaccacgttctgcgcgccgcccactatgtaccgcttctttattaaggaagatctctccaaatacgacctttcctccatcgagtacagcaccacggcaggcgaagccctgaaccccgaagtctacgagcaatggaagcgcgccaccggcctttccatttatgagggattcggccagacggagaccacgctttccatttacaacccggtcggctccgtgccgaaaagcggctccatgggcatcccgagcccgctttacgatgtcgacctccttctgccggacggcacgcctgcgccggtcggcgaaacgggcgagatcgtcatccgtaccgataagcacacgccctgcggcctcttcatgggctattaccgcgacgaagagaagacccgcgaagcgtggagcggcggcgtgtatcacaccggcgacaccgcatggcgcgacgaagacggctacttcttctatgtcggcagaacagacgatgtcatcaagtcgtccggttaccgcatcgggccgttcgagatcgaatccgtcatcatggagctgccgtatgtgctcgaatgtgccgtcaccagcgctccggatcccattcgcgggcaggtcgtcaaggcgtccatcgtgctcacaaagggcacgcagggcacagaagcgctgaaaaaagagattcagacctacgtcaagacgaacaccgcaccgtacaaatacccgcgtatcgttgagttccgcgacgagctgccgaagaccatcagcggcaaaatccgccgcgtagagctcaagggctgattttaaaccgaatagacacataagcgccgctgtacggctttttcccgtatggcggcgttttttctatgtttgtgtgttctaaattcaaattttgttcaccgtttttcccccgtatttgcgtataatgtttatgaataaatttgtgcgtaaagggtgagagaaatggataaaaatttggaatacgagccggtacgcggcgcgcacattttaatgatcgtcaatcccgtttccggccgcatcagcggcgagcataccgccgataagcttgaagcatggctgaaagaaaacggtgccgccgttgaccgctttgaaacgaccgaaacggaaaacggaagcggctacaccgcaaagcttgcagaaaacgactatgcccgcgtcgtcgtgctcggcggcgacggcacattaaacgccgtcttaaacggcatgctgcaccgcgcgctgcgcacgcccatcacatatctgcccgccggtaccacaaacgattttgcccagacgctcggcattcaaaaacatcttttagatccctataagagctttacggaaacagaagaccgcctcatagatgccggcaaattcggcgacggctatttttcctatgtcgcgtcgttcggcttatttacaaagtgctcctacgccacgccgcgcaccatgaagcgccttttgggccacttcgcgtatgtcttagagggcatgaaggacctccacgcgctcgacgccacgcccctcaccgtcacggcagacggcaaatttttcgagggcgcgtacattttcggcgcgttcagcaactcgctttccatcggcggcatgctgaaatacgatgaaaacagcgtcgatatgaacgacggcaagcttgagatgcttctcattcgcaagccggaaacgctccttgacctgcaccgccttattctggcgctcaaaaacaacgatttttcggacaagcacatcgatttcgcttccgcgagtacgttccgcctgcatgccgcagcgggctttgattggtcaatcgacggcgaatacgccgcaggcggcatcgataccgtcatccgctgtgtcaaggatgccgtgtgcatcgccgcgccgcgtgtcgaaaacggttgatttttcctgcaaaacgtgtataatagcaaaagcgatactgcctgcggactggaagaaggccgggcagtaagcccatcctattcaccatattttcggaatgcctttttaggtacgcgcgctgcgcgggaaaggaggtgcggcctgtatggcctcatcttttgaaatcaaatccaccagaccttcggtgggtgaaaccatcgtcaccatcgttcgggatcacattgattaccgaaaacagatctttaagcttgcgggctccgacctgcgccgcacataccgtgcgtccgcactcggttggtcttgggccatcatcaagccgcttgtcacgattttcgtttactggttcgcatttgccatcggcctgcgccgcggcggcgatatcgagggctacccgttcgtgctgtggctcatcagcggcatcgtgccgtggttttatatgagcgaaatgctcacgcttggcaccgagtgtattttgcgaaaccgctatctcgtcaccaagatgaaatacccggtctccaccattccgacgtttaccagcatctccaaattctctgtgcacctcatcttgatgatgatcaccatcctcatcttcgttatcaccggcaacgaattgaccatctaccttgtgcagttgccgttttacatgctgtgcaatttcctgttcttcaccggctgggctatgtttgccgcgcccatcgccgccatcagcaccgatttctcaaacctcgtcaaatcgttcgtcacggcggtgttctggctttccggcgtgcttttccaggtcgataccatgcacaagggcctcgcacataagcttttgatgctgaatcccgtcacgttcctgtgcaacggctaccgcaactgcttcatttaccacacgtggttctttgaccagccgaagcgccttttgtatttcgccgtctggctcgtcgtcatttacgcactcggcatctggagctaccgccgcacccgcagcgaaatggcggacgtactgtaaggagggcaaaagcatgagcgaacaaaataacattgccgtccgttttaaaaatgtctgcaaaacgtacagactgtatacaagcagccgccgtcgccttttggggctgtttttcaaaagcgtgccgcacaaaacaaagcacgccgtcgtcgatatgaacctcaccgttgagcgcggcgaagccgtcgccattttaggacgcaacggcgcgggcaaatccaccatgcttaaaatgatcaccggcgtcacgttccccacaagcggcgaaatttacgtcaacggcatcgtcagcgcgcttctggagctcacaagcggctttgaccaggaatttaccggccgcgaaaacatttacctcaagggccgcattttgggccttaacgatgaagacatcgcaaagctcgagcctgccatcattgattttgcggagctcgaagaatacattgaccagcctgtgcgcacgtactccagcggtatgaaagcgcgcctcggcttttccatctgcgtcaacatcaacccggaaatcctcatcgtcgatgaggcgctgtccgtcggcgaccgcgcgtttcgcgataagtgcaccaaaaaggtgaaggagatcatgcagggcgacatcacgcttctgttcgtcacccattcgccggagattgccaaagcgttctgcacccgcggtgtcgtgatgaaaaacggaaagatcgtgtttgacggcaccatcgatgaagccatcgactactacgccacaaaatactaaacttccccttcgattttaaaaccggaaaggaaatttaccatgagaaaacccaaaaagcttacgacgctcctgctcgtgctcacactggttttcgcctgcgccgcctgcggcaacggaaacagcacaacagacagcggcaaaaccatctcgggcacgctgccggagattatagaccgcctgtatgacaccgtagatgtcgatgacgagcagcgcgattttctcaaaaacagcgtcggcacggtcgagattccgaaagaccagtctgcgtactacttcggcgtcgaaaacctcgattttgaagaagccgtcgcgagcgagccgttcatcaacgccatcgcgttttccgtttgcctcatgcgtgtcaaggacggtaccgacatcgacgagctgaaagcggagatccgccgcagcgcgaaccccgccaagtggatctgcgtggatgtcaacccgaacgacgtgcgtgtggaaagcgtcggcgaccttgtcctgctcatcatggcggacgattccgaaaaatacagcgaagcattctacgccctcgccgagtaaaaagcaaagcttgacgaaaacgccaaaaatcgctatgatgaatataaacgcggcgtgatgccgtgtgacgaaaggaagttatatcatgctgaagaaaatcgatacaaagaaggcccccgcagccattggcccgtattcgcaggccatcgtttgcggcaatatgctcttcacctccggtcagattccgatcgaccccgcaacgggcgacatccacggtgcagacatcaccgagcaggcagagcaggtcatgaagaacctcgccgccgtcctcgaagaagccggtaccacgtttgaaaacgccgtgaagaccacctgcttcctcgccgatatgggcgatttcgccgcgttcaacgctgtctacggcaagtatttcaccgaaaagccggcacgctcctgcgttgccgtcaagaccctgccgaagaacgtcctcgtcgaagtggaagtcatcgcagcgctttaatttccgcaaaacaaaaggcatacggtaagcgaaaaacgctttgccgtatgcctttttgcatataaaaagcgccgtacgggttcccgtacagcgccgaaaaatcactttttcttgctcgttttaaacttcgggaacagcggctttttaccctgttcctttttctttgccgcgcgttccaaaacgggggcgcacagcgggcggcccttagaataccccgccgcgtagtgagagttttccagatatgggtatttgcccggttctaaatcagcgtttgaaagcccgcgcgccgcaaggcggttggttgtcacgcggcgcatcaccgtgtatagaaccgctgcaatcggtgtgccgagaataatgcccaaaatgccgaacaaattgctgaagatcgtcacggcggtcatcacccacacgcccggcagaccaatggtcgagcccacgaccttcgggtaaatgaggttgccctcaaactgctgaaggcagatgaagaagatgacgaaccatacagcatccatggggtttacgatcagcagcaaaaacgcgccgatgccgcagccgatgtacgcgccgagaatcggtatcaacgcagtgatcgtcacaatgcacgagatgagcagtgcgtagtcaaacccgataagtgacatgcagatgaagcacaggcagcctaaaatgacacactccgtcagctggccgcgcacaaaggaagaaaacacgttgttcgaggttaccgcaatgtctgccagcgttgccaccacctttttcggcagcagggaataggagacacgctttaaggaaagcagcaggctctccttgctcgtcaggaaatacgcggagaagataacggagagcacaaacgtgaaaatgccgctcgccacattcacggtcacgttcacaagcgagctgaaaaagttcgtcgtaaactccgttgcgcccgataaaatcgaagaccagttgaagttattcaacgaatccaccatcgtggaaaaatcgaggtcaaactgcttggaaagctcgtcagcccatttggcaatctggtctgcatacaccggaatattcacgcgcgccgtctcgccgataagttctaaagacttgaaaatctccggcacgacatacagcgtgatggcgaggaggatgagcacgatcaccgcataggaaagcgccacgcataccgggcgcttcagctttttccacaccttgttgtcactgcgtgtgagccttccgaacaccgtgttctcaaacagattcaaaaacacatttaaaatgtacgcgatgaaaaggcccagaataaacgagctcaccgcgttaaagagcacgccgcccaccttcgagaccgcatcgaacttgaacagtacgaaaatcagccccaccgcaaaggcggcaatggcaatgccgggctttacatagtcccacggggtgtattcccgcatcggtttcttttctgcagaatggttttctttttccacaatgaccctccggtttccaatacacgttaaggcgataccgcaggcttcgccctaaaaatgacccgccgcacacggaaatgcgcgcggcgggtgctcagagttttttatttaagaattaaaataagaattaaaatcagaacgtcgcctttgcgccggtctcaaatgccttgtaagcgccgtccatcaaacgggtcagcatcacagcctcgtcaatcgtgaacggagacggcttgccgtttacaacagcatcgatccactggtcgatcggcagcggctccttttccggtagctcaaggtctacccacttgccttcggtcgccttgccgccccactgtacgctgtcgccgtgtaccatcacagcgccgtccgtgccgctcacctccagtgtgtacgggttgcactcggagacaaagccggtctcggaaacgccgatcttgccgtctgcaaactcgatgacggagaccgcattgtcctcaacgccgcggttcgtcacctgtgtgaatgtggaggtaatggatttcggctctcccagcagccagtaaagcgtgtacatcgggtgtgagccaaggtctatcattgcgccgccgccgcactgtgctttatcgtagaaatgcgggggaagccagtttgcggagctgccgttgtgtacgttgcgcacgcgtgcgtaggtcacacggcccagcttgccgctgtccatcaaagcttttaccgcgcgcagcgtcgggaacgtgcggtgcggataagagatcgtaaataccttgccggaagccttcacagcctcggcgaccttctctgcgtccttggggtcgatggtgagcactttctcggtgaagatgttcttcttcgccgccgtcaccttcatcatgatctccgggtggtcgcaggtcgcagtacagatgaccacgctgtcaatgctctcgtcgccaagtacagcgtcgaggtctgcgttgaacggcaggttcatttcatcggcgaacttcttgccgcgctctgcgtcgttgtcccaaacgacggcgacttccgcattcgggttgttcagtacacccgtggtgtactctttggtgtggacgtgccaggtgcctaaaattgcaactttcatggttttcaaactccttgccctaatcaggtcttttgtttaaactgcttgtggcagcgctggcaggtgacaagaattttaccgcgtccgcgcggtgcgcgcagctgctggcgacagcccggacagcggaagtacttgtattgcttgcgctcgcgaaaagccgttttcttaattctaaaccatttttgcaccggtgtccatacctttaagaaagaatagtattctttttgccgcgcggggatgttgcgcgagaacatacggaacagcgcatagatataaagcgcgtaagaaataattgcgagcggccagaaccagaaaatgcgcgaaaggaacatcacgatgataccgaggatcatcaaaacaaggttcagttcgtccgtgccgtaccggccgtacataaatcttctcaatttttcaagaaacaaataaaaacacttccttagaaatgagggtatagagataaggttaaaaataagatttcacagttaaaagtataatgcgcgaaaaactttttttcaagaaaaccgagacttctttcacactaagtttacactttgttcttagggtaacactaaggtaacaaattgtgcataaatctctgcggtttcagaagcagaacatcacaggacacaagcggacatctttttcaaaacgcgctttttccggtatttaccgcttgacaaatcagaacgcatgttctataataagagcatagagaacgcatgttcgtaacgcgtcgaaaggaggcaaaagccgtggatcgggtcattctgcacatcgatatgaataacttttatgcctctgtggagacgctttatgacccgtcgctgaaagatattcccatggcggtcggcggcgataaagagcgtcgccacggcattgtcctcgcgaaaaatatgctcgcgaaggccaaaggcgtcaaaacggcggaagccctgtgggaagcggaacgcaaatgccccggcatcaagttcgtcccgccgcattttgagcgctacgcaaagtattcgcgccttgcaaaggagatctacatgcagtacaccgacatggtggaaagcttcggcttagacgagtgctggctcgacgtgaccggcagccgccgtttgttcggcagcggccgcgagattgcggaggaaattcgcgcgcgcgtcaaagatgagctcgggctcacggtgtcaatcggcgtgtcgttcaacaaaattttcgcaaagctcggcagcgactataaaaagccggatgccgtaacggagttcacgcgcgagaattttaaagagctcgtgtggccgcttccggcggcagacctgctgttcgtcggcaaatcgacgcaggaagcgctcaaaaaatacggcatctacaccatcggcgacgctgcaaaagccgaccgaaagctgttaaaaaggctattcggcaaggcgggcgagcaattaagtatgtacgcaaacggtgaagacaggtcgcccgtgcgccgtgtgaacgagcacgaggaggtcaaaagcatcggcaacagcaccaccgccgtgcacgacctaaaagacgacggcgagattcgcgcagagctctacatgctctccgaaagcgtcgcacaaagattgcgcgaaaagggcctttgcggctacaacgtgcagctttccgtgcgcaaatataacctcgagacctaccagcgccagaagatgctggacaccgccgtggcggattccaaaagcattttcgacgcagcctacggccttttccgtgcccaccacacgggcgaatccatccgcagcatcggcgtgcgcgtgtcgtcgctcgtgccgctcggtatgtcgcagtgctcgctgtttgaagatgccgcgcgcggacaaaaggcccaaaagctcgaaacgacggtcgattttctgcgctgcaaatacggtggcgacatcattgatcgcggcatcaaggtgatgcacaaagacctctttcagtccgccgcggaaaaccgccgcacacacgtcgaaaacccgttcaagggcgtcgcgctttaagatagggagaacagcatgaacacacaaatggacaccatggaaaagctgcgcattttatcggatgccgcaaaatatgacgcggcgtgcacctcaagcggcgtaaaccgcgcaggcgtaaaggggcagctcggctctgccgccgcgtgcggcatctgccacagctttgcaagtgacggccggtgcatctcccttttaaaggtgctaatgacgaacatatgtgcttatgactgcacgtattgcctcaaccgccgctcaaacgacacgccccgcgcgacgtttcgcccgcaggagctggcggatctgaccatcagcttttaccgtcgcaattatattgaagggctgtttttaagctccgccgtgttcggctcgccggacatcacctgcgaaagaatgctcgaaacattgcatattctgcgtaatgagtatcacttcaacggttacattcacgtcaaagccattcccggcgcggacgagacacttttgcagcggctcggcctgcttgccgaccgcatgagcgtcaatatcgagctgccgtcaaacgacagtctaaagcgccttgcgccacagaaatcgaaggaaaacatcctgctgcctatgtcgcgcattcgcgacggcatcaaggaaaacgcgcacgatctcatacggtataaaaatgcgccgcgcttcgtaccgggtgggcagtcaacgcaaatgatcatcggcgcaacgccggaaaacgaccgacgtattttgcagctgagcgaaggactttaccacaagtattctttaaaacgcgtgttttactctgcgtatataccggtcgtgcaggacagaaatctgcccgcgctcgacaccgcgccgccgcttctgcgcgagcatagattatatcaagctgattggcttttgcggttttacggcttcacggcggacgaattattgagcgaaaaaacgcccgaccttgaccctatgttagacccgaagtgcagttgggcggtgcgccacccggaggaattccccgtggaggtgaaccgtgcgccgtatgagaaattattgcgcgtgccgggcatcggcgtggtgagtgcaaagcgcatcatccgcgccagacggcaagcaaagctcgaccacgaggggctgaaaaagctcggtgtcgtcttaaagcgtgcttcgtattttatcacctgcaacggcaaaatgcagtgccgtttgcgcacagacgaaccggcggttttggcgggcattctgcgcgaccgcgggctgccgcaaggcggcatacagcccgaaattcccgagcagctttcattattcaaccccacaaaggaggacgcggtaaaatgtctgaccggacaactgtaatgtattactacgacggcacatataacggcttcctttcctgtgtgttcgagagctttgcggaaaaagaaacgcctgccgcgattttgcccgttgatgaagccgaccagacgtgtttattcggcgcgaagtatatcgagaccgacctgcgccgtgccgagcgtgtgcgcgtgtcgattccgaagaaaatgggcatggaggcgcaggatattttggagcgcgcgttttttacctgtatgcccgaaaaggaactgcgtatgctggaattcatgcggttggggtacaaggtcgggcgcggcgtgtgcgggcgactgaccgagcctgccgtcgataagatcacgaaagcggtgcagttccttgagcgggaagcgcacttgtacctcggttttctgcgctttgcggagtacggcgacgttcttatcgcgcagattgagccgaaaaacagcgttttgcccgtcatcgcgccgcattttatcaaccgtttttccggtgaagatttcatgatcttcgaccgcacgcataagcttgctttattatataaagacggcgcgacggaatttttgcaggcagagcatatcgagctgccgccggaatcgccggaggaggagaaattccgcgccatgtggcgcacgttctatgacaccgtgggcattgagggcagacggaacgacctgtgccgccgcacccacatgccaaagcgctactggaaccgtatgacggagatgcgggataaggtttgagataaaatgagaatgaaaaaggacggcttccggggaagctgtccttttgaagttttactaaaattacgttcgcggggtttggcagatgatgtccacaaaaaggcggccgtcggggagaaagctgacgccgagtgaagcgtcactattttcggacaccgaccagtattcgttgtagacctcgccggaaccgacggcatcggtgctcaggcggtcgaggtgcgtggagatgcggttttcaaggccgggataggtggtcggctcgccgtactgcgcggtgagggtgttgaggagcttttcgggcagcttgcagtccgcatcggtcgggttttcgacgaataggatcctgcggtagccgtaaagcgtatcggtgttgagatcgaaaagcaggtagaccgaaaaatcacggttttcgagcgtttcggtccggtctaaaacgtaggcgttggcataaaggtcgtcttccttgtaggtgaggttttccgcatcgagcgccgcaagtacttcatccttcgtttcgccgaacatggcgggataatcgagcgattttgcgcctttttccgccgagcaggcggtgaatccgagcagaagcaggagcaacagaaaaacggggaatgcgcggtttgcggcatagtacgcaaaatgagaaagcgagcgttttttcatggtatgacctcctgttcaggacgatgttttttatcttgattataggaaacgtgcggagaaaaatcaatcgtcaaagaagataaaaacgaggggcgtttgttgggtgaaatgacgggctgcggtgaacgtgcgtcaatccccaatcgtaataaactgcgtatgctccggcaggttttgaatttcggttttcaaaaacgccggtcttaaatcgatatacggcagctcttcaaacgggaaccacgcgaagtggacgctcggttcattcgggctgtcgaaacggtcgccgcgggtgatgagatcggtgccggaagcgtctacggtgaagtaggtgcaaagctcgtggtaacgctgctttttgcctgtcggggtgaagaagctttgggcaatccacacggcgcgctccggcgcgacggtgacacccagctcttcttttaactcgcgcgtgagggcgtcctcggccttttcacgcatggtgacgcggccgccggggaggtagtagtgctctgcgctgtcgtcttttgtgacgagcagcttgccgttctgcacgatgatggcggcggtgcggaagttgaacacgcctttatccgtggagaatgagatgttcgggttatacgaggcaaattcctttgcgagccttacggcgagcgcgacgatgttctcgttcgcgcgggatttatcgaatgtgcggcagctttcgcgcatgcggcgcagacgctctttatgctcgatgagtgaggacacgacggcggagaaattctcctttgtgacgcgcacgcccatatcgtgcgtttgcaggaagttggcgttatcttcctcctgaccgggaatggcgtcgaacacggcgagcggcaggttgcatgcgagcgcttccgagacggtgaggccgcccggctttgtgatgataaggtcggacgcgtgcataaagcgctctacttccgttgtgaactggataagctttgtctttttcgacgagttcggaatttcgctttcaaagagcttatagagctttttgttattgcccgtgatgatgatgatctgtaaatcgagcggggaggagcacaggccgcggtagaggtctacaatgttggagacgcccatgctgcccgccatgaagagcacggtgggcacttccggctcgaggtccatttcggtgaggagcttcgcctggtcttccttgtcaaagaagacgtcgtgtaccggaatgccgtaggggtagatatgctctttcggaatgccgagacggcgcaggtcgttcaccatgtcgtcgcaggcaacgacgtaggcgtcgacattcggggcgatccacgccttgtgcacgccgtagtctgtcatgaggcagatgagcgggcaggtgatgcggcggcgctcctttaaaccggagatcatctctgttgcgaacgggtgcacgctgatgatgacgtccggcgcgacctccgctaaacgcggatagagctggagcgccagaagctccgttgtgcgggggacgaaatccgcaaggggattatctttatttgtcgttttgtagaggcggccgaagagagacggggtcttctttgccataaagaggtagctgtcgcaaatggttttgtcgagcagcttgccgatgctttttaagaagtccatttgaatgacttcgtgggtggtggtttcgcgtatgtatttttcaagtgccgcagccgcgcgcaggtggccgccgccggtggcacaggtgagaatcaaaatgcgcatgataccgctccttttcaatagccttttcatcgggtgtgtctgaaaaatcaaaacgtattttcagatactccctgtcctttgctccagtttatcacatttttttgtgaatttccatatattgtgcggaaattaagaaatcaaatccgaaaaaagagtgaaatttgcggaaaatttgcatttttctggagacttttttgcggctttgcggtatacttaaagtaagcggagaacctacatgcgttcaaaaacttttaagacatatttaaacgtatgtctttacaagaaaagatgcggcaggtataatattctcagccggtattttgccggcgaaaaggagagaatatctgcaaaaagtaagtcggtacgatacagaaaagcggctgtgagaagctgccgggattttcagaaaggcgatctcatgtatagacataaaacgaaaaaatatcgcgcggcggcggtcggcgcagttttggcggctgtcttgatgctgggctttgcgggctgcgataagctgccgacgtcttccgactctgcggcgacggcggcgccgacgcctaccccggagccggaagacctgaccgtgtttgcggaaggtactacgatggacggcatcgacatttccggcatgaagctcgcggaagccgaaaaggtgtgcagagcagcggcgttaaagccgtatgcgaatatcaacgtcacagtgaaaagcggcgataccgaaatgaccgccaagggcagcgagctgaccgttgtggatacgctggatattacgctgacgcggcttttgaaatcgagaaaagcgggcgactacgaaatgacgtactgcctgacgctcaagaattttgaaaatgaattaaaacagaagctcggcgatttcgtcgtgcaggctaaggacgcgaccgtgggctcttatgactttgacgcgggcgactttgtgtttgaggacgctgtgaacggcaaaaagctggacgtttacggaacgcttgccgccgtgaaggcgcagttccttaagaagacgagcggcgaagtagaggctgctttgcaggagaccgcggcgaaagtgaccgtggacgacctgagaaaagatttcggcatgatctcctcgtttgagacggtctcgacgaatacggaaaacggcaaccacaacatgggtctggcgctttcccgcgtgaacggcacggttttgaacccgggcgacacattctcttatgaaaacatcgtgggcgattccacaaacgcttccacaggctttttgccggcgggcggcctttccggcggcgcgctggtgcagatgtacggcggcggcatttgtcaggcttcttcaacgatctacggtgctgcgctgcgcgcgggcatgacaatcacgctgcgcgactgccattcttcaccgtctacgtacgtgccgattggtctggacgcgacggtgagttacggcgagatcgacttccagttccgcaatgatcttgacaccccggtgtacattatgagttggatggacggcgtgacgctgcatgtgcagttctacggcaagcacccgaaagagtgggacacgatcaatgtgtattcccagacgacgagcgagatcccgccgctgagcactgtgaaatacgtggtggaccagaaccttaaaaagggcgaaaaggtgctttccacaagcggcaactggggctatgaggcgagcgcttggcgcgattttgtgaaggacggagaggtcatccgcaccgagacgctgccttcctcctactacggcccaagcggcaccatttaccgcatcggcccgggcacggagacgtcttccccgagcccgacacctacggcaaccccaacggcagcgcctactgcgacccctgcgcccactgcgacccctgcgccgactgcggcgcctacgccggagccgacccctgcgccgaccgcagaaccgacggcggcccccacagaggagcccacaccggagcctgtgacggcggccgaaaccggcgaatgagaataaaaacagtttccccctgctcttttttcggcagggggaatttgtgcaagtgaatataattgtgtcacctccggtgacacttgagaggagcttatttgtgagcataaaaatagacggaatggtgcgcgtggcggcggctacaccgcacgtgaaggtggcggactgcccgtacaacaaaaacgagatggcaaagatgatccgcgaggcggccgcaaacggcgcttcggttatcgcgttcccggagcttgcgatgacgggatacacctgcggcgacctgtttaaggacagaaagctgatggaaagcgcgaaggcgtgcctgtttgacctcatcgaagagacggaagacctcgatattctgtgcgcggtgggtatgccgatcccgtccggcggggcgctgtataactgcgcggcggtgttcagccgcggcgttttgctgggcctgccggcaaagcagaatattccgaattactccgaattttacgagctgcgccatttttcccccgcgccggaaagcggcatgctgcgctatgcgggcgactggtacggctgccgtgacgtggtgtttgagcttgcgccggacgtgaccgtgggcgtggagatctgcgaggatgtttgggtggcagacccgccgagcgtgacgcttgcaaagggcggcgcgaccgttttattaaatctttcgtgcagcgatgaaattatcggtaaggcgcagtaccgccgcgacatgctgcgcatgcactccggtcgtctgcttgcagcgtatgtgtacgcggacagcggctttggcgaaagcacgacggacatgatctttgcgggacacaatttgatttgcgaaaacggctcgttactgaacgagagcgatttgtttacgaacggcatcacctacggcgacatcgacgtggagcgccttgtgcaggagcgccgccgcatgaatacgtggcaggacgagcctgtgtgcgacatcatcgacgcttcgatggacctgcccgagtttgagacgacgcgcacggcgtacccgtacccgtttgtgccgaaggacgacgccgacctttccgcacgctgcgagacgatcctaaaaatgcaggcgacgggtctcgcgacgagactgaagcacatcggctgcaaaacggcggtcattgggctttcgggcggtctcgattccacgttggcgttgcttgtgacggcgaacgcgtttgatatgctcggcctgccgcgcacgggcatccgcacggtatcgatgccatgcttcggcacgacggcgcgcacgaagagcaacgcgcagtgccttgcggaagagctcaaggtgcattttgacgaaattccgattgcgaaggcggtggagcagcactttaaggacattcagcacgatcccgaggtgctggacgtgacgtatgaaaattcgcaggcgcgcgagcgcacgcagcttttgatggacattgcgaatcagcacggcggcattgtcatcggcacgggcgacctttccgagcttgcgctcggctgggcgacgtacaacggcgaccacatgtcgatgtatgcggtgaatgcgtctatcccgaagacactggtgcgccacctcgtgcgttatgaggcgatgcacggcaacgacgagctgcgccgcgttttacttgatattttggacacgccggtcagcccggaattattgccgccgaaggacggcgaaatttcacagaagacggaagatcttgtggggtcgtatgaactgcatgattactatttgtattatatgctgcgctttgggtttactccgcgtaaaatttatgcgatggcgctgcgctcatttgcggggcagtatgacgccgagaccattaaaaagtggctgaaaacgttctaccgccgcttcttccaacagcagtttaagcgctcctgcctgccggacggcccgaaggtgggctctgtgacgctttcgccgcgcggcgatttccgtatgccgagcgacgcgtgcaatacggtgtggagagaggagatcgaaacactgtgaacattttagttgcgatggagacaaagccctatcagcacgtgtggctcgaagaagccgcgccgggggagatgtttatttataaagagggcaaggcagagcgcgaggacgtgcagaacgcggatataatcctcggcaacgtgagcccgaagctcatcttgaccggcgataagcttaaatggttgcagacgaacagtgcgggtgtggacgggtatatccacggctgtctgccaaaggagaccgttttgacgaatgcaacgggcgcgtatggccttgcgatttcggaatacatggtcgcggtgtggcttgaacttttaaaaaagctgcatttgtaccgcgatgtgcagcgcacaggcaagtggtgcgacctcgggcaggtgcgctcggcgtggaactcgacggtgctggtgctcggcctcggcgacatcggtggggaatttgcgaagcgtgcgaaagcgctgggcgcaagggtgatcggcgtgcgccgcacgggtacggataagcccgattttgtggacgagctcatccacaccgataagcttgacgaatatttgccacaggcggactgcgtggccattacgctgccgggcacgacggcaacgaagggcatgtttgacgcagagcgcatggcgaagatgaaggacggcgcgattttattaaacgtcggccgcgggatgatcgtcgacacagatgcgctgtgcgcggcgctgaaaagcgggaagctggcgggcgcgggcgtggacgtgaccgacccggagccgctgcccgcagatcacccgctgtggatgatggaaaacgcggtcatcacaccgcatatctccggcggataccatttgcaggagacgcacgaccgcattgtgcgtattatggcggagaatttaaagcgttttctggcgggtgagccgcttagaaatgtggtcgatttttcgaccggctaccgaaaactgtaagggataatgatggatacgacacaggaaatttatttggacaacagcgcgacgacgcgcgtttcaaaagaggcggcggaaaaggcgctttacatgatgacggaatgctacggcaacccctcttcgctgcacagcaagggctttgcgtcggaaaaggagatgactgcggcgcgggagatcatcgccgagagactttcggcgcagccgggggagatttttttcacgtccggcggcacagagagcgacaacattgcgattttgggtgcggcgcatgcgaaaaagcgcgcgggcaacaagattgtgacgacggcgatcgagcatccggcggtgctcaatacgatggcacagcttgaaaaagagggctttgaggtcgtgtatgtgcagccggatgcggacggaaatattccgaaagagaaatttgacgcggccattgatgcgaagacgattttggtcagcgtgatggcggtgaataacgaaacaggtgttttgctgccgctgaaagacattgcgggcatgatcaagagaaaaaaggccccggcgctgtttcacacggacgcggtgcaaggcttctgcaaaattccgctccagccgaaaaagctcggtgttgacctcatcagtgtttcgggccacaaggtgcatgcgccgaagggcgtgggtgcgctgtacgtgaaaagcggcgtacgcattttgccgcacagcttcggcggcgggcaagagaaaaatctgcgccccggcaccgagggcgtgccgcaaatttgtgcgttcggcgaagcggtgaagcacatgatgacggaaaaagaggcgctcacacacgtaaaagcggtgcaggcgcatttgattgaacggctgaaagcgatgccggaggtcgttttgaactcgcccgaaaacgcgctgccgtatattgtgaatctttcggcagggcgcgtgcgtgcggagacgatgctgcactttttggcggagcgaaacatttttgtttcaagcggttccgcgtgcggcaaggcaaaaccgagccacgttctgagcgcgatgcagctgccgaaggagcgcgttgaaacatcgctgcgcgtaagcctttcggcggaaaacacagcagaagaaatggacgcgtttgcggacgccttgaaagagggcctccaaacgctttcgcacgcgtaagcgtgagtttatagacggaaaggaattttgtcatgcaggaagtgattctggtcaagctcggcgagatcgtcttaaagggattgaatcgccgcacgtttgaagaccggctgttaaagaacattcgccgccgcattgcgcgcgcgggtaactttgaggtgtactccatgcagtccaccatttacattgaaccgaaggacgaggacgcggacattgacgaggccgaggagcgcatctcgaagatttttggcgtcattggctatgcgcgcgcttgcgtgtgtgaaaaggacatggacgccattacaaaaatggcgccggaatacctcaatgacacactcgcgggctttaagacgttcaaggtggaatcgaagcgtgcggataagaagttcccgctcggctccatggaaatctcccgcgaggtgggcgcggcgctgctgcgcgcgaacccgcacatttccgtagacgtgcataacccggagatcacggtgcgcgtggaaatccgcgagaaagcggcgtatatccacggcgagacgaagcccggcgcgggcggcattccggtgggcacgggcggcaaggcggccattctcatcagcggcggcctcgacagcccggtggcggcgtggatgatggcaaaacgcggcgtggagctgacggctattcactttgcgagcccgccgtacacgagcgagcgcgcacatgaaaaagtggtggcgctgctgaagaaggtcggcgaatacgcgggcagaatggacatgattaccgtgccgttcaccgaaattcaggagcaaattcgagacaactgcccggaggagcttgcgaccgtgattatgcgccgctttatgatgcgtgccgccgagcacattgcacgcgagcgcgaatgcagcgcactcatcacgggtgagagccttgggcaggtggcaagccagacgatacaggccatcgcctgcacggacgccgcggcgaatatgccggttttccgtccgcttatcggcagcgacaagtcggaaatcgtgacgcttgcgcaccgcattgacacgtatgatatttccattgagccgtatgaggactgctgcacggtgtttacaccgaagcacccgcgcacccgccccactttaaatgtggtggaggctgcggaacagaagcttgatgtggaacagcttttgaaaaattgccttgaaaagacggagatccgtcatctgtaagaaaggggaattttaccatgcaggcagaagtattatcggtaggtacagagcttttgctcggccagaccgtgaacacggacacaacaatcgttgcaaaggcgctttcggcgctcggcattgatttgctctacgccgccgtagtcggcgacaacgtgggcagactggaaaaggctgtttacgacgcgctcgacagaagtgatattctcatcacgacgggcggccttgggccgacgggcgacgacctgacgaaagagaccgtggcggcggctgcgggcaagaagctcgttttgcacgagcaaagctaccagcatttgctcgattactttgcaaacggcggcatgaccgaaaaccagatgaagcaggcgatgctgccggagggctgcaccgcgctgaaaaacgacaacggcactgcgcccggctgcgcgttccggacggacaagggcaagatcgtcatcatgctgcccggcccgccttcggaactgaccccgatgctgcacaactatgccgtgccgtaccttgaggaattccagagcgcggtcatcgcttcgcacagcgtgcatgtgtacggcagaggcgaagcgccggtggcacagatgatcgaagacctgatggagcagagcaacccgaccgtggcgccgtatgccaaggaaggcgagatgttcgtgcgcgtgacggcgaaggccgcaacgaaagaagaagcggacgcgatgtgcgtgccggtggtggaagaattgaagaagcgcatcggcaacttcgtgtacggtgtggacgtggagacgctggaggagcttgtggtcagtgcgcttaaaaaggcgggcaagaagcttgcgacggcggaatcctgcacgggcggtatgcttgcaaagcgcattacggatattccgggttcctccgccgtgtttgagacgggctgcgtgacgtatgcaaactgcgtgaaggagcgtttgctcggcgtaccgcacgaaacgcttgtgacatatggcgcagtgagcgaacagacggcgcgcgcgatggcggaaggcattgtgcgtgagagcggtgcagacatcggcgtgggtatcacgggcattgcgggcccggacggcggcacagaagaaaagccggtgggccttgtgtacattgcgttgagtgacggcaagaacacgtgggtggcaaagcgccagccgatgggcagactgaaatcccgcgaatggcaccgccactgcgcggcctccaaagcactcgatatggtgcgccgctaccttgccggtttgccggtagacgaggcgtaacgcgtgcggcgcaaataccgcgagccggagcctatgcggcgcgtggcggtctatgaagacgaagaaagtatgcagccgagaaagcggagaattctgttcccggtgcttatcacgctgttttcggtgatttttgtcatttcggcggcggtgcttgtaattgagctcattgtgaacccgtatgtgacggataaaaacgtaggtgagattcagaaaatctactccgaagcgggcgacacggaaagcgtggccccggtttcttccgaagacgacacggcggacagcgaacgcatggcagagttggagcgccgtcgcgaggctgttttgaagctgcaaagtgtgaacagcgacattacgggctgggtgcagctggacggcacggacatcaattttccggtgctgacgccgcctgcagacgacccgcagtattacctttaccgcaactacaaaaaggaaagcacgaagtacggcagcatctttttggacggtatgtgcacggtggactccgataatcaggttttgcacgggcacagcatgcaggacggcagaatgttctggcaggtgatcggttttggcagtgccaagaccgtgaaaagctgtccggtattccgctatgacaccgaaaaggaagcggcggaatggaagattgtttcggtattcaagacgaatacatacgataaccaaggggaactgttcaactatctgcgcggcgattttgactctgcggaagacaagatgcagttttactacgacgtgatgaaacgcagcatggtgaacaccggcgttgacctgaacgaaaacgacaaaacggtgatgctttcaacatgctcgtatgaatatgagggtttccgcacggtgatcgtggcgcgcaaggtgcgtgacggcgaagatgcgaccgtggacacctcaaaaatcacggagaacgaaaacgcgttgtacccggacatttggtatccctccggcaaagcgccggactactggcccgactactttgaggacgctgtgcaaaacggcatggtggattggtacacgggcaatctgtacaaaaattaaaaactgaaacagaaaacgaaaaacgccctctcgcttacggaaaaaccgcagcgggagggcgttttggtatgttattttttattctttgtacttcaaagcgcggatggcgttgagaaccgcgataatcatgacaccgacatccgcaaagatggctgcccacatgtttgcaagaccgaacgcggtgagcgcgagacagccgaacttgacgatgagcgagaacacgatgttctgcttgacgatgccgatgcacttacgggaaattttgatggcctttgcaatctgcatcgggtcatcgtccatgaggacaacgtctgcggcttcgatggcggcatcgctgcccatggcgcccatggcgatgccgatatcggcacgggtgagcaccggcgcatcgttgatgccgtcgccgacgaacgcgagatttgctttcttcggcttattctgaatgagcttttcgacttcgttgaccttatcgcccgggagcaactcgctgcgaacttcgtcgatgccaagctctttggcgacctgatcagccacacgcttggcatcgcctgtgagcatgacggttttttcaacaccggcgtgcttcagcttctgaatggcttccttggaatggggcttgacgacatcggagataacgatgtgaccggcatattcgccgtcgattgacatatggatgatggtgccgacgctgtggcagtcgttatatggaatattgtgcagcgccatgagctttgcgttgccggcgaggacctcgtgcccgtcgaccttggcggtgatgcccttgccgctgacttcttcaatgtccgttacgcggctgcggtcgatctctttgccgtaggctttctgcaaacttttgctgatggggtgggaggaggcgcactcggcgagcgcggcgtactcgagcagctttgcttcgtccatcgtgttgtggtggacggcagtgacctcaaacacgccctgcgtgagcgtgccggttttatcgaacacgacgatttttgcatcggagagggcctcaagatagttggagcccttgatgagcacgccctcgtggcttgcgccgccgatgcccgcaaagaagctgagcgggatggaaatgacaagtgcgcacgggcagctgacgacaaggaaggtcagcgcgcggtagatccaatcgacccaagcggcatccatgccgaacgccatgcgcaggagcggcacggcaatgccgagcagtacagcggaaatgcagaccgccggggtgtaaattttagcgaagcgggagatgaacgcttccgaacgggacttgcgggaactggcgttttcaacgaggtcgaggattttggaaacggtggactcgccgaattcctttgtggtgcggattttcagaacaccgtttaaattgatgcagccgctgatgatctcatcgccctctttgacatcgcgcgggaggctttcgccggtgagcacgctggtattaaggcttgcgttgccgctttcgaccacaccgtcgagcgggactttttcgcccggctgcacgacgatgatgctgccgaccgcgacttcatcgggatcgacctgttctaacttgccgtctttttcaatgttggcgtagtccgggcggatgtccatcagcgcggagatgtttttgcggcttttgccgacggcgtagctttggaacagctcgccgatctgatagaacagcatcacggcgatgccttcaagataatcgccgctctttgtccaaatggcgaggaagaacgcaccgagggtggcgagcgccatcaaaaagttttcgttgaacgcgcggccgtttaggatgcccttgccggcttttctcaaaatatcgtagccgataacgagataggcggcgaggtacgcgataaggcgcggaatgcccgtgataggtaagaactgtaacacgaccagcatcacggcggtgatgatgatgcggtacagcgtaatcttttgtttctttttcatgaggatacctcttgcaattttatatagcagttagatgacacattaccgtgtgaaaaagaccgactgtaccgagaaagcggagccggtcattttttctgactatacgggtagaccgaagtaaattaaagctcgatttcgcagtccggctcaaccttcttgcaggccttgaggacattcttcatgacagctttagcgtcctgaccgtcttcaaactcaacgatcatcttctgggtcatgaagtttacggtcgcatttgcaacgcctgcggttttcttggttgcctcttccatcaggttggcacaatttgcgcagtcaacttcgatgctgtacgtttttttcatggggaaaacctccgtaaaaaatcattttgttttgaaatgtggtgctaacgattaaatacttgcttaatcgttacagttgtagtatactggggccggaataaaaaatcaaggggttttcgggcgctgcttccaaacgggcgaacgggatttccgaaacggataaacggagggctttttatggcggattttgcactgccgcacgaccacggcaggcacaagcacgacgaagcgctgcatagagaattgatgaatacggagcgtttttcggctgtggcggatgtgttcaagcagctgagcgacccggtgcgcgtgcgcattttctggcttttaagtcaccgggaagaatgtgttatcaacattgcagcgatgatggatatgtcgagtccggcagtttcgcaccatttgaagtcgcttttagacagtgggcttatcatgagccgccgcgatggcaaggaagtctactataaggcgtcggacaccgagcagatcgggcttttgcacgagattgtggagcaggtgatggagatcacgtgcccggaaaaggaagtggattttcaggcttcgcaggaggagatcattcggaacgtgcacaattacctgattgaacacatcagcgagcgcatcacgatagaaacgctgtcaagagagttccttatgaacaccacgacgctgaaaacggtgttcaaaaaagtgtacggcacgacgattgcggcgcacatgaagcagcaccgcatggagcttgcggcggggctgctgctgaaaacgcagaacgacattgcgtccgtggcgcaggccgtggggtatgagagccagagccgatttacggcggcgtttaaggaggcctacggcgagctgccaacggaatacagacggcggcacgtgtgcggggcgaagaagcaaacatgtgacgcttgtgcaaagtgtccaatctgtgagccggaaaattttgcgaaaactgcctttgaaaaagtattttcaaaagagtaaaataatagaaaacgtgtggcgtatgtgcgtaaatccggtttgcgtatatgcgccgcatttattttgataaggaatggtgaaattatgaaacgaattcagtctgcgtgtatctgtcaaacgttgtatttccagcttaaagagggtgtggtaaaggattacgccatgcgcgcagtacaggaggaagttgcgaattacaagagcgggctggaacgcagccacacaaagtataaaatcgtagaggagcataaggaaacggacggctcaattgtgatcaaaattattaagcagtacaattccgctccggtgggcgactatttgaactgacggcatacaagtttataggtttcaaaatcgagcagcgagatgcgtaagtccggattttcgggcggcgtatttcgctgctttgtgatttagatttatatcagggagtaaaggtatggaagaaaacactaacgtatttttgggcacggagcgtgtgggcaagctgatgcgcggttatgcagtgccgtgtatcatttcgcttttggtcggcgcgctgtataatattgttgaccagatcttcattgcaaacgcggactacctcggttcttacggcaacgcggcgaacaccgttgtgtttcctctgactgtggcggcgctcgcaatcgcggtaatggtcggcgacggctgctgcgcgtatgtgagtatcaacctcggtaaaaaggacgtgaaaacggcgaagaagagcgtaggcaacgccgtggtgctggttttgcttgcaagcgcggctttgacggctgtgtatttgcttttggcggaaccgattttaacgatgtttggcgggcgtgtgaacgtggagacgtttcgttatgcgaaggagtacttcttctatat

SEQ ID NO: 4045 - DNA, 32759 bp, Unknown
  16S sequences of unknown bacteria
tatccgcgctgccgactatccctgccattgctatggcttcctgcgcgcctatgtcgtaatatccgtcactgccgtattcagacatatctgtgaatttgccgtagcctgtggctttcgccgctttctgccaatcgtcagggtcgtgggcgaaattcgatattagctgaaccgcgcggtactctgcgtaagccgtaaggtcggaacgcttttgaagctttccgctgccgattttctcccgcgccgtattcaggtaataaattactctgtctgcagccgcttttgtatccgccgccgttgctcttttaggagtttcgggttttgtttcgggtaacggttcgggattgttatttgcaggcaatgcgctcgctttgctttcaggttttttatctgcctcccaaaccgacgtattcggctttggttcggttgacggtacctgttcgtagctttgtgcagcttttgcacccgcctcggaaaccgctgcttcatccgtttgcattgcctcgcttgctgttaccgtttcggtaacaaccgagccttcgtcataccgaatatttgagtcgcttgcgttactttcattttttctgcaaccgacagttgttgccagcataactgcgataaaagtaataagcaaattttcggatattttcacacccgatgatttgttctttgaaagtatatttgttttccttttaagcattttattcccctcgcttttttctcttgcttttttgaaatatggcgttttttcggtcggtgttttgttggaaaaatagggttaatgtactgcttctgactgcttaaaagcctttatttatgcgggtttgctgaaataatcccataagaacatctgcaccataagttttaaaacccgctattcaagcgggttttaatttttaatgtatgaattttgtactcttttgaagtgcatatatcctttggcagcattgcttttttgaaaaagctatgctattatacataatggtgatttaaaatgatgaaggtatgtataataaccggcgcaagctcgggaataggcagggctgccgccgaaaatatgttaaaacgcggatacaaggtatacggtatttcccgccgcggcggcgacattgataatgtggtaagcctgtgtgccgatgtaaccgacgagcaggagattattaaagccgttgatacggttatggcggaaagcggacgtattgatgtgttaattaacaacgcgggctttggcatttcgggggctgttgaatttacaaggaccgaggacgccgaatgtcagtttaacgttaattttttcggtgcggtcagaatgtgcagggctgtgctgccgattatgcgaaagcagggctttgggcgcattgtaaatatcggctcggttgccggtgatatagctattccctttcaaagcttttattctgccgctaaagcggcgctgtgctcttacacgctggcgcttataaatgaggtgcgcgaatttaatataaccgcagtttgtattgagcccggcgacattcgcaccggttttactgcggcaagaaataaaaatacccaaggggacgatatttataacggaagaatttcacgttcggtagaaaaaatggaaaaggacgaacaaaccggtatgctgcctgagactgccggaaaatacattgccaaaatcgcttcaaagcaatcaggaaaaccggttttaattataggcgcacaatataaggccgtgggaattttaaaaaaaattttgccgctgcggcttatcaatcgcatagttggcgctatttatgcaaagtgaaaacgctattgagagctgaacctttaaattcaaaatcaataatatccgttatgtggtggtacatattacagcaaaaaatacttgacaattttgcatcaccgatgtattattgtattagcgtaataatacagtgaggtgataaggtgtcttggagcttttcaaatgataaacctatttttcagcaaattgccgatattattattttgaaaataataagcggcgagtacccaccgggctacaggcttgagacagtgcgggatttagcgcttattgccggggtaaaccccaacactatgcagcgtgcgctctcctttgccgaggaaagcggaattatttatgtaaggcgtggagagggtcgctatgtcactgaggatacggaaagaatagcggcgctcaaaaacgaatatgttttaaagcaaacgcgggaatttaccgagcggctgaaagccttggggcttgaaaaaggcgaaatttcttcggctttaaaaagtgtactgaataagggaggaactgacaatggagaacattcttgaatgtaaaagcctttcaaaaatttataaaaacgccgtggcattatctgcggttaatctgcaaatcgcgaagggcagaattgtaggattactgggaccgaacggcagcggtaaaacaacgcttataaaaatagcgaacggattacttacccccactgccggcgaaatactgatagacggtaagcctgtgggcgtggaaaccaaaaaaatagtatcatatttaccggacagaaattttttggcgcaatggatgacggttgacggcatgataaattacttcgccgatttttactcggattttaagcgcgagcgggcggacgcaatgcttgaaaatttaggaatagaccgaaagcgcaaaataaagaccctttcaaagggcacacaggagaaggtagcgcttattctggtaatgagcagagaggcggagctttatatgctcgacgagccgatagcgggcgttgaccccgctacaagggattatattctgcgcaccataataagcaactacaacgaaaacgcaacggttataatatccacccacttaattgcagatgttgagcagatattaagcgacgttatatttataaaccgcggcgacgtggtgctgtgcgacacggtggataacatacgtatgcgcgagggtaagagtgttgacgagctgttcagggaggtattcagatgttaaaaaagctatataaatacgagttgtattcacttttcagaaatcttttacccatatacgcggcggtgttgggctttgcgcttttaagcagattaaccttgcttattaaaaccgataacccgcttttgcaaattcccgcgggtataagcacaacggtttatgctttttcgataatagcggttttggttgtgggtatggtagttgtggtaatgcggttttacaaaaaccttttatcgggcgaggggtatttgacctttactctgccatttaccgccactcaacatattgtttgcaaactgctctgcggcgttttggttattataattgatttcattgcggttatcgcgtcactgcttataatgggtgcgggaacagaagtgctcgctgaagtttttgaggtgctgaaagccggctttaaatttgcgggggaaaagcttaccgccgctcagataataagcctgaccgcagaatttataatagcgattattataggtatgtttcagtcgcttttaatgttctacgccgctattgcgataggtcagcagtttaaaagcagggtaggcggcgcggtcgtggcttatatatgcctttatgccgcggtggaggtaataaacacgtttattatgataataggcatagctgtgttcggaagcatagaagtagatctgacaatatcagtcggcacatttcaggctttcttaggtttaattgcggtttacagtcttattttagccgccgtatatttttgcataacacgccactttctttcaaaaaagcttaatttagaatagtattttacataaatgtaggggaaaataatcatacaatattaaaagggaggaaattttaatatgtctgttataaatttaacttcggaaaactttgaaagcgaagtaatactgagcgaaaaaaacgtgcttgtggacttttttgcgaactggtgcgcaccgtgccgcgttatgtcctcagtggtggacgaaatagccgaggagcaccccgaaattaaggtgtgcaaggtaaatgtagacgaacagccacagctggcagcgagattttcggtagagtctattcctacacttattgctttcaaaaacggaatagctgttaattccgccgttggctctatgcctaagcgcgcggttttgaaaatgattttgtaatttagccgacagtatagtaccaagcggaattgtcaacctaaatttattttaaggttgacaattccgcttttatgctttacaatatatttctgtcgggagatgatgtaataatgaagaaaagaatactgaatataacatttgcggcgctgttcacggcaattaccgccgcgctttcacaggcggcaattccaacgccgtttggggtgccgctcactttgcagacctttgccgtagcgctgtgcggctatgttttgggcattaaatggggacttgcctcaattattacatatattcttctgggcgtgttcggcgtgcctgttttttcgggctttaagggcggtgctcaggtgctcttcggcgctaccggcgggtttattttcggctttttgtttttggcggcgttttgcggtgctgccgaaataattaaaaataaataccttaaaattctgccgggctttgcggggcttgccgtttgccaccttttaggcacggtgcagtatgcgcttatttacaaaatggaatttgttccggcttttttgctggtttccgccccgtaccttttaaaggacgcaatatcggtggcgctggcttttctgccggcggtttacattaaacggctgcttttaaaaatgcacataggctgataaaaaattgagcgtgtcgattttttcgacacgctcaaaagttatagggaattaagaaatttttcaaccgtactgttaaactccacgctgtttgttttggctatggagtgaccgccctttaaaaagcaaaggcttgaatcgggcagcgacgccgcaataagctttgtatgcttttcttttataacgtcctgcgttcccgcaattacgagcacggggcacttaatgcccgaaagtctttcaggctgaatattcggctgctttgccattaaataaagcagctcgctgcggcgctttgcgcggcggctgaagtgtgataaaaggctgaaaacggcaaaaagcaccttaaccggaattaaaaatgaacttttaagccccgaggggaaaagatttgcgccgttaagcaccaggctggctaccctttcggggtattttaatgcgaaaataacggcaatattgccgccgtccgaaaagcctaaaatatttgctttttctatattcaggctgtcaagcagatttttaaggtcgtctgcaaaggtttcaagcgtaaagggcttatttccgcgcggcgacgccccgtgcccgcgcgtatcaaccgcaattacacggtactcatttgcaaagcggtcaatctgattgacaaaatagccgctgctttctccgttgccgtgcagcagtataagcggcgcgccgtagcccttttcggtaaaattaagcgaaaagttcattgctgcgccttcaaagctttcatatgctttttgagcgcttcaaaggtttcgtcgcatatattatgctcaattttgcaggcgtctgccgcggcagtttcatcacccacgcctatttcctttaaaaattcggtaagcacattgtgccgttcgtaaatttttccggcaatttctgcgccggcgtctgtcagtgatatatagccgctcacgtcaaccgttatgtagccgccctcttttaaaagccctattgcgcggctgacactgggttttgaaaaattcatatactcgcttatatcaattgagcgcacaaactgacttttgcggcttagaataagtattgtttcgagatacatttctcccgattcctgaagatgcatggtaacgcttccttctctgtttagtaaattatataataccatattttatacattaaaacaagtgaaaattgttaataaatctcagtgtgccgacttttcggcacgctctcttattttttctttttttcggtgcgcctgtactccttgggggttatacccaccgcctttttaaaggctttaagaaaatgcgagctatcgtaaaatccggtttgcgccgcaatagcggtaattgtttcgtcggtttcaaaaagcagctgctttgcaaggtttatgcggcaaaagtttatatatgaggttatgggctgtcctacctccctgtggaaaagccccgaaagatacgtcgggttaataagaatatgctttgcaatttcatcaacagtaattttttcacggaaattatcctgaatatatttaagcgcctgcaaaacataagggcttttatttgcggatttctgatttgtaagcagtgggattttgaactcggtccattcatcggcttgctttatttcaaaataatagcgtaccgaaatataagaaggaatagaatacaagctgatttgcagcttacaggcttcattcgaacgaacggaaaagcttatataaccggtttttaatatatctgtcagtgagcagtcgtcggctttatgctctctgaaaaaccaaattttaaataaatcacttgattttacggtgaatttacaatattcgttttttatagggtcgttatgtaattcgtaaacataattatccggctgccgcggcagctcaacaaatttgtggctggcgaagaaggtcataaacgtatcaggtgcctcgtgcggcttggcagactgtattttaatattacttatgtcaagcgccagctcgggaaggcacataggctcaaagtattcaaacgccacggccgaaacctttccgaacaccatatcgttgttaatgcgctcatattctattgcggttgtaactatatattcaatacgtcggctcagtatcattgctcttgcttgtccggtgacggaagtttcaagcattgactgaaaatatgtggcggcgtcaggcaggtagtctactacctgctttgcatcacattcaaattcatggctgaaaatacggtaatccctttgatagccttttcctgcgttatcgtcggcaagtggcgatgaggcataaagcttgtactcggcgcaaaaaacagaggtttgcgaatttgcaggtgtaaaaatccattcagccgaacattcctttgatataaaggaaagctttttatattttctggtttgctcatcgcgcgtattataataagctccgttgccggaaattattatccaaagccgctgattttcgctttgcggaaaggtaaatgcttctgaaaaattataaatattgaccgagcaaagttttaatgagtagtcgggtctgttgttttcaagtgtcgataactgcaaaattcatcaccctgttaaatattaacatattttttaataaaacacaagtaagaaaaaaatttaccaaaaataactatttgcttatgattaccttaaatgtgcaaaacaaagttaaaatgccgaaatttaaggcgattttttttttttttgagtacaagcgacgattggttgagtactgaaagtttaatgaccgatgcggtaaataatattgaaaaaatcaacaaagtgagaaatataccaaaaatgaagatgattgtactattactgaccgttacgataagttatcatataaacagatacattgataataacttttaaataatttatacaaaggggctcggccatgaaaaaaactattgcgttattgcttgcggtaatgcttacaataccggctataatttgcagcgccgctgcggataacggggacatatcaaagctggaaagcagccgctccgccgaaaacggttattcaaattggctgagcgaaagcgggacggcagcccaaggtgaggttataacactgggcggcgataccgccgcaacgggaaaggatgaaaacagccgcgaatacaccgagtggcaggtaactcctgccgtttcctcgcgctattacataaagctgacatataaaatcaaggatgaaacgcgcgataatgttgaagtgggaatttcggtcgataataaatatcagtataaagaactggagcaggtaaagcttgaaagagagtattacgatgttaccgagccgaccgaggattacaaaggcaatcaggtgcgccccgagcaggctgaaagcagaaacagcatttgcaattatttatacgattacgcctatgagtattcagagccgctttcggtagctctgaccgcaggcaatacccacaagctcagaataacaagccttttgtgtttggctgaaatagaaaaagccgaacttgtgccgacgggcaatatagcgacttataaagagtggcttgccgcgaaaaagcagagcggcactaaggaagccggcggaacggtatttcttgagggtgaggactattccttaaaatccgctactaccgtttatcctatatcggataataaatcagccgccacatcgccgcaaaagccgggcaaggttttacttaataccgtgggcggctaccattggaacggcgtagggcagtatataatatggaaaataaacgctcccgaagacggactttataaagtgtgtatgcgtgtacgccagaatacggcgccggggcagacctcatcaagagccttgtatataaacggtgatattccgtatgaagaagcaaaggcgttttcctttaaatacgacgcctcgtggcagacggtcacgctcggtgacgggatgtatgtataccttaataaaggcgaaaacgaaattaagctgcaaaacaccctcggcgagatggacgcggtgctgcggcttttaaataacagcgttgatattttcaacggcatatataataagcttttgccggttttgggcgcgtcacccgaccttatgcgcgattaccgcataggcaagctttaccccgagcttgttcaaagcctgaaagaacaggctgaggttttggcggctgccgctgattggattgaaagctactgcggcaagggcaactcgggtgcggcgctcatacgctcgtttgtgcggcagcttaataatatgcacagcgatcccgacaaaataccgaaggaatattcttactttaaaaccaatatcggttcgctgagcacctggataggtaatgctgcaaagcagccgcttgaaattgattcgcttacattcggaaacgacagctctgaatatccggcaaaggcaggctttttcaagcagcttatatttggaataaactcttacctttattcatatgttaccgattacgaaacaataggaacaaaggagaaaaccgataaaaaggaagcccttactgtttgggtgggtcagggcagagagcaggcgcaaattataagaaatatggcggcaaagtcctttacacccaaaacgggcacggcggtcaatgtcaagaatgttgccgtttcctcccttatgatggctacggttgcgggaataggacccgaccttgttgtggtttcctcacccgatgtttttaactttgcaatgagaaacgcggcgtaccccgtttccgatttttccgattttaatgaggttgcggcaagatttgcaccggcagcccttatacctgtgaaatattgcgataagtactacggtttgcccgagcatatagatttcagtatgcttttctaccgcaaggatatattgcagcaggtgggaatttcaaagcccgaaacgtgggacgatttgatttcagcctcctcggtgctttccaacaacaatatggaaataggtctgccgtcggctgcggatagctttttgcttatgcttaagcaagcagggcttaatatttatgaggacggcggaaaatactcggtgcttgacagtgtaggctcaataaatgtatttaccgagtttaccaacttttatgtaagctacggcttcccgctttcctatgatgtggtaaaccgtttcaggtcaggtgaaatgcctatagccatagcctcggttgcaacctacaactccttgcaggtttcggcgcccgaaataaacgggctttgggaaatggatatgctgcccggtaccttgcgggaggacggtagcattgaccgcagcgcacttgtaactgtgggagcggctatgatattatccgacaccgataaacccgaaaaggcatgggaatttttgaaatggtggacggaaacagaacagcaggtaacatacgccgatgaaatagaaagcgtgctcggaaaatcatcacgctataatccggcaaatttaaaggcgctggagcagagcaactggagcagtgagcaaaaacagaaaattctcgctcaggttaatatgctgggtgcggtagagccgatgccgggcggatattatcttgcgagaaacataaacaacgcattcagaaatgttgtttataacgacgcttcgcctacggacgcactttatgaatacacatataagataaacgccgaaatagataaaaaacgcaaggaattcggacttgaactaaggcaggtggcaaagagtgaaaaataagcaaaaaacagtcggctggaaatttaaggacggcttattttctatttgctacttaggcccgtttttaatatttttcacacttttcaccgtgctgcccgtagtaatatcaatgttcctttcctttacgaattacaatgtttttgaaacgccgaaattcataggctttcaaaactatatggagcttttattcagtgacgatacctttttaatagcgctgaaaaacacactggttatcgcgcttatttcaggacccgtggggtatctggcatcgcttttggtggcgtggtttataaatgatttaaacccgaaaataaggccgcttatggtgctgtttttctatgctccgtcaatttcgggcggcgcgtatatgatatggcagataatgttcagcggcgacgcctatggctatgccaactctatacttatgtaccttaatattattgatgagcctatacagtggcttaccgacgcgaaatatatgctgggtcttgtaatcgcggtgcagatatggatgagcttaggctcgggctttctctcgtttgttgcgggtcttcgcggaattgaccgctcgtattacgaggtgggatatgttgagggaataagaaaccgctggcaggagctttggtatgtaacgctgccatcactgaaacctcagcttattttcggtgcggttatgagtatttcgggcgctttcggctgcggggcggtatcaaccgcgctttgcggctttccaagtaccgattacgccgcgcatacaatacttaatcatatggaggactacggcactacaaaatttgaaatgggttatgcaggcgctgtggcaactattttgtttttaatgatgctcggcacaaacaagcttatacaaaaggctataagcaatgtgggcaattaaggggtggtaagctgtgaaaattaaaatacttcatcgcaagccgcgcgcggcaaggtcgcttgcaggcaataccgcaaactttatttttctttgcctttttgcggcggttatggtgctgcctatggtttacacaataagcaatgcctttaaaccgctcgacgagctgtttgtatttccgccgaggtttttcgtaagaaaccccacggttaataactttaagggtatatccgccctatttaccgaaagtatggtgccgttttcgcgctatgtttcaaacacgctgcttattaccgccgcgggaacggtaggctcaatttttattgcgtcggcggcgggatatattcttgaaaagaagaaattccccgggaaaaaccttgctttcaaaataattgttacggcactgctttttacaggacccgtaacggcaataccgaactttcttataatgtcaaagctcggaataattgatacatatttttcaattttgctgcctgttttcggctcctccttcaatgtctttcttatgaagcagtttatggtgaacgtgcccgatactattcttgaggcggcgcgaattgacggagcaggcgagcagcgcatattctggcgaatagtaatgccctcggttaaggcggcatggatgacgcttataattttttcgttccaaaacctgtgggggcaaacgggcggaaatactatttacagcgaggcgcttaaaaccctgccttatgcgctctctcaggcggtaacggcgggaatttcgcgcacgggagaaagcgccgctatttcaatgcttatgatgaccgtgccgatagcagtgtttattataacgcaaagcaatgttatggaaacgatgatgtcatcgggaataaaagaataacacaccggaagggagaagaacagttgaagtacggttttaaaaaatcgacccttataatatcggctttagccttgattttcgcaatattgttcagcgttccggtgagtgcggctgaattttacagctatatatacgataatgatgaaaaagcggttgcggcgccagatgcggcgacccctgccggtatgcttacgggggaaaatatcggcggctttaattccccgcaggatctttatgcttataacggaaggctttatatagccgacacaaaaaacaaccgtatagttataatggggctttcgggcggaaataccgaaataatagcggattttaaaaataacggcagggaagataggctttccgagcctacgggtatttgcgtgaccgcggacggaatatatattgcggatacgggaaacgcacgggttataaagcttaatgaaaacaaggagtgtacccttgttattgaaacgccgaatgaggattcgttcggtgaagactttaatttttcacccacaaaggttgcggttgacgatcacgaaagaatttttgttatttccgcaggctacaatatggggcttatacagtttgataaaaacggcggttatcttaaatcaataggcgcgccgaaggttacactttcggtaattgagcaattttggagaaagctttcaaccaaggagcaaagggaaaggtcacagtcggtagttcctacggagtattcaaatctttcggtttcatctgacgggtttatatatgtaaccaacgaatcaacatctgaggaggttgaggcgttaaggcggctcaacgctaagggtaacgatgtattgaaaagaataggcgaccctgcgggggacgttacaaccggcggacttacctacaagggaaattcggcaataattgacttttgcgagcttgaatacggtaacttcgccattcttgacagaaagcgctccagagtatttgtttacaacgaaagcagcgagcttttatatgttttcggcggaccgggaacatacagcggcggtatgagcgtgcctacatctatggtttacagcggcggcaggttttacataagcgactcgggcagaaatgccgtgtgcgtttatgagcttaccgaatacggcaggcttttcggtgatgttgcaaaggcacagaaaaacattgattccgattcggaagaagccggctggaaagagataatgaaaaataacagtaactgcgcccttgcaatgaacggcatagcaaatgcggcttataaacggcacgatatgaaaaccgctatgaaatactacaaaatggcggacaacagagacgattattcaaaggcgtatgcttttgtaaggcgcgaatatatagaaggtaatattgccgtgattgcggtagctattgttgctttaattgcggcggcggttttagtttcaaaatggcgcagtaaaaacgcggaaaaaatttccgccgactcagcactcggcagaataggatttatacggtatgtctgctaccacccgttaaagggctattgggaaatgaaaagggaaaagcgcggctcggttgccgtttctgcggtaattctcggtgcggcggtggttgttatgacggcttccaacctgtttaccggctttattttcaacacaaacaacctgcaaacctataatatgttcggtatgtcggcgtttcttataggcgcggtgtttatttggtgtattgcgcagtggtgcgtaacctcgcttatgaacggcgagggaaagttcggcgatatatttattgctacctgcacggcgctttggccgtatatagtaataaataccgttgcaatacttttaagccgtgtgctgcttaaaaccgagggcgatttttattatgttctggcagctgctgcaattatttattccgttgcgctgataattgtaagcgtaatgcagacgcataacttcacagcggcaaaaacggcgcttgcaatacttataacggtagtggtaattctgcttatggtatttataggtatgctggttgtggcgctttgccagcagcttattgcgtttgttaaggatatttcaaccgaagtgatattgaggatatgaggtagtgtatatgaaaaaagtaatttccgcaatactgtgcacaatactgatattcgcgttactttcgggctgcggcaatcaggtttatgaaaaaataagcagtaaaaatattttaggtcagggcaccacggaaaataataccgataacacggattttaagctgtaccttgaaaacgattatttacagctttatataaacccggataccacggaaattaaaacggtaaataaggcggataattccgaatggctttctaccggtgcggaaaccgccggtgacgcggcacgcgcgcttatacagcttacatatatagactcaaccggtcaaaccggagagcttaactcctatgaaaacgccgtgcgtgacggtcagtatgaaataaccgagggtgacggcagggttaccctaaaatacagtataggcagcttttcatcacaggtgcttattcccgaggttataacagaggagcgctacaaacaactctgcgatagctttgaggacgaatttgcgcttatgaaatttcagaattattattaccactttaataaggatgaaattgaaaacgaggagcttaaaaaccagtacatttcaaaatatcccatactcaaaacaaaatcaatgtatgttataaacgattcggttttaaactcccccacggtcaaaaaggaatttgccgacgttttaaagcaatgcagctataccgaggaaatgtaccgcgaggactcgaaaaattttaaaaacacctcagattcggtgaaagaggcagggtgcaatataagtattgagctatctcttgacggcagcacattaaaggtatatgttccgaataagagaatcgaaatgtacagcgattatttaataacgaacatagccctgcttaaatatttcggcgcgccgaaggcgaacgaaaagggatattttcttttgcccgacggcagcggctcggttatgagcttttataacggcaaaaccgacggtcacgaatactccgctgcggtttacggaacgggctactccctttcggggcgcgagaaaacgtcaaactactacgacgcgtcacttccgatattcggaataaataagggcgaaacggcggtttttgccgaaataacaaagggcgacggcgcggcggatattaaggcgtattcgggcgatgaacgcattgccccgtttgtatctccccgtttcagattcagggagacctacaccgcgcagctttcttccggcaaaaaggagaatttcattaccgttcaaaagcagcgctatgcgggggatgtggaggttgactaccattttctcaccggtaaaaacgctgattactgcggaatggcgcagttctacgctgataagcttttcggtgataccgataagaaaaccgacaaaattaacgttgtgcttgaatacataggtatgctcgataaaaaggcgcagcttttcggaatatcctacaataagaaaattgtaacatcaagctttgaggatattgaaaacgaggtaaactccctttatgatagcgggcttaacaatataaacgtaaggctgagcggctggttttcatcgggttattcgcacggctcgctgaaaaacctaagcgcgcagaaaaggctgggcggcgaaaagggacttgactccctgcggaaaaagcttgacggcttaggcgctgttctttggtatgacgcggatgttcagtatatgaaggtctccggcttaaattcaaatacaggcgcgattaaaacaataagcaaggcggtgggaaccacctgctcatatgatcccgcaacatttttacaggttaaaagcgtgtatgagcgtagggtcaataatatttcggcggtaacagctgaaattgagtatttgagtaaatgggcagggaaaaacaaggcttacggcgtttccttaagaagcataggcaagagcgttaatgcaaattacgatgaaaacgccttctgcgataacggcgccaccgtggaaaaaaccgaaaaggcgctgaaaacacttaccgaaggcggtacaaggcttatgacagccggctcaaataaatatgtgcttaatacggctgatatttgccttgatactccgcttatttccaacagatatgacagcacggatatgtctgtgccgtttctgcaaattgtgctgcgcggcagggtaagctttgcgggcgcggcggtaaatctttcggggaacagcagcgaggcaattttgcaggcagcgcaaacgggagcggatatttactacattttcacctgcgaaaattccgatgagctgacagacagcaattataacgccttttattctactgacagttcagcacataaggatgagcttactggtatggtagcaaaataccaatcggatttagcggaaaccgcgggcaaaaaaataaccggattttcttacattacggaaaatgttacgaaaaccgattttgaaaacggaatatgcgtgtatgtgaatttcggaaataccgattacacggctgacggaattaaaatacccgcaaaatcgtatacggctgtaaaggagtgatacttttgaaaaacaaacgcctctcgttagaggctaaaagggtaaaggtaggctatttgttcacgctgccgtttataataggagccgccgttgcaatagtttaccccataatagtatcagttatatacagctttgcggatatcacggcaaacgcttcgggttacaatataaagtttgtaggtcttggaaattacaacaatattttcaatattgaccctacgttcaagcgaatacttttaaacacgcttaaaagcacggcgcttaatgtgccggtggttataatattcagcttctttctcgcaagcgtgctcaacaccgaatttaagggcaggggaatggcgcgaaccgttttgtttttacctatgatacttaattcaaacctggttaaaagcattttaagcggcgatgcggttatgggctcggtcaccgagaaaagctcggctgataccgcgcagatatcgggcgcgtttgagggctttttatcaaagcttgatataggcacgggcgtgaccgacctgcttgtttcctcggtagataacattacaaacattcttgcaatgtcggttatacccataatcataatgctggcggggctgcaatcggtttcaaaatcggtctatgaggcatcatatgttgagggcgccacaaagtgggaggtattttggaaaataagccttcccatagtaagccctatgattttggtatcggttatttactgcattatagattcattcacaagtgttgataacgcggttattgaaaaggtaaaggcagtcagctttacagaccttgagttcggtctcggcagcgctatggcatggtcgtatttacttatagtgcttgcaatagtggcgcttgtgtatcttgcggtaaacaggtttgtttcctacagtgattagggggtggttttgtgaaggaaaaaacaaaggatttctataaaaaaacagccctcaacacggtaataacggttgcaagactggggcttttcattctcttggctttcgtaattatctatccgttttttacccagataatgtctatgtttatgaaacccgaggatgtttacgattcaaccgtaacctacataccgaagcatttcacattggataacattaaaagtgcggcaagccttttagagcttaaaagctcgttcttcataaccgttgggtttaccgtttcggtagcggcattgcagaccttttcaagcacgcttgtgggctacgggctggcacggtttaagtttaagcttaataagctgcttttaatgcttgcggttataggaatggttttaccgccggtaatcctgcaaataccgctttacacccttttcagaaatttccgccttttcgggcttgttccgcttttaaacggcggcgagggaatttcctttataaacaccccgctgcctatgctgtttttcgcggttacggcaagcggcttcaggtgcgggctgtatattcttataatgcggcagttttaccgcaatatgcccatagagcttgaggaggcggcgtatattgacggctcaagctcgttcggagcgtttttccgcattatgctgccaagctcggttactatgattgtaacggtctttctgttcgcatttgtatggacctggctcgactcggattacacaaagctttttatgggcgaaatacccgtgctttcaaatatggtatcggcgcttaacgggctgcacagcggcggcgcgtcggatgaggttacaagaaaccttatagcatatgcgggaacggtatttctggttcttccgcttattgtgctttacgcatttacccagcgtttctttgttcaaagcgttgagcgcagcggacttgtaggttaaataacggcggtaacacgccgaaaaaaataaaaggagaaaagttatgaaaatgaaaagaacattttgcctggcactggcattgctgcttattttctcggtttgcggctgcaaaaagaaaaccggcgatgattccgaatactctgtttggtatgaggatgaaattataagcggcggaaaaagcagcaagagcgataaaaccgacagctctaagagcagcacaggctcgggcaaaagcaacaccggcaacaagggcagtggggcaagcgataaaaatgagcagatagccgaaagcacaaaacttgatttcggcggcaaaacaattactctgctgcgcgagtggggaccctatgccagaggcaaatactcctcgtgggataactggctcaacaatttagaggcggttgaaaaagagtgcaatgttaaaattgtagagaaaaaatggtcggttacgctggcgagcgaaatgcttgcgggtgtaaagccggagggtaatatttaccttgtgagcagcggcgaggtgtattctcttgccaccaagggctatatagccgggcttaacagcgctatgaagaaaagcggaatagatatgaccggcgagcttttcaataagttcaataccgggcttaacaatataaacggcgagcagtatacggtgggtctcggctttgcgcgtgtgccggcagttattctttacaataaaaaggtaactaaggacgcgggctacgatatagccaagcttgtaaaggacggcaaatggacttgggatatgatgaccgaaattgccaaaaagaccaccgttcgctctgcctcgggtgatgtttcgcgctacggcattgcatttggtacaaccgcgcctgcagctatggcggtaagcaataacagccatgttttatacccgaacagcagcggcaaatttgaactgcaattaagcagcgccggaacaaaagaggcgttgcagcagctttacgattgggcaaatgttgataaggttgccgagtataactggggtcaaaaatcgtggaccgcgctggatgaggattttgcaagcaaaaaggttgtaatgctttttgcggggcataacggtataaccgccgcctacaataagcttaccgatgaatacggcgttgcgtatctgccgaagggcccgcgcgcaagcggctatgtatcataccttatggatgaatacagctatgttattccggcagcatattccgatatggcggcagacctgcttgtgcttttgagtaagctgcacaggctgcccaagggctatacggtggatgatgagttcagggatgaatggataaggtacttcaaggatgccgacgcttacaaaatgttcaagaccctgcacgacggcagcgttaagcaggtatgggacggcacaaacaaaatggctcccaacgccggtgccaccacatatgacagcgctttcggcaggcttttccagggcgagctgacccccggtgcgtttattgatacataccaaagcgcgttcaaggcgtcggtcaatgattcggcaaagaaggttacatataccggtccgcttaaataataacccacagaaaggcaacggtgataattaaatgaaaattccgagaataaagcgcggtatagctatattattatgcgccgttatgacgttcggaataagtatatttacggcgattgagtcggtagcggacgatacggttacggtggataagcagctgctgagcttcagcggctgcgataccggcaccgcctttgccatgcctgacagaatgaaatatattaacggcagcaacggctttaattataacggaaccaaaagcatagaggaaacggctgagggcggcaaatattttaaccttgcccttaataagtcggttaaaaagcaaacgaacgatactgtcggcggcagagataagcgtatggctttttcggtaagtgtgccggcgaattatgttgagtatattgatacgatcacccttaattactcaaataatgtaaaccaaaagaatacatatacaaaaatgtataccgtaataggcattaccgacggggtgaattacggcaagacggttaaaaaatcaattcccttcagctccggtgaaaacgggaaaataagcgttgccgtttcggatatgcttattacaaacgaagcgggctttttgggcagctgcggcagcaataaatggagcgacgccgagacagacggtatagcaagcatactggtttacataacaatgccgcactgcaagggcagtgaaaattgggcggtaggcataaagggacttaccgtaaccttaaagggtaacgccggtgagcttgaaaatattgacacaatagcccccgaaatagagaattttgataaattcgatacattggaggagctgaaacagaacggcaccttcgttgcaaacggtgactttgagcttacagataaagcagattccgcgcccaatgccctgctttacaagggtaaaaaggactccggcaccgattatgattcgtcccttgagataaaccttgataagcgtgtatccgaggttaagggcttaacctttaaggtgtttaacctcagcacccaaaataatgctgttctgcgctgctttttagatacgaaaagcggcggtaagaataagacctgccagtatattactactgctaagctgggcgaggacggctttacaagggtaagaatttattttgataacgtaggcgaaaaaacgggcgatgagttttggggcggcacctcctcgggctattcaatgaccgacgaggaaataagaaacattacaaagctcagaataagaatacccgatcttttaaaaaccgacgccggcgttgcgtttgacagctttgaatacatagtagaggatgacagactgctgagaaacgtaacccttgttgactttgataactgcgagccgggcggagatgcgcccgagggcattaaggttgagggcagctataaaggcacggtgaaggttgttgaaaaatcgggcggtaaaaaggcgctgcgcgtttactatgacgcagcggcgggcggcactaccgataaaatcaacgagcgctcctacgttgcggttacggttaatgtgccaaagggaaccctgcgcaattccggtgaaatacgcgctagggtgaccaataatgcggtaagctgcgaggattccaacaagacccccaccaatatttattaccttataacggtaaacggtggcgggtattacggcaggtacggtatgaaccactgggcgcccaaggcgggggaacaggcagactgcaccgtgcctacaaccacgctttaccgcatttcctccgactggagcatactcaactggtttgatacgaaaaatgtgccttactggagtgctgccgagcttgatgaggttgataaaataacagtttacattaccgcgcctgcgtgcaagggtaatgagggctggagctttgaccttgacttacttgagcttttttatactgaaattcccgaatattcagagggggagaccagaaaaatagcccttgcggacacgccggaaaaaacaagctcggaaaacataagcgctgagatttcagagcttacaagcaacgataaaaattacagaaaattcagccgtgttattaacattgaaaccaaaaacgctgaaaataccgagccggcagttattttaaaccgctgctgcaattacctgagaaatcttgccccgtttacagataccgcaaccctatttatgtacgcccgggccgataaggatacggagctgaaaataaatatggtaacgaaaagcggcggcaaaatgccctttacggttaatattaaggcgagcgaaaaacaggatttcggcgaatatgaggttaaaatggcggaggttataaaggcgtataacgagcaaaacccgaatacggcggtaagccttaacgatatttatgcatttgagcttttgcctgtggcagccgagccctcgcttacacagatagcctgccttacattatggactaaggaggtaggcagcaccgctgcctccaacagctattattactacgataacggcgttgcagttgaggcatacaacgattaccttttaaacaccgatattgtgaagattgaaagctttcaggcggcgggtaaaatatccgagtggggaataaaggtgcccgagggactaactcccctgctgtttaaaacagtttcactttatgataaggacggcgtaacaaaggagcccaaaaataacatatggctcacctttgatttgccgaacggaacaaatttgaaccagctttccttctacaaggtgttttttgacggctctttgcttaaaacccgctatgtaattgagggtgataagctcagtgttaatacctttacggtgggcagctacatagttttcgcgggtaaggtgaccgaggcaacaaacccggataataccgaggaagttaaacccgttacacctgaaattaagaataccgacagcacggattacagctacgacagcgacaaaaccgatgaaagccccgacgacggcgaggaagaaaccgagcagataataaaaaggcggaaaatgatgcgcaaaaagaaatcgggcgcatcggctgatgagggtctgccggtgtgggcgatagtctgtatagcggcagcggcggtaattgttgtgtgcggcgcggtgcttacggtagttattattaaaaggaagaaaaggggtactgtaaaatgaaaaaaataattgcattgtttcttgtgctccttttgacccttgcggtaggctgcaatgagaaaaagccgacccccggaaagaaggacaccaccacatcatcctccactgttacagattcttcggatgaaaacagcagctcggaggacaccgtatcggataacagctccaaagcatcggaaatatcctctgccgaaagccgggctgatactaaaaacaatgtatcaagcagcagcactgcatccggcggcgataaaacaacagctccggctgagcatattaccgacaggcttaaaaacgggataaacctttcaggcgccttagagggcggcaatgctaaaaattattccgatttaatgtatgacataagctattacgaaacaatacgcgccgcaggctttgaccatgtgcgtattacggctaaccccgcttactatatgctgagcgacgcgccggattacactgtggataacgaatatatgcggcttgtggatttggcggtaaacaacgcgattgactcagggcttattgccgtgctggattttttccacggctgggcgggatatcttgtaagagattttgatgcaaacagcgtagcgttttataaaatctggcagcaggttgccgaaagataccgcgattaccccgatacgcttatgtttgagctgataaacgagcctaacaaaattacaaccgacatgcttaacgagctgcaaatgaaaacggtggaaataattcgcgaaacaaacccgacccgcgttattgctcttgcggctaacgagaataacggcgtttggcaaatgtggaataccgagttccccgcaaatgataaaaactgcattatttcgctgcacgtatatgatgatatgtcattcacgcaccagggtgcaacctgggacggaagcggcagtaaagcacaggtgcgcctgaccgaggctacgaaaaagaatgtaacaagcacgcttgaaaattgcaaaaaatatgccgaaagaaccggccgcaaaatttggataagcgaatggggcacatatcttgaagtagcagataagggcgatgtttccgattatacaaatcacttcacgaaggaatgtaaacggctggggcttgcgcactgctattgggagttttaccagggctttggtatgtacgacctgaaggcgggcaaatggaaagactttattttagataactttaatttttaaccgaggagaaaccaatgattgattttaagctgaaacgcggaatgaatttagaccaccatgtggcagagccggggaaaaaactggcgcaggaaaaatattttaaggcaattaaggaagccggctttgaccatgttcgtctgccctttgaattctcccttaatactgcgggaatttacccgtgcgatgaatattacgcacggattaaagccaccacgcaaatggcgcttgacgccgggctttgcgctatggtagacgtgcacccgtttcataaaatgcaggacgacccgcacgcaataaagccgcatttttataaaatgtggggcgagcttgccgacgcgctcaaggatatggatgaccgtgtaatttttgaaatttacaacgagcctgacggcgcttttaactttgaggttttaaacgaggttcagaacgaggcaatttcaattataagaaaaacaaaccccaaaagacaaatagccgccgcgtgcgcgcactgcaatacctttgaaaacctttgccaccttgttttgcctgaggatgacgagaatatattcgtcaccatacacgaatacacgcccatgagctttacccaccagggtgccgattggatgaagggtgactggcccacaggcatacactggggaacacaggcagataaggaccttttaaaggagcgcttcaatatggcggccgcctggggaaaagagcataacagaaggctgcacctcggtgagttcggcgctataaagaagggcaaccacgaggacaggattgcctggacgcaccatttaataaagctgagcgaggaaagaaatatagcgtggtgctattgggaactgggctttgtatacgccgcatatgaccttgaaaaggacgaatgggataaggagtttttgaatatttttcagaacccgtaaatagggcggcgataataaaaaaaggggtggtgccgcggaaaaacaaatatcccggcgaataaaataaattttaagtaggtgttaagaaaatgaaaaagtcaaaaaaacttctcagcggtcttttaagtttaatgatgattttcagcagcgcatttattattaacgcggcagataccgatacagtggaaaaaacggtaagcctgcttgacctttcggggctttcgtcaggcgagatttcggagctgccctacggtatggcgagtatcaatgctaaggatattaaagacaattataccggcagcaggcacatagccgcggttgacggtaaaaaggtattaaggcagaattttgacgttaaggctagcgcatttacaacaaacaatctttccgaaacaggaaacggtaagcttgccttgaccgtaaatgttccgagtgcatatcttccgtatcttgaatatataagccttgactataataatgccacaaacagcaacttgcgatttgagttcggaatatacaacgggacgaattattcaaaaaagactgacgtaaatgacagactggaaggcaatgttaaatatagtcctcttaacctttataaggtcgacgaatggggagcggttgcctggatggataagaacagcgccgttaaatggaagaaggaagatctttcaaccgttaggcagctgtttcttatagtatcaactccggaaagcggctgcgacggaacagagggctattaccttgatattaaggatattgccataaccgtaaagggcagtgccgatgagcttaatgcggctgaagctgcggcagcagaggcctggaaaacattatatgattttgaaggctacgcggatggcacaaatgaaccgggcggagtatctgcctcgggcgctgtttctaaggttattgaaggcagtgaatattccgcaagcggaacaaaggctttgaattatgtaaacaccgctgtaaaggaatatgaagataaatcacttgcaattccccttaactcatacgttaaaagagctaccggtgtaagcttttggatttataacacggggaaaagtgaaaaatttaaagtatatctgaatgacggctcaaataatattgcacagaagcagtttaccgttcctaccggagcatatattaagctgtatgttgatttcaacgatatgaacgaactcaatgacaaatataatacttgggatatacctaataaaaagtctttgacggaagaacagataaaatcattgacgagaattattttgcagccgacaaaaaacaataaagagtcgcatccaggtttttatattgacgacgttaagtatgagcaggacgcagagcacacatattcaaaaaccgtgccgcttgacaatgtgaccttcggtaccgatacgactgcggcagttaaggatgataaaatagtattcacaccgggtgaaacagctgttacagcgcttgcaaaaataaatgttcccgaaaaattctttgcgggagcttctgcggtgacctttaactttacaaacactatagcatcagaagtcaaagtaggtgcgcttgtaaacggtactaacgatgaaggaaagagcggcttctactggaaatggggcgaaaataaagacgccttcaagatttcggcaaatgctgaaaatgccgcttcaacactccgttttgacggaacgcagagaatatttgaatcaaacgacggctggtggataggaaactggtgtggctttgctaccaatccaccctccggttcggaaaaggcgacaataacaagtcttgatttaagaatatttgactttgccggcaccgagggcaccctcacgcttaattcaataaccgtagcctatgccggaaacagcgttaaagcggcagccgaaatagaaaacggctctgtaagcatagaacgcgcaaatgtatttgcgggtgatagggcaggctttacgcttaaaccgaatgacagctatatttataaacccggctcgcttaaaataatcggaaccgacggcagagaaattaaggttgggcgcgatgggttcaggaaaaccaatatcggttattactacgtatttgatatgcccgaaacagacgttgccgtttcagctgagtttataccggcaaaaacagtgataatttctgccgaggcaaatgaaaccgataaatcgcttaaatttgacttgacggcagcaacaaagggcggcaacaaggtagtaattgagggtacagaacgcgaaataatatcggtaggtgcgcttgttacaacagaccgggcactgaccgattacggatttgaatgggctgaccttacaagagagcttggcgcttcgagccacagcatagctgcggttattgacgatataaatataggtaatgaaggcagcggacttgtttacgataaagcgcacgagtttatacgctataacgtaataattaaaaacctcagcgaagaaagcagaagtgccgatttccttgtacgcgcatatattgagtataaaaatgagaacggtgaaaaggctatagcctattttgatgacacaacatactgctataacgaaatgttatacggtgagtattataacgaggcagcctcgttctcaaaggggataagctattcgggcccttttgagcaaaaggtttccgcattaagtaaaagcaataagatttttttgcaggaaacctttaacgatatagcggcgcagggctttgactctgtaagacttccggttgatttttcctcaaacacaagcgataccgcgccttatgcgattgatgagaccctgctttcataccttgatacggtggtaaaaaacacactgcgtgcgggaatgacaataatagttgactttcaccaagcctgcaggctcggcgatacatcgctttataccgaccccgacaccgtttcgccgaaataccttgccatatggcagcaattggcagaacactataaggaataccccgacagagtggtatttgaagcgattaacgagccgggtgtaaatactactacctttacgagcgcaaagcttatggagctgcaggaaaaggttcttgaaattgtaagaaaaacaagcgaaaccagaaagcttatggttgccaccggttcaaataacagcgttaaggcaattgaaaatattacccaaaatcttattaacgataagaatgttatagcggctgttcattgctattggccgatgagctttacacaccagggcgcaaactggattaagaatgacgacggtacgcctaaatacccgggcggtgctaaatataccgccgccgccaaagcggaagtggaaagcgcaataaaaatatgcaaggatttttctgaaaaaaacaatatggctgtatggctcggcgaattcggcgtttaccagggcggcggagcagctgccgaggatgttcaggcttatttgactgattttactaagctttgcggggaaagcaaaatcagctggtgctactgggagtataatgtaggcttcggcgcttacgacgaatcaaccgggtggagaggcaatgttcttgccggactcggtttgagacaataacagggaggttacggaatatgaaaaatttcaaaaagcttttatcccttttatgtgcggcggcactttgtgtgacagtgggcgttacggcggctgccgagagcgcctggggcgataatgtgattgaggaccattacacaattaagacccttaagggcgacgttaatcacgacgggtatttaaacattctcgatttggtaaggcttaaaaagcaccttgcgggaattgcggttgaaatagatgaagccgccgccgagcttgacggcgattcggcaataaccgccgctgatttaacaagcctcagaaagcttttaattaagctgtaaaaagcaaaaaaattgcaaaattactgccctgtctttcggataaatgttcgtcaggcagggcagcttgaatattacggattatgaaatttcagaggtgccggatatggtagaaaaatttatttatgaaaattttgataaatgcacaagaagccacagggaggatatgggcgagctgatcggtctgccgtacccatatacagttccgagtataagcggcggttttcaggaaatgtactactgggatacctattttaccaatgtcgggcttatactatcgggaagaacagagcaggcaaaaaacaatgttgataatataatatacctgactgataaatacggctatatgccgaacggaaatcttaccaagtatcttaaatcctcgcagccgccgtttctttcgcttatggtgcgggatatttacgaccgcacgggggacagcgactggcttaaaaccgcagctgccgcactggaaaaggagtataatttctggtgtgtaaggcgaagcaccgtgtgcgggcttaacagatacggtgtaaaccgcgaaaagcccggctgcgaaggtatggatgccgagctttcaaaaaggctgggtataaacccgcccatagaaacggcggagctgaaaatagagcattttattgcaagctgcgagagcggctgggatttaacgccgcgttttgaatttgaagcgtttaattacgcgccgattgaccttaactgcctgttgtatgcgttagaaagtaatatggcgtatttttgcggggaaacaggtgcggcaaacgccggggaatggcaaaaaagagccgaaaacagagcagagcttatgcggcggcttatgaaaaacgcggacggctgcttttatgactgtaatttcaataaaaacaggttgagcccggtattttcggcggcgtcactgttcccgctttttgtaggtatggcaacggcggctgaggcagcggcggcggtaaaggctttgccgcgtttggaggaaaaatacggtgtagccgcctgcgcgaaaaacagtattccgggtaattaccagtgggattaccccaacggctgggcttgcctgcaatttattgcggcggagggactgcttaaatacggctatactgaggatgcgcgccgaatagccgaaaaatatataaccgctaccgacggcattttcgccgaaaccggaaatttgtgggaaaaatataatgttattgacggcacaataaacacccgaaacgaatacaaattaccgcctatgctcgggtggacggcaggcacatatctttatatgaaaaggctgctcggtacggcagagcagcagcgtgctatgcacccataatttttattgagcggtattcccgccggggtataccgcgttatgcagcttgccgaggctcatattgccgttttcatccgtacgcttcattttaaacagccagttgacgtgaaaatcttctgacagctggctgccctttgcaatataaacgtcaccgtttttctgctcaagcagataataaaagctgccgtctgtattaaacgccgtaaaagcgtgtaaattatcccgacggagcttcttcgccgataaatcaccggtccacactccgcctgaaaacgatttatcaaattctgattttttaagccttactgattgaagttcgtcgattttttcccattcggacgaggcaggctcttttttaagcaatgaaaaactgaaattatccactttgaattgggggatattatcattcgtatagtcggacgaaggctcagtatatgctgccttttcgggcatatattcagccaaagcatcgccggctttgaaaacaatataggctttgtattttttgtcattcgcgctttttaaataaaaggttttttcaagcctgtattgtaccccgggctcaatatcgtaataagccgataaattataaatttcggtcttgctgccgccggggcttattatattccccacggcggcaaagccggtagcttttttctgcgtgcaggcggcgtcgccgtcggttttaaaaagcttaaattcttcaccgaaataaagatcttcttttcgtttattagtccacttaacgcggatagatatattatttttttcgtatgtgcttgaaacaagcttatagccaatgccctcgcacccgtcttctacaatgcaatcccgcaccacaagactgtctgacctgcgcgagccggttttggggcttgtaagcaggcaaacggacgcggctatgcccgcaataaccgccgcggcggctaaccaaaaggcgggctttttgtaattaagcacgctttttacccgacttttaacgcccacctcgccgaatgacggaggatatgcgaaaagcatatgcctccccgcgctgcaattgagcagtgcctcggaataatccgcccgtttatcggtgttcaacaggctaattgctctttcgtcacaggcgaactctatatctctgcaaaacagtatatatgccagccacataagcgggttaaaccaatgaacgcttaaaagcaggaaacccagcggcttccataaataatccctgcgggaaatatgcgcctgctcgtgcagaattacgctttctgcgtcgcgctccgttatgccgaatggcagataaattttcggctttataattccgaaaacaaagggcgatgaaattttttcgctttgaaaaatgttatcgtgcaaaagcaccgccgtgcgcaacccttttttaagcctgaaaaagcttactgcggtgtatataagcagcgccgctgtgccgataagccaaattgcggcggctattgttgtaatatcggtaaaatgcccggcaggtcttgtaacaccctcaaaataatgaccctccaaataattgtttaccccgttatcaaacgcggtaatacccgactcaaggctgggtcttggtgagtcccacgccttactcactgtctcgctgctcggtataaggctgaaaatgctttcaaccgaaaagggcattacaagccgcagccccacaatgcaccaaagcagcacggttatgcgctttggcgcttttttaaaaatcaaacggagcagcagcaccgcaagcaatacccacgcggcggatatgctcatattaagaacggctaaaaacaaatcacccattgttttcgccctccctgaaacggtctatcatctgctgaacctcgtcaatttcccgctctgagagcctgcggtgctttgtaaacgccgctataaacgcaggtaaagagccgccgaaggtttttttcaccatttcgtctatttccgccgcctgtgcctcctcgcggcttacgagggacgaaaccaccgtgttttcgtttttcacaacgccacgctcggataagcgct

SEQ ID NO: 4046 - DNA, 32759 bp, Unknown
  16S sequences of unknown bacteria
ctcttttaacgggtcgttctcttctttcgcgctgtttaattttcaaggtcccttgtctcttgctctctcgctctctcgcggctcccccttcaggggccccctcaagagcgccttgctatcataccatccctcctcccctttgtcaagctcttttttgtttgaaattttcccttttccgcctgccttttccaggattggcgaaaaatgaaaaaaatcgtcacaaaccgaggtttttttgccaaaacggtctatgcgccgccgtttttccgcataatcacgcgggcggcggaacacaataatcccaaaacacaaacgaggtgccctatgaaaccgatcgtcttaagcgggcggcggaacgacccccgccgcgctctgcaaattcttgccatcattctgttaaacatcctggtcatcgccatgctgccgggcgcccgggacggcgcctatcccaccctgtccaaagtcggctcccagggcgaggaagtccggcagatccagaccaagctgaaaaactggggctatctgaacgaccgggtggatgggatttacggccccaaaacccgggacgcagtgatctggttccagaaaaagaacgggctcgtcgccgacggcatagccgggccggcgacgctcaaggccatgggaatcttcacctcctcgggcggaaccggcgggagcggcagttccagcgggcacagcacgagcgactacaacctcctggcccggctgatttccgcggaggccagaggcgagccctattccggacaggtggcggtgggcgccgtcgtgctcaaccggatgcggcacccctccttccccgacaccctctcgggcgtgatttaccagaagggggccttttcctgcctgtatgacgggcagttcgaccagccggtggcggagagcgccttccgggcggcgcaggacgccctcaacggctgggatccgtcgggcggcgcgatctactactacaaccccaagaccgcgaccaaccagtggatccggtcccggccggtcatcaccaccatcgggcggcatgtgttctgcagctgaggcttcatccgtcgtcgtggcaggcgccgcaggagaggcccaggtcctccagcacctccatgatctcctcgatcgtcaaatattccagggccctctgccggatcgcgtattcgtggagggcctcctccgtcagcgcgtacagctcctcggcggagcaggtattgcgccgcaggatggcctggattttcagcagggcttccttcgcttcctccggacttggattccgctgttgactcgaaatttctttcttcaaaaccaatcactctccattttaagtatatgtatctatcatatcacataaagccatatacagtctatatgattctataaaatatagtatttgtctggtatgtttatgtagaggtgattgatatggctgttatcaaagtgcaggtgtccttgcgtttgagtccagaggtagccgcgaaattgaaaaaaatcgcgaaattggagacccggtccgttaccaattttgtcgagcatctcatcgtcaaggagatccgccggtacgaggacgtaaacggggaaatcccgctgacggaggaggacgtgtccctggaatgacatccggccccggcccatcactacccccggccggcatgtgttctgcggctgtaatggttataaaaaggttgtgcctggggggcgcgaccttttttgattttgatatcagcctgctttcagggtggttgcagacgaagcagataccttgtgctattcttgtaccggggtggtaaatatgtcaagcaaatcgtccttcgtcattcgcctttctgacacagacaaagccaagatccgctggattgccgccaaggacaatcgttcgatgaccaacatgattgactatttgattaaaaaagagatccgccggtacgagacagaaaacggggaaatcccactgacggaggaggacgtgtccctggaatgatctcctgggccggccgctgccccggaacccgattggggggagtccgccctccgatatccagggagacgggaagccccgaatcgcaaaagccggtgaggagattcctcaccggccccgttcagccaaaaaccgcccggcttccgttctggaagccgggcggttggtcatgtgtctgtcgttacctgccgatccgccccgcgtgggattaaatcccatccggagccgcggccgtttcttcggcatccgccgaattgtcgcccgcatcctccaaacggcggccgcgcataaacaacgccgccgtcaaaaacgggatacaaagcgcaaagctgaacaggtaccggaattccgcataagtcggcgcggcaatcatattcgtcccccacaccaggatgaccggcaggaaatacagccacgcccccttgcgccgcatcatgatgactgcgcccagaaggaaaatcacaatccaaaccatcccgccgaccgtgatgaaatcggccaggcccagaagaaagccccgcatgcttttacctgtaattctctgaatccagtccacttcaaccagcccgatatcccgttcgctcgtactgggcgatacaatccagtttttgacggaaacatgccagtaccctaccgtctccatcatgtaggctttgacgtaatgcttgaaatttgggaacagcatcccggcccataccttcatgaattcgccttttgtctggttgaagtattcccggtcgaaatgggcgtgccctttgatgttgtcgaccgtatacggcgtatagctgtcgtattcctccagcggaaggaggcggttcagatactcgcgctgctcgtcggtcatttttccgtccatcaccactgtgcgcgcgacctgttgcaggggaacccccaccgcttcctgaaacgggctcggccggataccaatcgcggtgtacagcgggccctggatcagtacgactgccgccatcaccgccgcaaaaacgggcgccagcctcttgaaataccggcggtaataaatcgccatgatgatcagcagcacaaaggtgacatagacgccattattccgcatgaagcaggtgagcaggcacaggatgacaaatttgagaagcccttttgcatgaagaagctcgccgcctttcgattcccaaatatcgtaaaggcacagggtcagcagcagcaccacggcgccgaagagtacgtccttccacatactgatggcgtacagggggaacacctgcgagacaataaaatacagccccacgaaacaaatgccgactttacggatcctcttccgccgcagccaggtaagcccatatgccagtattccggctagcagcagcatctgaaacaaggaaaacaaggcaacgcccagcgtcaggttccccaccgcgctgccgaaacgcataaacggcgtcacgagcaaggtaaacagcacggggtgggtattctcccacgccgtccccagggcctggtcgatagaggctgccgaatcgggtgttacgcatcccggatagaacgtcagatacgacggcatccaacagacaagcagaagggcaaacatacaaagccaatagaggaacgccgcttttccgccgtcgggttccgcgtcctgaagcaggttccatctcgtcacgatcgtatacatcccgaccgcgacgagataaaaagcggcaaaaaggacaaaaaaccagacgagatcccatactttgaacgggtagaattccaaattggggcgttcgattttcccgcccacgacatatgtcgccgacaggaccccgcccagcaccgcccccgtcacacagacgcggcggtcccgctcctcaagagcgtttttaaacagaaacagcagaaccgccgccgccagcagcatcaacacgatatggcggggccagtcgaaataacaaaacaacagcgtcgtgagtccgcctgaaaccaaaacccccacccaaagcacccacggcggcagcgggcgattatgcgtccttatcatgttcaccctcctgaagaagattgaggaaaagctcatacaactgccgatgctttttcacgataacgtccagcaccacgccgatcaagaaggaaagcagggcaaaaagcgccaaggtgaccgacacgatcatggtcggatagcggggcaccaggcccgtccggatatagtctaccaggacggggatgaagaacccgaccgaagccaagaggaacacgagggcaaatatgccgaaaaaggccatcggcttatagtccttgtagagcttaaaaatcgtccccagcactttcatgccgtccgcataggtgttgagcttggatacgcttccctcggggcggtcccggtattccaccggaatttcccggatcaggaagttcttatccaccgcgtggatcgtcatttccgtttcgatctcaaaaccctgagagagtatcgggaaggtttttacaaaatcccggctgaaggcccggtagccggtcataatgtcgttgaccttggtgtgaaacaggcgattgatcaggccgcggaccatgacattgcccagattgtggaacggacgtttgttttctgtaaaataggtggacgacagtctgtccccattcaccatatccgcctttttctccaggataagccgcaccatatccggcgcattttccgccggataggtgtcgtccccatcgatcatcagatagcagtccgcctcaatttcccggaacatcgtacggatgacgttcccttttccctgtttgtactcatgccggacaatcgcgcccgcgcgggcggcggtttcatccgtcccatccgttgagttgttgtcatacacgtagatgtcggcgtccgggagtacgccgcgataatcccggatcaccttttcaatggttcccgcctcgttatagcacgggatcaggaccgctacctttttgtcattccttcctggcatcttacacaccctcacttataaattcctggtttgtagtataccatacagcgggtggcgaagcaagttttcatatttcctccccgttgtcgatcaggatcgcgcagccgagcggcggcaggcgcaggatgtccccctccacccgtccatccccgaggttgacggtccaccccacccagccctccggcagtggaagcgccgcctccgtgtccccccggttgaccgcgcagagcagcgcgtccccgccgtccctgcgttcgaagcacagggcggccccatcccgggcgagcggccggaagcggccctctttcagggccgtggcggctttccgcagccgcccgagccgccgataccaggcaagcaggtccggatcctcctccccccaggggtagcagccccggttgaaggggtcgcggtacccctccatcccggcctcgtccccgtaatacacgcaggggacccccggcagacagtattgcagggcgctcgccagccgcatgagccgcaggccccgggcgcgccgctccggcgtcagcttttgtgccgcctgccagtcccggccccggccgccagcgggctccccggccaacgccgtcagcgcccgctcggtatcgtgggtgccaatgtggttcattagcagccggttgaccgccggcgggtaatgctccaggatatcctgcacggcttggacaaacgccccggcgtccccgccccgcaggaaccccagaatcgcgtcccggaaggggtaattcatcacgctgtcgagctggcggccgagcagataccgccgccgctgcccataggcctccttgttgctcgcatcctcccacacctcgcccaggacgagcgcatcgggctttgccgcccgggccgcgttccggagcgcgtcgaggaagccgtcgggcagctcatccgccacatccagccgccagccggacgccccggcggcgagccaggacgccaccaccccgtccgggccgttgacgaactccaggaaggacgggtcgagctcctgcacctccggcagggtgacgaatccccaccagccatcgtattcctccggccagcgccggaaccggtaccagctgaaatagggggaatcgggggactggcaggcccccagtccgggataccgcccttctttgttgaaatatacactgtccgcgccggtgtggctgaacaccccgtcgagcagaacacggatccccaggcgcgcagcggtttcgcacaggcgccggaaatcttcctcggtccccagcaagggatcgatcttccgataatcggcggtgtcataccgatggttggaatgcgcctcgaagatcgggttgagatacaaacaggtcacaccgagctccgcgagccggtcgagccgctgttcgatcccccgcaggttcccgccgaagtaatcgttgttgcggatctccccctgttcgtccggcctccatccgggctcgccgccccagtcgtcacgcaggatgcggccgtcgggcagggggaccggaccggttttctccgcccgggcgaaccggtcggggaaaatctggtacatcacgccgccggccagccagtcgggcgtacggaagccttgttcatagcaggtcagctgccacagcgggccgggcgacgcagaaagggcggcggtggcgtcgggctggcggacgagataccgcctcccctgcccggtctcgagctggaagccgtaccagacaaggcccgctttttcgggcgtatagcggcagtcccaccattcgtagctgtcgtccatctggcccgcccagaacatgccgtcgagcgcctcatccccaccgtctggacagcggatcagatacgccccgcggcacccaagccaacggggcaggaggatccggaacagcaccgtgcacccttcctcgaccgcgccgaaggggtggcggtattccgcgttgcgggaatcgaacagttgatggatcggggaaacttccggttgcgtcatgccgtcacatgcctttcatcctatttccgggccgtatccaaaaaggtacccggcctgcgaatcattgtttattatcgcacgtttgcccacgcggggcaagggggagtccccgtccttttgtttcctgcggaaatccgctcatttgcagttgagtttcccggagttttgcggtatactgaggatatctgctccatagtatatgcggcaacttggtttcttatatagaaataaaggcggtttacggacatgaaaatatccaccaaaggccgctatggcctgcggctgatgacggatctggcggtgtatcacgaccaggggctcatccccctgaaggagatcgccgcccggcaggagatatcggaaaaatacctcgaacagatcatgatgcagctcaaccgctccggcctcgtgcggagcgtccggggcgcacagggcggctatatgctggcgaagacgccggaagacatcactgtgggcgcggtcctgcgggtgctggaggggtcgctttgcccagtcgactgcgtggacggggcgggggactgcccccggatggcgcggtgcgccaccatcggcgtatggacccggctgaaagaggccgtggagagcgtggtggatcacacgaccctcgccgacctcgcggaggagttccggctcaagaacccgcccgattacagcatctgacggcccgtcgccgctatacggaggaatggctatgtgtccccgtcccctcattgtctgcgtctgcaccggcaatacctgccgcagcccgatggccgcggctctccttcgccgcgcccttgacaaacggggacgggaggatatactggtagagagtgccggactggccgcgggcgccgcggctccggcatcggagtacgccttggccgcggcggccgaaatcgggctggacctgtccggccatctctcccggccttttaccccggctctggcggccggcgccgcccggatcgtggccatgaccgccggtcacgccgccgtcctgaccggtcgtttcgcagtgccaccggagagggtgatcgttccctcgggcggcatccccgatcccttcggcgggaccctcgccgattaccgccgcacccgtgataccctggcggcggccatggacgccctggccgctgccttctgttccgagtttcccaccccgcatgcatgagaaaggatgcgccatggacacgcacagtcgtcacgcccccgccgtccctcccccgggtatcgccatcgtcccgatgcacccggaccatctggattccctggccgatctcgaaagcctggctttctccaccccctggagctatgacgcgctggccgaggagctccagaaccctctcgccgtcttcctggtagcggaggatgtggatgcagaaagcgcggtgggatatctcgggatgcaccatatcctcgacgagggcttcatcgccaaccttgccgtccatcccgcctaccggcggcagggcatcgcccggtcgctgctccgggaggcgcaggagtacgccgaggcccacgatcttgcccggctgaccttggaggtgcgggcgtccaacgtcccggccatcgccttgtatgagggcatgggcttcacgcgcgacggtatccgtccgggtttttacgattcccccaaagaggacgcggcgatttacagctattatctttgagcaaaacgccgggtgtgtcccggcgtttccaatatcgaaacacgaggtgctgtgccatgtatgtcaatccgtacgacaatctgtcaggcggccggtggatccggaccaacttccacacccatgccggtaccggcgcgggaacctgcggccggaatccggtggacgcggtcgccgcgctttatcgggagctcggctacggcgcgctctgcctctccaaccacgacctgtataccgatgcctccgcctattccgacgggaagatgactctgctcgacggggtggagtattccccccgctcccacatgctcaccgtcgggatccggcgttccctgcatgagctcgagcaccagcccgccatcgatgagacccggaaagatgggggattcgtcatcctctgccaccccaactggcaacacaaggaatattggccttgggcggacatggaccggctgaccgggtatctcggcatcgagatcatcaaccagctcatctaccgcctgagcggctccgggctggccaccgacgcctgggaccatctgctttcctccgggcggctggtctacggcttcggcaacgacgatttccatctttacagcgacgcggggcggagctggaactggatctacgccccctcctctgcctatccggatatccgggaggctgtagaggccggacggtttaccgcctcgaccggcctcgcgctcgagtccctggccctcgacggcgaggacaccctcaccgtccgggcgcggcatatgaaaaacagctacgtcgacaccttcacctaccggtttgtcaccgaaggcgggcggtatgcggctgccgtcaccggacgggaggcccgcttcaccctcaccggggaaagctatgtccgggtcgaagtcatcggggaaaacggggcgatgctctttacccagccggtttacgatccggcccgcttgcagcgggtttgagccctcagcggggatagggttcccggatatcgctcaggcccaggatgtaatcggtgctggtgcggtagtatttcgccagcgcgacgagggcccacagagggagatcgtggatccccttttcataacggcgatacacctccctcttgcagcccaatacatccgctatatgctgctgtgttttgtccgcgtcgatgcggaggctctccagcctgggcagttccattcgtctcacctcagcctcatgctactatcttgttgcattaggccagcgaatatgctacaatattgtggcattatatttgaggagaggtggatatatggaattgtgggagtctattttaatccatgcgatatccaaacagagtattgttgtcacgatcccggatgcgtccgatatggaaaaactgtttgaaatggactgtttaccaggcgttacgggatatccgtaccattctggaggacgacagcctgtccgacccagaatgttttatgcggattgaagaaatcatctccctgttcgaggccttaggtaatgacacggggccccgccgcgatttcagatgcagaaaaggagactgcacatggacgagctggccgcccgcctggccggagccctggcgtcccgtcttagctccgatgccttcacgctctatctctacggctcggccgtcctgggggatttccggcccgggtggagcgacctcgatatcctctgcctgacggccgcccccttgtccccggataccgccggacgcctcgtccttctccggcaggagctggcggcggaaaacgagccgggcttccgcctgttcgagggaggcatcacctccctcgccgcttttcgggacggccggcctgccctctcggtctactggggtacttccggacagcgtttggccgactgctattcgatcgagcccttttccctcctctccctgctggatgacggccttctgctgcatggagaggatatccgtccctgcctgaggccgcccacgcaggatgagctgcgggatgccgtcgcgtcccatctcggtaccatccggacctacggcgtccggcccgggcggtcgatatatggagccggatggatgctggacatcgcccgggggctctataccctgcgcaccggccggatcctgtccaaaaccgcggcaggggaatgggccctgcgggaaggactggctccggatccttcggtcctcgaacgggtgctggccatccggaaagagcccctcctctatcgggacgatccgggcaccctcgacttcatcgccaccctcggccccgccgtggccgctttcgccgccgtgctggaaacggcgctgtccggttccgaacaaggctaatcccaatccccggaggtatcgtatgaatattctcgccctggaatcctcctgcgacgaaaccgccgccgccgtggtggcggacggccgccatatgctttcgaacgttgtagcctcacaggtggaggagcacaagctctacggcggcgtggtgcccgaaatcgccagccgccgccatgccgaagccgtcaccggcgtcactaggcgggcgctggacgaggcagggctcgccctgtcggacatcgacgccctggcggtgacctacgcccccgggctcatcggcgccctgctggtcggggtgaatttcatgaaagggctgtcctactcctccggcctcccactcgtcccggtccaccatctgcgttcccatatcgccgccaactatctggcccatccggatctggccccgccgtttctctgcctggtcgcctcgggcgggcacagccatctcgtcgaggtggaggattacacccgtatccgggtactcggccgcacccgggacgacgcggcgggggaatgcttcgacaaagcggccagagccatggggctgccctatccgggcggggttcatctcgaccgcctggccgcggacggcgaccccggtgcctatcccctgccccacccccgggtggccggatcgccctacgatttcagcttttccgggctgaaaacagcggtgctcaacctgttgcacaatgccgaacagcggggggaatccgtctgtctgcccgatctggcggcctccttccggaaaaccgtggtggaccagctcgccggcaacctgctccgcgcggcggaggataccggggcaaggaccctcgtcctcgcgggcggcgtatccgcgaacgcggggctgcgtgcccgcatggaagaggaagccgcccggcggggccttacgctctatctgcctcccctgtccctgtgcggggacaacggcgccatggtgggcgcgcaggcgtattacgagtatcgcgcaggcgcccgggcggggttggatctcaacgccgccgccacaatgccgatcgcatgacgcaaatacaaagccgccggcatcatcactgccggcggctttttgtcgcggccctcccgcctccgttttggagaattcaaaagagagggcctatctcaaacggaaaccggccgggattccccccggcccgctgtccgatcttacttccgtctcggccataaggcggctgtttcagccgtttcgggctggccggccaaaggcgtcggccagcgcggcaaaccgctcgagcggaagctcctccgcccgggcggacggggaaatcccggccgcggtgagcgcggcccgcgctgcctctttcggataaccgccccccacgagggcgttgacgatcgttttgcgccgctgcccgaacgccgcgcggataagccggaacatcgccgcctcgtcttccaccaggcagggcggctcttcccgtacccaaagccgcatgacggtgctgtccaccttgggagggggaaggaagctcccccgtgaaaccgcgaacagccgctcggcccgggcgtaatactccaccgccagtgtcactgccccgcacgccctcgtcccgggacgggcgcacagccgctccgccgcctccttctgcaccagcactgtgatgcttctggccggcagccggctttcgagcagccgcatcaggaggggggacgtgatgtaatacggcaggttggcacagacggccagaggcaaaccaggcgctgtccggcggatgagctccgccaaatccagcttcattgcgtccccctgcacgatctcgacattgccgcactcccccacggtttccgcgagaaccggcagcagccggcgatccagctccacactgaccactttttccgccacgcccgcaagttcccgagtgagcaccccgattcccggcccgatttcgagcgccgcgaaccgttccggcatcccttcccggcaggcctccgccatccggggacaaaccgaggggttgatgagaaaattctgccccaacgccttggaaaaggaaaagccgtggcgggcaagcagctcccgcatcccgcccacatcggtcagattacctgcatacataaaatcgcgccctcccttttccatcgctccatccgcccgttcccttcgccggaaacggccgtttgatcttcatcaatgttgttttctgtaagtataatgttctgactattttacaaaatgtaaatcttctcctccaaaacccaaaggcagcagggacctcaacgtggtttccagccgttcctccccttgtgccgcggcgcagacaaccggcaggtcctctccttccgggaggaattccgccagcgcctggcggcagatgccgcagggggtcaggggccggtccccgcctgcgacggcaaggaggacgaagcggcgttcccccgccgttatagccgccgccagcgctgcccgttccgcacatagggtgccgccaagggaggcgcactcgatattggccccggtatatacccgccccgaggtcgcaagcagcgccgcgccgaccaaaaatcccgaataaggggcataggcgtgtccgcgtgcggccctcgctctggatataagggcgtcttgctgcgtatttgtcgtcattttccaacattccttcatcgacatttatgtttttgtgaaatctgtatttttttcgttgcggatttttcatacgtaatgtatcataaagaagggataactgcaagaacaaggaggagaatcatggtcagaagagataaagaaaactactatctggacattgcgcagactgtagcggaacgcggaacctgcttgcgccgcaattttggtgccattattgtgaaaaacgatcaaatcatgtcaacggggtatgccggggcgccgcgcggccgcaaaaactgctcggatctaggattctgcctgcgggaaaagatgcaaatcccccggggcgaacggtacgagctctgccgttccgtccacgcagaggccaatgccatcatccacgcctcccgcgcggatatgatcgggggaaccctctatttagtgggcgtggacgcccatacaggggatcttgtctccgacgccaatccctgcgcgatgtgcaaacgcctgattataaacgccggtatctcccgagtggtgatacgcaacacgtccgattcctttactgctgcctatgtacaggagtggattgaacaggatggttctctgaatggcgaatgcgggtattgattcgaaagtcctgtgccggtttttcacaaaaggcagaaatacgtgataaaatttgtgaacatcattcgaattcttgctgttttttccgaattcgtttgaacccgactctgtaaagtattatactgtaattcaggaaaaacagcctccgcgcaatatcgagataaaggagaatccgcaggatgcatcttgccgaaaatttgagaatattacgaaaaaaacatcagctgacacaagcgcagatggcggttttgctcgaggtggaccgctcggcgtattcctgctatgaaacgggcaaaacccggccggactacgaaaagctaatcaaaatttcccgcttttatcaggtgagcatcgatgacctcctcctcgctcaatttgtagagtgaacgataatccccaaaaacaggaaacctgaatcaaaaatgcgagacggccgctgcctgcgcaacggccgcctccaagctatacggaacccgtccggctatttgatgactgtccccatcgtgccgggcgccacgcatccggcgttggattcgtcggtatcgatgtgcatggccagggcaaaccgatcgctgacccgtaccacgacatccccgaaggtcaggctgcggccgtcgctgtcgattttcaccgtcacttcgtcccggtctttcaggccgaaagcctcggcatcggccggagtcatgtggatgtgccgtttggccgcgataaccccttgcgtcaactcgacctcccccttcggcccgactaggcggcaggcgccgcttccctcgatatcgccggactcacggatgggggcggccacaccgatagcgcgcgcgtcggtcaaagacagttccacctgtgtggcactgcggaccgggccgaggatactcacgccggtcaacgtctttttcggccccacgacatcgacgcgttcgttacaggcgaattgcccgggctgagacagcgatttcttgacggtgagttcataccccttgccgaacagcgtctcgagatcctcctgcgtcacatggacatggcgggcagaggtttccactaatacctgattggccatttgcacacttcctgtatcctgtaaatttctgctgtttatgcgggcaacagcggccctatggccattgtaccgcacccccgctcttttttcaaggggaaatcgagataccgaaaggaaagaatcctatgaacgagtcccgtccctcttcattcgaggaacttgcggtccgctgccgcgcctgtacagcctgcgggcttgcctccacccgcacccacgtggtcttcggggtgggggtaccagacgccgaggttctcctcgtgggcgagggccccggtgaaaacgaagacctccagggggaaccctttgtcgggcggggtggccagcttctggataaaatgctggccgctgtcggcctgtcccggcagaataacctgtatatcgccaacatcgtgaaatgccgcccgcccaaaaaccgcgatcccttgccggaggagcaggatgcctgcatcggctggctcaaggagcaggccgcgcttctgcgcccgaaaatcctcgtctgtctcggccgggtggccgcctgccgtctcatcgacccgaacttcaaggtcaccagagagcatggcgtgttcgtggaaaaaaacggcatgctgcggatgggaaccttccatcccgccgccctcctgcgcaacccggggcagaagcctctcgcttttgcagattttctcgccctgcgggaaaaaatcggggaggtctgcacccataccgagctggtctacccggaggaatgacctctctgttttggaatgacgccggccctttttcagaccggtttctccgcccgcccccgtatgaagacggggcgggctttttggcgggcctctatccctgggcggattgctcatcctcatgcggatagaccccggaaaagcacgccgtgcagaagccgcaggcagcctgttctgcgatttttaccacgctttccaggctgaggtagcccaggctgtccgcgccgatctcgcgggccgtctcttccaccgtcagccggcatgcgatcagggcttcccccgagctgacgtcggtgccgtaaaaacagggaaaccggaaaggcggggaggacaccagcatatgcacctcccgcgcccccgcttcccgcagcatatcgacgagatgccggcaggtggtgccgcgcacaatggaatcgtcgatcatcaccacccgttttccttcgacggcggaccgcaccgcgcccagcttgagccggaccgcctgctcccgaagatcctgcgtcggctggatgaaggaacggcccacataccggtttttgacaaagccgaacccgtaagggattcccgccgcccgggcatagcccatagccgcctccagcccggaatcgggcactccgatcaccacgtcggcgtcccgaggctgttcctttgcgagcagccggccggcacgcagccgggcttcctgcacgctgcagccatggatcacgctgtctgcacgggcgaaatagacgaattcgaacacgcacagctggccgggatggacggcggaggggcgggcgcccgtaacccaatgtaccgccgggccttttgcgtccacactgataagctcgcctggttccagatcccggacaaaggcggcccccaccgcgtcgagggcgcagctctcggacgcaaataccgtctgatcgcccctgcggcccatgcagagaggccggaacccgtgcggatcccgtaccgcgatcaaccggtcgggaaacgcgatgaggaggctgtaggccccatgcagctgctgcaggccggccgccacagcctcggggagcggccgaaagggatcctcaagcagcgcctggttgacggcataagcgatcacctcggtgtcggtcgtcgtatggaataccgcgcctctcgcctcgaagcggtcgcggagctcctgtgtgcccaccaagttgccgttgtgcgccaccgccatactgccccgtctcaggcgaagcaggagcggctggatgttttcgatggaatcgtcgcctgtcgttgcatagcgcacatgtcccagggcgatttcaccggcacccagctcttccaggcacggctggctgaaggcctcccccaccagcccggctcggcggtggaggcggaagccatcccctccgcccacgacgattccacagccctcctgcccgcggtgctgcaaggcatacagcccataatacacatcctgcgcggccgcacggccatgcggatcgaacaccccgaagaccccgcattcctcccgtacctgtcccatcccggtcatcctttcccttgacgtgtttcgtctgcagtttaaaacgctggaatcacatgctgccctgattgccggggtgggtgccagcccccggtttacggccgggccgacagatacgcatgacaggccaacgcggcctgccggccttcccggatggcccatacgaccaggctggggccgcgtctggcatctccggcggcgaatacgccgggaagggacgtgcggtagccgccggttccgtaggcttgtgcctcgctcgcctggatggtgccgcggggaccgagcggcaggccgagtgcatccggcagcgcggtttcggtcccgataaagcccatggcggtcagtaccagcccggcttcgacatactgttcggtcccggggattggtttgggggcgccgccgctccaatccacctggacggccgtcacgccggtaacccgtccgttttgggtatgaaccgcctgcaccgtcgtttcataccggcagatatccctgccgtaaagggcacgggcctcctcccgggcatagttcggcttcaataccttgggccagaggggccagggattgccgggcgccctcttcgggggaggtgccgcgacgatctcgaactgggcaacgcttttcgctccttgccggatacaggtagccacacagtcggctcccgtgtcgccgccgccaaccaccacaaccggaagccctttggcgctgatgggagggggccctccctccagcaggcctttggtcaccccggtgaggaattccaccgctgtgtgtacgccctgcgcgccggcccccggcacggtgagggcacgttcccgccgggcgccggtgcacagcaccgccgcgtcaaaatcacgcaggaggatccctgcgtcgatgtcggttccgatgtcctgtccggtgcggaaaacaacccctctttcctccagccgccgcacctgctccagcaccagcgttttctccagcttcatcatggggatgccgtacatcaaaaaaccgcccggccggtctgcccgctcgaacgccgtcactcgatggcccagccgacgcagggagtcggcacaggcgagcccggctggaccggtgcccacaacggcaaccgtccgtcccgtgtcgccggcgtcgggaatggggtcctgatcccagccattcgcgcgggccgtatcggcgacataccgttcgatctcctggatggtgaccggccggtcgtgttcccccagagtacaggatccctcgcatagagccggacagacccgccccgtaatttcaggaaaggggttggttttgcgcatccgttcatatgctgccttcaactccccgcgatagaccagatcgttggtttcgggaatcaagttcatcagcgggcagccgatggaactgcccgccaccatcattccggcgtggcagtatggtacaccacagtccatgcatctcgcgctctggcggtgcagctcctccggatcgggaggcagcaggaactcagcatagtcctggagccgctcagcaggcggccgatgagctccgtcgcagcgcggatattctaaaaagccggtaggcttacccatagcgtaattccttcctttcgcggaaaatcggttcaggccgtgacggcctcataagcacagagcagacgcgcctcttcgtcttcacccgccgccgcagcgtatgcttcctgggccttgcggtaagcggtggggatcgctttgacgaaggccgccggatcaaacgccgcgagcagcctccgtgccagcgggctggccgtatgcttcagatgagattccatcaggcggcggataagtgcagcgtcctgatcgtcgggtgggagcagctcgaccgcatgggatcccagcttggaagccagtccggcctcaggatcatagacataggcgatgccaccggtcatgccggccgcaaagttgcggccgaccggccccaggatgagcgctgtgccgccggtcatatattcacagccgtggtcacccaccccttccaccacaacgatagccccgctgttgcgcacaccgaaccgctccccggcaaggccgccgataaagccttctcccgaggtggcgccgaaaaaggccacattgccgatgatgacattgtcctcgggcgcaaaggcggcgccggctgacggccggacgatgatccgcccgcccgacaggcccttgcccacgtaatcgttggcgtcgccggtcagctccagggtaacgccgggggcgcagaaggcgccgaagctctgccccgccgaaccatcgaaccgcagggtgacagtcccttccggcagccccgccgacccccgctgccgcacgatctcccccgacagggcgcagcccactgtgcgatggcggttttgaatccccagccgatgggcgaccggccggccggtttcgatcgcgtcgcggcataacggaagcagcaccccggtgtcgaaggttttctccaaccgatgctgctggggctgtgtgaaggtgcgttccccggcccggtccgtcaccttgggctgatagaggagcccggacaggtcgaccgtgttggccttatcggaaaaggcgatatccgattggcgaagcagctcggcatgaccgactagatcgtcgaaccgggtcacgccgatgcgggccatccattcccgcacctccattgccaggaagcgcatgaggttctggatatattccggctttccggtgaaccgtccgcgcaggcaggggttctgggtggcgatcccgaccgggcaggtatcgaggttgcagaccctcatcatgtcgcacccgagtacgaccagcggcgcggtcgcgaaagcgaattcctccgctcccagcagggcggcgatcacgatgtcccgcccggtcaggagttttccatcggtctccagcaccacgcggttgcgcaaaccgctcagaagcagggtctggtgggcctcggcaacccccagctcccatggcaggccggcatggcggatactggtgcggggtgcggcaccagtgcctccgtcatagccgctgataacgatgacgtcggccaaccccttggccacccctacggcaatggttcctaccccggcccccgaaaccagcttgacactgattcgggcccgtggattggcacttttgagatcgtggatgagctgggccagatcctcgatggaatagatgtcgtggtgaggcggcgggctgatgagctcaacaccgggggtagcgtggcgggacgcggcgatccaggggtacactttgttccccggcaggtggccgccctcgcccggcttggccccctgtgccattttgatctgaatctcctgcgcattgttcagatagtggattgtcaccccaaaccgtccggatgccacctgcttgatggcactgcagcgggaatcgccgttttcatcggggatgaaccgttcctccggctcgccgccctcaccggtgttgctcttgccacccaggcggttcatggcgatggccatgcactcatgggcctccttgctgatggacccgtaactcatggccccggtcttgaaccggcggacgatggactcgactggctcgacagtgtcgagcggaagaggcttgtcgcgctcagcgatacgcaacaggccgcgcaggttcttgatctgttccgaccgattgttgatgcaggccgaaaagcgctggaacaggccgtaatcccccgtgcggcaggcctgctggagataatagatgttctccggattgaaaaggtggtactccccatcccgccgccatttgtagtcgccgcccggatccagcggttcatccgccgcggatgaaaaggccgccgtatggcgttccttggcctcttcctcgatctcacggagggttaggccgccgatgcgggtcacggtgccggtgaaataccggtcgacaacccgcttgctgatgcccagcgcctcgaatatctgcgcgccgtggtagctgcgtacggtggaaatgcccattttcgacatgatcttgatcaggctgccggtcacggcctgccgataccgctctctggcggccggcgcatcaaccgaaaggcgcccctccccggccatccggtcgagcacctcatatgccaatgccggatagacggcatcggcgccaaagcccaccagcgccgcgacatgatgcgtctcccgtgcctcccccgtctgtaccacgattgaggccttggtgcgggtgccctgccgtaccaggtgctgatgcagccccgatacggccagcagggcgggaatcggggccagacggccggtcgctcccaaatcggaaagaacgaggagggaatatcccccctgtatggcgatgtcggccgcccggaacagggtgtccatcgcgctctcaatgtcgcgtcctcttccccgcccgtcgacccggaacagggccggcagggtcacggcacgcaggcccggctcatccagggagagaatccgtccaaactcgtcgggaagcagcaccggcgtgtcgtgccgcagacggcggcagttctccgctgacggtacgaggggattcccctcggcgccaagatagaccgtcgatgaggtcacgagatgctcccgaatggcgtcgataggcggattggtcacctgcgcgaaaagctgcttgaaataattgtacagaagctggggacggcgggagagcacggccaggggcgtatcggtccccatggaggataccggatcttctcccttctgcgccatggggcgcagagtgaggacctcatcttcatacgtgtagccgaagagcttttccttcgcgagcagcggcatctcggccacctctccctgttcctgctcgtaaccgcgcagaagcacctgttcggccggggtgatcgcggccggatccttatcccgcagccgggtgataaggctgcgggggcagggcggcactccttgcggcaggccggacagggtcctcaagccgctcttcagccattcgccgtagggatgggcatgggctacggcgcctttgatttccgcgtccgggatgacccgtcccgtcccggtatccaccagcagcatctggccgggttgcagccgtcccttttccaccacatccgcgtccgggatgtcgcacacgccggtctcgcttgcaaggacgagcaggccgtctttcgtacgggtataccgggcaggacgcaggccgttgcggtccagcatggcgccggccagccgcccgtcggtaaaggcgacggccgcgggaccgtcccacggctcggagaggcagtcggtatacgcatagaaatcccgcagggccggatccatctgcggatcattttcatacggctgggggatggccgtcatgcaggcctggggcagggagtatccggcgtgcaggagaaaagccaggtattcatccagcatggccgaatcgctcccgtcggcctctaccaccggaaacacccggcgcaggtcttcgtcgaacaagggagacgccatggcgctttcccgcgctttgacccatttggcatttccgccgatggtgttgatttcgccgttatggatgatgtagcgcatgggatgcgccctttcccagctggggaaggtgttggtggaaaaccgggaatgcaccagcgcgacggcgctcgtgacgtcccggtccagcaggtcgaggtaaaaccggggaagctggcgggggagcagcatccccttgtacacgatggttctggaggaaaggctcgcaatatagaaatatggatcgcgctcctcagcggcatggcggattgccttggctgccgtcttgcctaagatataaagcttccgttcgaatgccgcctcgccggttcccttgggccgagcgagaaacacctgggtgatcccggggcagaaggcggcagccgtcctgccgggcacctggcggttgaccggaacaggccgcacacccaatacagtaaggccgtctgcctccgccaggccgcaaaagcggcggacactgtcgtccgcccgtttttcgtccggggaagtgaaaagcatcgccacaccgtagtcgcccgcttccggcagctcaaagccgctgtaagccgcagccttggccaaaaacatatgagggatctggagcaggatgcccgcaccgtcgccggtgtcggcctcattgcccaccccgcctcgatgcgccatccgttcgagcatgttgatcgcctggtcgaccagaacgtggctcttttccccatcggtctgcacgatcataccgatcccgcaggcgtcgtgctcaaaacgcgggtcatacagcccctgtgccctaggcaaggaagcagccgactccgctgcagacgaaactggatgccgggccatatccgattgtctcatgccaatccctctcttcgcaaataaaaaacgcccacggccctgccgaaaacggcgggccgcggacgtcattgtccactcatatggctttgtacctagtatctactatacctggcgaaacggggtttgtcaagggggccggttccacaaatccacaggcaggcatccctgtaccgcttgtcagaaaagacaaacccatctcctcccgtccgccattatgtacattttccattctattatccgtatcggaagggcaaaggcgccgccgtcctggcctggaaatttatccggaaattcgtgggtggggcagcgctggctttttcctgtttcataaccggcagcatcctcgtatagaagccacgtctcctcccgcctatttctctccgctatatcgcgtctccatcggcagccgcgtagagataagcccttccgctctttcccgttcgtactattactttatttttatacagaaagtttattgcaaatcctgcctttttcgcggacagcctcccagctttctggaaatccgccgtcgtgaagggaatgggcaggccgtcaggcagcatatggacacagtcggcagggccttgcagccacagctcccttcccaccgcgacgggaacccgttccactcggtgagaaccccgtttaccgtcccgcccccagccgtcccgggcccgggattccacgagatccagctcaaccagccgaaccaccagccccggatccgaaaaataaggcagcagccagtacagatctgggaggcggtcccaaaatcctcctacccgcggcgatcggcggggcggcgttgcttctccggtttccgggtccagccaaaccagggtcttcttccgtacaaccggcacaacgatggtgacgggggtgaagggcagcaggcggtcgagcttcccacgcagctggtacagactccccgtctggatttccacgactcgttccccatcataaatgtccgccaccagcccgcaggggagcttcacctcatggcggcgctcatccggctcgatccagtatttgagaacggcgtgcaaactgcgttccccaagggtgccgatcccggacctatcttgcaaatggagcaacgcccgcagtttcgcctcctcaaaggccgtcatcccgcatcccctgtccggcgcagccggagattggccgtaaaacagcggccgcggccatgttctccggtcatccataccgtactgcatccattctcctccggcagcgccgccgttcggatcgagagggactcaccttccaacgcctctttttcataggcgatggaaaagccggcgatctcccggccgtccatcccgtccggtacaaagtcgcagaggatgtcggcataaacggtattgttcagatgcccgttataatccgtatcggaccagaaaacccgccgctccccggcatccgtcagcccctcgggcggccgcagccgacccggatccgggcagccgttacgccggtcgggctgtgagccaataccaaactgttcaaacaccgtcgggcgcaggggccggtggctttccacctccaccagcgcgaaagccgaaaccccttcggtcaaaaccgtccctcttccgtccagcagctgataacaacgataaagctgcgctcccttgccgtcccgatgccaggtcagcagcgaaacctcttcccccatcgcgggcagacggtgaatctccacattcaagcgggtaaggacgaatatcatcccgcggcggtagaattcctgataggtcagccccgcctcgcccagatgccgttcccccgcctcctgctggaaacgcagcaagctggacggccgcagcagccgatcccgccctgcgtcaaacgaggtcacccgggcgggccaggtatagtcctgtttcactggataggtcctgtcttccatcgattgcactctccttgtttcgccttcctcgaagccctgtgttcgcattaccccatatgcctcagaacggtaaaccgcccgaagccagttttctcatacgtttcatagcggggctcgtccgcgatgtcgcttcgcaccaccgcggcggtccctatcggcagggacgccggcgtggcgatgcgataccgcccaaaagcggtcacctgctcgaacatcgcgccgggattggatatcaccgccgtctcccggaatacggccgggtcttccgcggtgtagaacagtgtcagcgcgtaggcgccgttgacactatcggtgacatacacagtctccgcatcggttccggcagcataaacaaccgcttccccgaaagaatcttcaaacgccgccgccattttcccctgatattcggtgagatactgcgccgaaaagagcaggaacgccgaggcatacagcccggccaccgccgtacggaaaagccggcggctctgcgcgacccatgccccgcccaaggcggtataataaatccagggaatccacagggcgttgatgcggttgatattcggtttgactacaaataccagcaccagtgccgccagaaaccaggcgttcaggacggatccccaggcgggccattccttccgcccccctgtcacgcagcggaggaacccgatgacggtgaacggcagggaaaacccgtatacgatcccgaagccgtccatcgcgttccagatcaggccatcggtctgcaccaccgcgattttagaggcttccgcgaaattcccgatactgtcccgcaaaaattcggggctgaaaaccgaagccatggccgtcatccggttggccgggagccgtggaatggtcataaacggcagacggatcgcctggaggccgaaggtgttgaccaacacgaacagcatcatgggcagggcgaccacggccagcacccccagcccggcgcatgcccgccggaaagacaacctcttcttggcaaccaggaaaagcaggagcggcagcacgaaaaccggcaggaagagatacgccgtcccataggcataagacgacaggccaagcacgccgcagccggccagaaagggcggcagccggtcgtgctgcaggccgatcaccaggaacagcaccccgaacaaaagcaggtcgggaaacaggttggactccaaggcccagcggcttttcagaatatgccatgggcagatcgccagcagggctaacccggcaagggcggttttccggtcggtcatcaccaacagcagccgccagaacgcgaacagggataggcacccgatcaatgccattgggaggcggaacgcccagacatccaatccaaaagccgcgagaaacggcatactcaaataagagtacagtgcattttgcccgctcccccaggcgatgaggtgtaccggaaggaactgcccgttccggtcatatccggtttttaggatgctgtaagcatcgtatgccgccgacgcctcgtcctggttgaagcccgccggatactctccgagcgctacgagcctcgcggcaaaccccaccaccaacaccgcgtacaccgcccattcgtaccgaaacgatgcaagacggccgggcaaaccgccctctcccctccttagcggcgggatcagcaccaacgccggaacgagcaggcataccagtgtggccagcacgtctctcatctctgtctctccttcggatgtttcacatgaaacaaaccgggtccaggcaatgcccagacccggttttccggccgccagggcccctactgttggtcaattgctcccgagtctcatcccttcactgggttgaggcgatcggttccaaggaagggtcggagcacctccggcaccgtgaccgatccgtccgcgttctggagctgctccaccaaggccggaatcacccggctggtggccaggcccgaggcgttgagggtatggacgaaacggggcttgccgtcctccccacggtagcggatcgccccccgcctggcctgataggcccgggcgttagaggccgaactgacctctttgtagatccccatgctggggatccagacctcaatgtcataggtacgggccatcgagaaggagcagtcgccggcggccagcttgctcagccggtagtggaggcccagctcctgcaccagccgttcagccttgccgaccagctcctcaaatgccgcatcggagccctcttcggtggtgtactgcaccatttccaccttgttgaactggtggccccggatcatgccgcgttcctccgcacggtagctgcctgcctcccgacggtagcagggagtataggcgatgtatttgcggggcagctccgcaggatctaaaatttcgccccggtggaggttgaccagcgccgtctcagcggtaggcagcatgaattttttatcgctgctggtcgggttttcgatccagtagacctcatccataaatttggggaactggccggccacgtaaccacagtcgtatcccagcatgtgcgggggcaggatgaactcatatccgtcggcgatgtgctcctgaataaagaaattgaggatcgcccattccaggcgggcaccccagccccggtaaacccagctgccgcttcccgacagcttggcaccccgctcataatcgatcaggcccaggctctcgcaaagctcgacgtgatttttcgccgggaaatcgaaccgtggctgttccccgaaggtccggagcatccggttccgctccttgccgcccgcggcaaggtcctcgtcgggcagattcggcagagagagcaggagggccttctgcttgtcttccagctcgaccagagccccgtccccttctttgatccgggctgacagctccttcatctgcgccatcagtgccgccacatcgcccccctcttttttgatttggggaatttttttggaggcggcattctgctcagccttcatcccttccacctgtcctgccagctggcggcggcgggcatcgatgtcgaggatctcatccacaacatcgtcgagatccatctcccgtttccggatccccgccttcaccagttccgggtgactgcgtaccaatttcatgtccagcatcttcttgtccccatttcttccgtcctgatttatttagcaaagggggcgtccccttcctgtcgggttttcagcgtggcgccagccgattggccagctcctgcagatcctccctgccgtaaaattcaatctggaggacacccttgtcccctttttccgcgaccttgaccctccggcccgtctgctcggatagagccagctcgacctcagcgtaaaaggcgtctttcgggaaagcggccggagacgccgcctcttttttctcctttttggcggtcttcgccatcttttccaacgcccgtaccggcaattctccctcgaccgccgcccgggcaacccgccgctgctcctcctcgccttcaaaagcgaggatcgcccgggcatggccggcggtcaggcgtcccgctgccaccaatccggctacctcctgcggcagatggagcaagcgcaaggcattggcgatcgccggacgggatttgcccaccgcttttgcggcctcctcctgcgttaggccataggtctccatcaaggtctggtagcccattgcctcttccatagggttgagatcctgacgctgcagattttcgatgagcgccaactcggcggcctcctgctccgacatctcccgtaccacggcgggaacttcggacaagcccgccatccgggaggcccgccaacgcctctcccccgcgaccagctgatacccacctccgggcagagggcgtaccagcagcggctggatcaccccatgctgagcgatggaagacgcgagatccgcaagagcggcatcgtcgaactgcttgcggggctgcccccgattgggctcgatatccgcgatcggaagggttacggcacggccgctctcttccaccgcattttccgcaaaaagggcctccagccctttccccagcccaccttttttcgttgccatcgactccatcctttcgcaatatgttccacgtgaaacagctcgtccatttctacccgtgttatcctccaagacgcctgtgccggccctcagcgatgggaaaccagctcgtccgccagccgttcataggcctctgcaccacgggaacccccatcataatatcggatcggcttgccgaagctgggcgcttcggataaacggacgctgcgggggatgggggttgagaaaaccttgcgaggaaagaatttttttacctctgccaccacctgttgcgtcagattgagccgcccgtcgtacatcgtcaggaggacgccttccagatccagggtcgggttgtagagccgtttgacctgccgaaccgtcgccatcaactgagagaggccctccagcgcataatactcgcactggatggggaccaaaaaggtgtcggccgcacataaggcgttgagggtgagcaacccgagcgagggcgggcagtccacaaagagatagtcatatctgtcccgcagaggggcgagggcggctttcaggcggccctcccggcgggcgagctccaccatttcaatctcggccccggccagcgcaatgctggagggcagcagatccagcctggaaaaagaggtgcggcggatggcctgctccggttcagcagtgccgatcaggagctcgtaaaccgtaggcccggcctgttttttgtccgctcccaccccactggttgcattcccctgggggtcgatatccaccaggagggtccgacggcccttggctcccaccgccgcggatagattcaccgtggtagtggtcttgccgacaccgcctttctggttgacaactgcaatgatcttgcccaaaccggcacctctttccccgcccggccatgaagcaacgggccgtcttctcaaaaccgcctatgtccggctgtcggctatttcggcgattgcccgccagtccggacgacatatgaggatattatagcacagattttataaggggaaaagcttttttcctgcaccaccccatttctccttctgtcctcgggtatattttcccggttttttaggaatactgaggatagacacgtttggaaaggatggtttgtcatggagaatttggtgaacggcccggaaatccccatgggcctgggcatggcgttggcacagaaccacgccgccatggaggtgttcgctgccatgccgcccgcctcgcagcagtcggtcatcgagcacacccatcaaatttcctcaaaacgggaaatgcaggcatatgtcgcctcacttgtcaacccacagatccgataaaaagagggcgtgtttcacatgaaacacgccctctttcttccgtttctatcttccaggcaggggtcaggccagcgccgtcttgctcttgagcttggaattcaccaggcagatatacgtcttcccgggcgacaccgccagctcggtcccatcctcctcccggaacgccagcttgtccgcggtacaggtataggtcatcgggcggctggtcccacccgtcaccagcaggccggaaccggaggccaacttgaagttgcaggtcagctcgttttccatcaccttgtccgcgtacatcaccaagatgttggtcacctggatcggcgtgccgtccgccgccttatgcgtggtcgtgtccccgatcttgccgttgcccttggtgtacaacccagaagtgctatcgtatacaaaggtgacagcccgggagtcactgacattcacctgcagactggcgcccgcgccgttcccggctttgtccccaaaaccaaagggtaccggccgggtggctgtcgacccgattttcagcttgtccatacgggctttcatcttgtccccgctggtcatcatgctgtattccagacccttgctctttttcagctgttcgtcccgccagaaggtgctgccgtcgtaagagagggcgttgatgttgtcgatcttgatctttttcagggtatccaaggcaggggtactgcccccggcatgggcatacacgatgtccatggcctgcgcaatggtcacaaacggggagcgcgccgaccggaccgggccgagttgggccgggatgcgttccgcattggcaaacaaggccagaatccgggtgatcccccccctctgtctccgcctcgacatacaggtctgccttgtcgatgccgtgctggggacgggaggtggagttgttcccgatcatgacccccaccggacgggtccctcccttggtcagatcgcttttcccggtgagggggttgaggttctcgttgctcatcggcggctgtgtggtgcttgcctccgattcgatcggcaaggtcagtactcccccctccgatgaatccggcggtgccgacacagcgggggctttgccacatccggcgctcacgatcacgatcagcaaaccagccagcaggccggatatccattttctcacccaaacgcatctccttgtagtataaactctaaattaatatcctttttgtatattttcaatcctcttccacgtccacggcatcgtaaatctcatcacaaatctgtgtatagacggtctgtgcgaactcatacacggcccccaccgtttcagcggaaagatgcaggccgttgtctgaaggataccgtgtctcaatatacaggcggttgagccctgccgtgtgttggatataagggcggaaagaggcgtcgaacttggcgacctgcttgcagagccatgtcaggttgtgcccgtcgggcagcaccccggtccgatcgagcaggtaggctttgagcgccttttccaggcactgctggcagtggaagccggcgatatccaggcactgcccttgctccagaaggagccgggcggccagcaaatcccgtgccgcgatttccagccagtcgaaaaacagacggctgtcactcgtgtgccgcgttcgccgcatacagtaccctccccgtcttccgaatccgggaggcaaagctggcggcatcctctgccagccgatcccattcccccctcgtatacaccaggacatcgtagggcagatcggagtcaatgtccatatacaggcggcgttccacagcatcggggtccccttcgccgatgacgacgcagagcttgacagcagtcaggctcccgtccaccgcctctttccggctgaccagcaaaatggtctcaggggcagccagacggacaatggcgtcccgcagttccacaagcggga

SEQ ID NO: 4047 - DNA, 3259 bp, Unknown
  16S sequences of unknown bacteria
gtcggcagcgtcagatgtgtataagagacagctaaagcataagacacaggtttttattgcgcccagcggcgaccatttccgccagcgcatgacgcatacgctggaggtcgtgcagattgcgcgcaccattgcgcgggcgctgcgcctcaatgaggacttgacagaggccatcgccttggggcacgacttggggcataccccgttcgggcataccggcgaacgggtgctgaaccggctgagcagcctgggctttgcgcacaatcagcagagcctgcgggtggtggagtttttagagcgcgacggcaaggggctgaatctgacctgggaggtcaaggatggcattgtcaaccaccgcagcgcctgtacgcccgcaacgccggaaggggcgatcgtgcgcctggcagataagatcgcgtacgtcaaccacgatgtacaggacgccatctgggcgggagacctgacgatggatagcctgcccaagcactgtgtagaggcgttggggcgcaccaacagcgagcgcatcaacgcgctggtggtggatgtgatccgccattcgcatgacggtgtggtgcagcagtccgcccatatggcaaagatcatgggtgatctgcgtgcgtttctgtttgcgcatgtatatgaggggccgcgccagatggagcagacccagcgtgccgagcgcatgatagagggcctgtacacctattatatcggccaggcgggcagcctgcccgccgaatatgagcacatcgcagagacacagtcccgcgagcgggccgtgatggattatatcgcaggcatgtcggacaactttgccgtccggcagtttttgagcatttatgtgccgggcgaggcagggccgtatggcggataacgccgcgccggcaggaaaggagggcgtatggccgggcattttaccgatgaatttttagacgaagtacgggcgcgcaacgacctggtacagatcgtttcgcagtatgtgccgctgcagcagaaaagccggcgctactggggctgctgcccattccatagcgaaaaaacgccctcgttttccgtggatccggacaagcagttttactattgcttcggctgccatgagggcggcaatgtcatccattttatcatgaacatcgaaaagatgacatttcctgaggccgtgcagtttttggcggaaaaggccggcctgcccctgccgcagaccgggcaggacagccgggcctaccaggagaaaaagcgcagaaagcagcgcttgtatgaagcgctgcgccaggcggcgctgttttaccaccatcagctgtccacagacggcgccgcgcacgccagggcctacctggaaaagcgcgggctgacgcaaaaggaggtcaagcattttggcctggggtacgcgccgaagggatggcaggctttaaccgaccacctaacggcccagggctttacgctcaaagagctcagcgacgcggggctggccgtggtcaagggcgaaaagaaatacgacttttttcgggacaagcttatttttcccatcatcgatcagcagtcacgcgtgctgggctttggtggccgcttgctctctggcgacggccccaaatacatcaacaccgccgaaacgctggtgtataacaagcgggaaatgctctacggcttgaatttttaccggcagtttggcaaggaacgcgagctgtttatgacagagggatatatggactgcattgccgtttcctcgtttggttttcccaatgtggtagcctcgctgggcacggcgttgaccaccgggcaggtacgcctgctgcgccgctttgccgataccgtctattttgcttacgatggcgacgccgccgggcaaaacgccaccctgcgcgggctggatattgccgaaagagagggcgtggcggtgcgcgttttggtgttgccggatgggcaggatccggacgaatttttgcgcagccaaggggcgtccgcgtttcgtgcgctcaagcaaagcgcgctgacgctgacggaatgcaagatacaggcgcttgccaacgcctgcgatatgcagacggaaaacgggcgcacggcctttgcgcaaaaggcggcggcgctgctaaagccgctgtcgcccgtggagcgggagcgttacgagcggtacattgccaaggtatccgggtttgcggtggagaccatccagcagcaaacgcagagcgccagggtgccgatggacgctgcgccgcccaagcaccgggaggcgccggcggaaaaagagcaaggcgtggcgctgcaggagcgcgtattgtgcgcgctggcggaggacgcaaaaaccgcggtacggctgctgccgcttttacgccgggaggattttaccgacccgctcttgcaggatctatacataaaatcgctggagctatgcgccaagcaggagctttcgccggccgggcttttggcgtcggtacagacgccgcaggatgccaagcgcgccgcgcagtggttcgtgcatacgcacgtagagccgccggatgtgatgctggattatctttgcaccctcagggtgcagaccctgctgcgggaaaatgagcagctttccaaacaacctggagaggatatccgccaggccgcgcaaaccatttcacaaaacacacatttgatcgcagcgctgaaacagaaaaacagcgatgcggcttccaagatagaataccttcgtagggggaaacagtaatggcagaaaccaaagcaaagcaatccaaggaccgcgtagacgaaatcatcgccaccggcaagcataagggcgttttgacccatgacgagctcaaccaaacgctgacggacgaggagatggagccaagccagctggaaaatatcctaaacgagctggaaaagcgcaccatcaaggtcgtaaagaccctgccggacgatctggagccagacgccaaggagctggcagaggaagaggtgatcacagagcaggagttggcctcggactatatcccggataccgtcaacatcgacgaccctgtgaaaatgtacctaaaggagatcggccgggtgccgctgttgtccgctacggaagaaatcgagatcgcaaagcgcatgggcgagggcgatgagcgcgccaagcagcagctgacagaggccaacctgcgcctggtggtctccattgccaagcggtatgtgggccgcggcatgctgtttttggacctgatccaggagggcaacctgggcctgatcaaggcggtagaaaaattcgattaccaaaagggctctaagttttctacctatgccacctggt

SEQ ID NO: 4048 - DNA, 28021 bp, Unknown
  16S sequences of unknown bacteria
tatgggagggacacggaatgaaagaggaaaaacaaaggaaagatctgtttcaaatggtgctggggctgctgcctcagaatctggcccgggccgcggataccctggacgaaggagaaaggcttacctgcgaagaactgcgtctgcgggccggacagccctttctggcccgggcaaaaggaaggtgggtcacattgccccggggcggagagcccatacaggtaacggcaggggacctggatcatctgctggcccggtgtaccagctattcggtgcatacctacgcaccccagatcgcccagggctatgtgcctttgccgggaggatgccgtctgggtgtgtgcggcgagggaattctgggggatcggggagagatcaccgctttccgccggtattccagcgcaaatcttcgcctggcccggcaggtgcctcacctggcccaacctctgcgcccctgcctcacagaagaaggccagctgcaaagtgtgctggtgctttcgccgccgggagggggcaaaaccactttgctgcgggagctggtgaagctttattcagaggaaggcagcgtgtctttggtggacgagcggggagaggtggcggcctgccgggaaggggtgccccaatacgatgtggggagccagaccgacattctcaccggctgtcccaagggaccggccatggaggccatggtgcgctccatggggccgcagtggattgctttggatgagatcaccggaacggaagactgcggcgcgatgctgctggcccggggttgcggctgcggttttctggccacggcccacggcaaggaaccggaagatctgtggcgccgtccggcttatcgcagactggtggaggaaggggtcttttcccgcctggtgcgcattgtttcccgggaagggaagcgggtctatgaagtctatgccatccgaaaggaggacagtgcaaatgctgaaagtgttgggagcgctgctcattaccggaggcttgggggcggctggatacttgaccagctttctcttggccaaaagagcgtcggccatccggtcctttgtggacgggctgacattgctctccagtgagatcggagaaaagcggacacctttgccccgggccgcagccctttgcgcccgggaaacccgaggggccggagggcggttctgggaggaattctgccgccttttggacaaggaaccgggagaagatctggccatgctctaccgaaaggctcttttccagggggattgggggctggagggcggcgatctgcgggagctggccgctctggggccggtcctgggccggtactatggagatatccaggtgcaggccatcgcccagtgccagaaacggctggagcgcaaccttctggcggcggagcaggaagtgagcagccggggccggatcgcccgggctgcgggattttccgccggcatcgctctggcgctgctggtgatttgaaaaaacaggagagaaaaccatgcagatcgatctgattttcaaagtggcagccatcggcatcattgtggcggtgctgggccagctgctcatccgctccgggcgggaggaacaggccatgctcaccaccctggccgggctgatcgtggtgctgatgatcatcgtccagcagatcggccagctgtttgaaaccattaaaaatgtgtttgggttttaaatatggagcttgtgatcaaaagcgcagcactggccctggtggctctggtgctggcggtattccttcaccggtacagcccccagatggcgcttctcaccgccctttgcgcctgcgccctgctgttattctggctcatcccccagctttccgccctggtttcggcggcggggaacctggcggcccaggccgggctctcccagggggaactgctgcctctctgcaaggtgatgggggtggctctttgcacccggctgacatcggaactgtgccgggacaacggaaaccgggctctggccgctcaggtggagctgtgcggcgccgtctgcgggcttttgtgcgctctgcccctggtggaacaggccctggggcttttgggagccatctgaaaaagaagggaggagccatggaaaaactgtgccttttgctgcttcttctgcctttgctgattctgccggtgcggggagcagggctggaagaggtgcgggatcagatgccggaaagcgtgcaggaagttaccaccgatctgggggattccatggtgtcttcctccagccgctccctgctggaaaaaggggtggggctgtggcggcagcatctgcgggagtcctgcaaggcatcgctgtccattttggcggtgtgcgtgctcctggggctgggacagagttttgcaggggcctcgggcattaccttgccgggaaaccttttgtccatggtaggggtgtgcgccgtggcccttatcgccctggcgggcacagggagcctgctcaccgcctgccaggaagcattggaggaaatggacgccttgctcaaagggatgatgcctgcttttgtgtcggccatggcagcctcgggcaatccggtatcttcggtgatggcctccagcgccacgctgatgggggcgggactgctgctttctctgggaaagaacctggtgtttcccgccattcgtctgttcatcattttgtgggccgcagggctgatgagcgaaaaccccaccttgcaaaaggcggcgggttttctccggtggctgtgttttgcctccttcaaaattttgctcatcggctttaccatgtatatcaccatgtccggcgtcatgtcctccggggccgacgccgcagcggtgaaagcggctcgggtgaccatttccggggtggtgccggtgctgggttccattttgtccgacgcttccgacaccctgctcaccggcgcacgggtgctgaaaaacggggtgggggtctttggcatgattgcggctgtggccgtttgtctgtctccctttctccgctgtctgtgcttttccctggtttataaagtgatggccgctttgggccactccttctccggcggcacggtctcccggatgctggacggcgtgggggatgcctatgccatggccctggggctgctgggcagctgctgcgccctggtgttcatttccatggtggtgtgtacggcggtggtgaatggcacatgatggagaatattctgtttttggcccggcggctttttctctgcgggatgctttcggccatgggtatgaccctggtgaagggaagcagccaggaaaacaccatgcgcctgtgctgtgcctgcttgatggtcatcaccatttttggcgcgctgccccagatgaaaaccgaggtggactggtcctttcctcagaaggaaaccatggagcaggctgcccagcgggggctggaagaagggtgggagagccagaaggagctgatctgcacccaggcggaggaatatctggaaagccacgctatggatctgggaatttcgtgccgggccgtggtggaaggggagatcgacgaagagggcgttttttcggtaaagaaggcagaaattctcccggcggcttccctcagtgcccaggaaaaggagaccctgcgccgtctggcggaggaaagcctggggcttgcaggagagcaggtcatcatcggagaaggagagggacatggagaagaaatggacgatgccggaatatatccggaaggcctttgatagatataagtatgtcctgctggtgtgctgcatagggttggtgctggccctgtggccttccggcgggggagggacggcaaagcaaacggaagcggaagaggcaggcgtcctttgggaagaagccgcccccgatgctttggaagagcagctggcccatcttctggaaaaaatggagggagtgggccgggtggaggtgcttctcacccttcgccagggaagccagcaaaactatgtctataacagcagcaccagggaagatggaggtgaggcccagttcgggagagaagagcagaaagagctggtggtcatcagtcagggtggggaagaaagcccggtggtgtctagcgtcagcggtccggaataccagggagcggtggtcctgtgcgacggggccgacgaccccagggtgtgcctggaaatcacccaggccattcgctcgctgacggggatcacctccgatcacatcaaaatttccaaaatgaaacagtaggaggaagcacggtatggtcatcaaaagaaaaagcgcgatttattcggtgatcgccctcatgctctgcgtggcggtctatctcaactggagctatcagcggggcggagaagaaggggaggcaatgcaaaccagccagaccgacgacaacaagatcctgggagagagccagctggtggataagaccgaaagcggcgaggagcctctggaaaccacttcgggagaggaagagcagccggagggcgagaccacggccgcttccgactatttctctcaggcccggctttcccggcagcaggccagagacgaggcggtgagcattttcaagcagaccagtgagaatccctccgccgacgcccagtccaaggagcaggccgaggcctccattgccaccatggcggaaaacgccgtgaaagaggcccgcatcgaaaacctggtggtggccaagggatttgccgactgcgtcaccttcatcaatgaagaaggagtcaatgtgatcgtgcagaaaaccgaaaacggcctgggggaagaggatgtggccaaaataagggacatcgtcatgagcgaaaccgattttgccgccgatgtgatcaaaattatcgaaaccgcctgatttctcttgcatgaaggccccggatagggtacaatatattgtacatattcatccgaggaggaatgagacatgagcgatgtaaaggagtactggccctgcgccggagagatcgccgatggcaatataaagatttctgaggatgtgttggcttccatcgccaccattgccgtcaccgagaccgaaggcgtggcggcggccgcttccaccgtgggggcggagatcaccgagatgttcagcggccgcaagggcagtacgcctcggggcgtcaagatccgttttgacgaggaagttcagggttgtgtggtggaatgcagcgtcattctcaaatatggcagctcggtcaccgaaaccgcaggcaatctgcagaaaaatgtgaagaccgccatcgaatccatggccggcatcaaagtggcccgggtggatgtgcaggtctgcggcatccagctgcccaaaaaacagtaaaagccccatcgccttccgcgccagaagagccggccgcccaagcggccggcttgagcgtgtcgaaaaagtggcttaggccactttttcgagtttttgcaaggggctgtatgcacgcctttggcgcacacttgccccttgagaagtgcaaaaagccacgcacaggtcgcggctttttgcggatttataggggtagggcggacgacccttttcgttatataggtttttcgacagtctggagccggccgcccaagcggccggctttttgcattgggaaacagcggcaaaagccaccgtttcgccattcttctggcggggacagttttttgaaatgcttgcccaggctctttctttttctttggggattgtgtataataatcgcagagcaattttgacaaagcaagacaaagcaagatagaaaccgccgccctgcgcggcagattggatgagattatgagcagaagaaatgcccgggagctggcgctccatatgatctattccggggaatactcccagaaggagccggaacaattcgtcaaagactgtctttcccccgaacggttttcctctttggccggggaatatgagctgtatcagcaggccccgccggaaaaccagctggattacatttgccgggtggccaccggggtgctgacccacggcccggaactggacggctacatcgaaaaatatgccgtgggctggtcggtgtcccgcatttcccgcatggccaagtgcattctccgcctgtccatgtatgagatgctgtatatgcagatcccggtgggggcctcggtgaacgaagcactggaactgtgcaagcgctatgaatcgccggaaaccgcctctttcctcaatggagtgctggcttcctttgtgcagaaggagctgactgcctgatggccatttatctggggttcgataccagtaactacaagacttcggctgctcttttcgacagccagaccggcaaggcctggggggagagccgcttcctccaggtgcccgaagggtctttgggcctgcgtcagagcgaggccctgtttcagcatgtgcgttccctgggacagatcaccgagagcctttttgaaaaaaccggccggcttcctctggccgctgtgggatattccgcccgcccccgcaaccaggaggggtcctatatgccctgtttcctggcgggagagatggcggcccgtaccgcagctgccgccggagggatgccggcttttgccttctcccatcagcaggggcacatcgcttcggccctttggtcggcaaattgtctttcctggatgaagggtccctttttgtcctggcatctttccgggggcaccaccgagcttctgcgggtggaatcccgcccgggagaactgctggaggtgcgtgtgatcggcggtactcaggatgcttccgctggacagatcatcgaccgggccggagtggccatgggcctgccgttcccctgcggcgcccatctggacaagctggccggagaggaaaaaccggcggaaaaaccctttgccgccaagatgcagggcctgtttttctccctgtccgggctggaaaacaagttcaaggcgcttctcgataagggatgccccaaagagcaggtggccgcctttgtcacccagtccattgcggaaacggtgtatcgggtgaccaaaaaggcccagaaggaagagggcctgccggtgcttttttccggtggggtttcggcgtcctcccagctgcagcggcgctttgagggcaaagaccaggtggcctttgcccaaaatggctggggcggggacaatgccttgggggccgcactgctggccgccatgtggaaggagggggtgctgtgaacggacagcccatcacggtatctcagctgaccaactacatcaaggccctgttggagcgggccacacctttgcagtccctttgcctgcggggagagatctccaactacaaaatgcaccattccggccatcactatttcactttgaaggatgaaaacgccgtcatcaacgccgtgatgtttgccgggaatgcttccaagctgcgctttcggccggaatcggggatgaaggtcatcgtctacggcaaggtgggtgtgtttcccaaaagcggccagtaccagatttatgtgagccagatggtccccgacggggtgggagcgctgtacatcgcttttgaacagctgaaacagcgtctctttcaggaagggctttttgacaaggaaaagaaaaagcccctgcccgcttatcccggcaccattgcccttgtcacttctcccaccggcgctgccgtgcgggatatgctgcggattctgaaaaaacgctggcccctcagccgggtgctggtgtgtccggtgaaggttcagggagaaggggccgcccaggaagtggcggaaatgctggattatatagatcagcatcagttggccgatctgattattacaggccggggcggcggttctattgaagatctgtgggccttcaacgaagagccggtggcccgggccattgctcagtgcagcatcccggtggtttccgctgtgggccatgagcccgatgtgaccatatcggattatgtggccgatctgcgggcggccaccccttccaacgccgccgagctggccgtgcccgacaagggggagctgtggctgcgtttgcaggattgggacaggcatatcaaaatgctggaaacaaagcgtctccagcttctcggtcagagaatagaagaaagccaccggcgcatgattctggtggaaaagcggcgggtgcagctgttgcgtcagcagctttccgccctttctcagaagaagatcatgagcagccccaaagagtatttcaacgagcggcggctgagcctgtctttctcccaggagcggatgattgccgcggcccgggaaaatgtgggccggaagcggaaaagctttatcggcaaggcggccacgctggacgccatcagtccgctgaaggtgctcagccggggctatggttttgtgacaaaagaagaaaaaatcgtcaagacagcggcagacatcgcccctggcgatcggatcgacctgcgtttgcagggcggcagcgccagctgtctggtggaacaggtggaccagaaataggggagcgtgtcgaaaaagtgtctgaagtcactttttcgagtttttgcaaggggctgtatgcacgcctttggcgcacacttgccccttgagaagtgcaaaaagccacgcacaggtcgcggctttttgcggatttataggggtagggcggacgacccttttctttatataggtttttcgacagtctgcagaaataggggagaggaggaagcgttttgtcggagaaatttgtgtttgaaagcgccatgaagcgcattgaagaaatcgtccggctgctggagcagggggatgcacccctggaccagagcctggccttgttcgaggagggcacgggcctgatcaaaaaatgctcggcggccctggatcaggcagagcaaaaggtggaaatgctggtcaagacgccggaaggcccggagaccgagcctttccaggtgccggaggaataaaaagatggatatggcagagaaactgaaagaatatgcccgcctgacccaggaagggctggaaacctatctgccggagcaggcgggggctttggaaacgatcttccaggccgcccggtacagtgccctggccggagggaagcggctgcgcccggcccttctgatggagttttacgcactccacgggggaaatgcaaaagaggccctgccctttgcctgtgccctggaaatggtgcatacctattccctgatccatgacgatctgccctgtatggacaacgacgatctgcgccggggcaaacctacaaaccacaaagtgttcggggaggccaccgctcttctggcgggggacagcctgctcacccgggcgtttgaaaccatgctttgccattgtcccacggaaattccggcggagaatgccttgaaaactgccggaatcctggccgcccgggcgggcatggaagggatgatcggcggacaggtgatggatctggattttgaaacacggcgcccggagaaagaagagctttcccaaatggtccatctgaaaaccggatgcctgctgatggcggcctgtgagatgggctgcgctctggccggtgcaggagaagaagaaatgaaaaaggcccgcctgtatggcgaaaagctggggctggccttccagatccaggacgatattctggatgtgacgggcagcaccgaaaagctgggcaagccggtgggcagcgatgcggagaatcacaaaaacacctttgtcagctattacggattggaagaatgccggcgtctggtggaggaaaacacccggcaggccgtggaagcggtagcccttttgccgggaagcgatttcctcacagagctggcccggagcctgcaaaagcgggatcattaggagaaaaagctatgctgcaagatcttttgtccaatcgagtgctctggacagccattgtgggctggtttgccgcgcaggccttgaaagtggtcagcggttttgtagtcaatcacaaactggattggaagctgtttttcgcctccggcggaatgccttccagccatacttccacagtggtgggcctgactacggcggtggcctttgccgaggggctgaattcggcggcctttgccatcgccttcgtcttttccaccgttgtgatgtacgatgccaccggcgtgcggtgggagacaggcaaacaggcccgggtgctcaattacatgatgaaaaactggcaccacagcaaaaagccggaggtgttccaggaaaatctgaagatttttgtgggccacactccctttcaggtgtgggccggggcgctgctgggcctttgcatcggcattctgatgcagctgtaagggcgtttgcatttattatgcaaaattggtataataatatctgctgcgcactggaacaaagccggtttgcctgacaggccctggctttcagggcgtattgctttgttttgtacgcatgataataataactctataggcggctttgtgtccctttgagggcgggctttgtttggggcctgaagtgtgccgcagggaaggatgggacgatggaggaatatccgctgctatctcacattatgtcaccctatgatgtgggaaagctcaccgaggaacagctggaaaatctctgcggagagatccggtttttcctcatccgaagcctgtccctcacaggagggcatctggcctccaatctggggattgtggagatcgccacagccatcgacagcgtgtttcagtcgccgaaagataaaattatctacgatgtgggccaccaatgttatgtgcataagctgctcactgggcggatgaatcagtttgcttcgctgcgtcagctggatgggctcagcggttttccccggccttgggaaagtcctcacgatgccttcatcggcggccatgcctccatgtccatttcggcagctctgggcatggcccgggcccgtacattgcggggcgaagatcacagtgtggtctgcgtcatcggcgacggcgccctcaccggcggcatggcctatgaagccctcaacgacgcaggtcagtcgggcgagccggtgatcgtggtatacaacgacaacgaaatgtccatcagccccaatgtgggagcggtggccaagcgtttgagcaagatccggctcaagcctcagtatatcgatctgaagcggcggatgaaagtctgcttccgtcggtacagctggggcgaggacgccattgccaaggtctcggcggtgaagcggcgggtgcgttccatggtgctgcgtcaaaccatctttgatctgatgggattcacttacctgggcccggccgatggcaacgatatcaaaacagtgaaatatctgctcaccgaagccaaaaagctgcaacggccggtggtgctccatttcaaaacagtgaaggggaagggctatgccccttccgagcagaatccagggtatttccacggagtggctccttttgatgtggacaccggtctgcccaaaaagcagggcggacagaacttttcctcggtgatgggcgccgaactcacccagttgggggaggaagacccctcagtctgcgccattaccgctgccatgaaaaacggaaccgggctgaatctgttcgctcagaaattccctcagcgcttttacgatgtgggcattgcggaagagcacgccatcaccatgagcggcggcctggccgccgggggaatgaagccggtgtgctgcatctattccaccttcttgcagcggggctatgaccagctgatccacgatctggccatcagccgtctgccggtggtcattggggtggaccgggccggtctggtgggagaagatggggagacccatcaaggcctgtttgatgtgccctttctccgcaccattccccatttgcaggtgctttctcccgcttccttctctgagcttcgccgggcccttcgctgggccctggagcagcgggaagggccggtggccatccgctatcccaagggcagtgagcaggagtttaaggaggacacctttgaccgtccccaggcggtgcttcaggagggaaaagacatcactttggtgtcctatggcatcatgatcaatcaggtgctggaggctcaccgtctgctttcgcaggcgggaatccagggagaaatagtcaagctcaacagcttgacagcctttgataaagaagtgctgatccggtctctccggaaaaccggacgcctggctgtggtggaggactgcggcagcaaaggctgtgtgggccaggagatcgaggctctggtgcaggaggcgggaatttcccttgaatactgccgcctgtataactgcggcgatgattttgtgcccgccgggaaggtttcccagctttatgaaagatgcggcatcacaggggcgcaggtggcccattccatacaggaggcgatgagaaatgtctgaaaaacagcggctggatatgcttttggtccagcgggggctggagagttcccgggagcgggccaaggcggtgatcatgagcggcatcgtctatgtgaacaatcagaaagtggacaaagcggggtttttctgctctcccgaagatcaggtggaggtgcggggagcgtcgctgcaatatgtaagccggggcggcctcaaaatcgagaaggctctgaattattttcactacgatccggcgggaaagaccgccattgatgtgggagcttccaccggcggctttaccgactgcctgctgggccggggggccgcaaaggtctttgcggtggatgtgggctatggccagctggcctggtcggtgcgcaccgatccccgggtggtggtgatggagcgcaccaacatccgccatgtgaccccggagcagatcggggaagagctggatctggcggtgtgcgatgtgtccttcatctctctgcgtttggtgctgccggtggtctatcagctgctggggccccagggggagatgctcaccctcatcaagccccagttcgaagccggacgggaaaaggtgggcaaaaagggcgtggtgcgggaaaagagcacccacatcgaggtgctggaaaacaccttggatatggcccgcaaggccggtttccatgtggccgggctgacctattcgcccatcaccggccccgagggcaacatcgagtttctggcttatctgaaaaaagagggggaggacgcctccattgacattgccgccatcgtggaagaggcccacggggagatgaaaggcggagaacaatgaagcagatctttctcttccccaatttcaccaaagagggcacccaggatgccgcccagcagatcgtccggcgattgcgggaactggagtttcaggtgtgttgcgatgaaaccatccggggccagctgggcggggagaccgaggagatgtgccggtgggcctcgtatgaggactgcttgactaagagccatatggtcttggttgtaggtggtgacggcagcatcctccgcattgccccggacgcggcccggcacgatctgcccattctgggggtcaacactgggaaactggggtttatgagcgaactggacacccatgaactgcggtatctgcgtcagctgcagcaggggcagtataccattgatacccggatgatgctggatgtgaccgtgcagcgccagggagaaaaggcctattcggcctgtattctcaacgatgtggtcatcaccaagtggcccctggtgcggctgatcaacatttctctcagcatcaacggcacgctgaccacttccatgcggggagacgggatcatcgtctccacacccaccggctccacggcctataccctgtcggccggcgggcccatcatcgaacccaatgccaactgtatggcagtcactcccatttgtgcccatgagctgggagtgcggccctttgtactttccgatgagcgggtggtcaccatcacggcgggggccgaggacaacaaggcctatctgtcctccgacggaggggctcctctggagctggaaccttcggacaccgtgaccatccgtcgttcccagtggcagacccggctggtgcgcctgaagagcatcggcttttatcagcttatttataaaaaattgtctatctgatcaagagaagggatgcgcttatgaaattccaacggcaagcagccatcatcgatctgatctccaaccacgagatcgacacccaggaagagctcaccgccagactgcgggagatgggttttcactccacccaggccaccatttcccgggacatcaaggaactgcggttgatcaaaatcgcctcttccaacggcggttataaatattccattgccgaaagcgagcaggattccggttttgtgccaagagtgcggaatattttccgggaatgcgtcatcaaggtggatgtggcccagaacctggtggtcatcaagaccatcaccggcatggccaatgccgccgcgtttgccctggacaccatgaaaatcagcgagatcgtgggaaccatcgccggggacgacaatgtgctcatcatcctccgggacaatgagagcgctgaaaacttttttgagcaaaccaaggaaatgctccgctgatgagagagcccagttggaggaagggatatgctgaaaacgctgcacatcgaaaatgtggccgtcattgaaaaggccgatatccagtttatggccggtttcaatgtgctcaccggcgagacgggagcgggcaaatccatcatcatcgactccctgtgggccattctgggggcccgcaccagccgggagctgatccggcatggacagaataaagcggtggtgagcgccctgttttcccccttgtctcccgcggcggcggccaaggccgaggagctggggttccctcctgaggacgataccctgctcatcagccgggagatcgtgcaggatggccggaacacttgccgcatcaatggccggccggcttcggtgtccatcctccggcagttgggggagaccctggtgaacatccatgggcaaaacgccggcatcgccttgctggacgaaaattcccatatggattatctggatgccttcgggggctatcaggaagttctggaggaatattatacccagtaccgcaagcttctggatctgcgccgctccatcaaggaaaaaatgaagcagaacgctctgctgcagcagcgggaagatctgctgcgttttcgctgggaagagatcagaagcgcctctttgcagccgggggaatatgagcgcctgcgccagaggcgtcttttactgggaaaccaggaaaagatctcccgcagtctgatggcggcggtgacggccttgtcgggcaatgacgaggaaacgggggccatcggccttgtgagccaggcggaagagcgtttccgcacttgcgcaaaatggtcgtcggagatcgagagcttccacagccgcagccaggagattctggctttgtgccaggagctggagcgggacgccgggagctttctgggaacggtggactattctcaggaggagctggcccagaccgaagagcggctggaagtgctggagcggctgatgaaaaagtacgccgcagacgaagaagggctgttgcggctggaagaggaaagccgccgggaagtggaacaactggagcatatgggggaggacctgtcccagctcaatgggaaatatgctgccttgcgggaccgggttcaggccttgtcccagacgctccatgacaagcggcagcaggcggcaaagaagctggaaggccgcatcgaagaagaactgcaccagctggatatgccccatgcccgcttccaggtacaggtgtgccatgccggggaagagggccatgtgaagtttacccgccggggcaccgatgaggtgcggtttcttctcaccaccaacccgggggaggactataagcctctggcccgggtggcttccggcggtgagctttcccgcatcatgctggccatcaagacggtgcttaccaccgccgaggacgcttctaccctgatcttcgatgagatcgacaccggcgtcagcggccgggcagccaacaaggtgggggaaaagctgttcgctctgtctatggaaaaacaggtgctgtgcgtcacccatctgcctcagatcgctgcactgggagagcaccagtatcggatcgtgaaagaagcccagggggacaagaccctgacccaggtggagcttctggacgaagaaggacgggccatggagatcgcccgtctcaccgccggattgggggtcacccagcagaccctgcgctcggcccgggagatcctggagatcgcccgtgcgttccaggaagactgcatggcaaaaaagcactgatcctgcgatagtgatgatgaatgtaaaaagaacgccagcgaaaagccggcgttcttttttattatctgcataagggagcaatggcctgtgcttgccttccagagaaaaggaatgtaaaataagggctgacagtgttcttttttacccaagagattgagtgccaagcgcaacagggggaagttggatgaagcatatttttcttctggaagatgatgaaactttggcccggggcattgccatggcgctggaagggccggagcgcaccgtgcagggagcgggcactttgcagcaggcggaaatatgcctgatggaaaggcgctttgatttgttgattttggatttgaatttgcccgatggcaatgggttgaccttgctacggcagctgcggcagcgaggcgatgctgttccggtgattctcctcaccgccaacgatttggaactggatgaggtcactggtctggaggccggggccgacgattatatcaccaagcccttttccctggcagtgcttcgggcccgggtgaatgcccagctgcgccggggaacgcctccggcggccggtgctttggtgctggggccttttgttttcaattttgacaggatggagttccattgtcatggcaaagcggtggaactgagcaaaaccgaacagaagctattgcgggtgctggtggagaaccgaggccacaccatgccccgtgctttgctggtggatcgggtatggacggatggagcggaatttgtagaagaaaacgctctgtctgttacagtaaaaaggctgcgggggaagctggaggaagatccctctaagccggaatacctgaaaaccgtttacggcatcggttacacatgggcggtggggccatgatggaaagcttgggctttattgctctatgtctggccgggggactgattctttggaaccgctggcaaacaaaacacaccatgcaacggttggatgaaatgctcacctcggccatgaatgggaatttcacggaaaaagtctttgatgaaagccgcctgtctgccctggaaagcaggttgagccggtatttgtcagccagctccctgtctgcccgaaaaatacaggagcaaaaagatcagatcagtgcattgatttcggacatttcccaccaaaccaaaacaccggttgccaatcttttgctgtatacccagctgcttttggagcagccccttaccccgcaaggtcaggactgcgcccaggcgatttccgcgcagacgatgaaattgcaaagcctgacccaggccttggtaaagacttctcgcctggaaacaggaattctggcgcttcacccggaaaaaggagagatccaggcaatggtgaaccgggccgtggaccaatacaggccaaaggcgcaagaaaaagggattgcgttcgaaacaggccctttcgagggtacggctgtttttgatgccaaatggacggaggaagcgctgtgcaacctgctggataatgcggtgaagtacacctgttccgggggaaaaatacaggtgaaaacagaaaattatgagatgttttccgccatttccgtaaccgataccggcctgggcatttcggaaacagagcaggccgaaatcttcggccggttttaccggagccctagcgtttaccagcaggagggcctggggatcgggctttatctggcccggcagatcagccaggcccagggcggatatatcaaagtgaaaagtgcgccggggcagggaagtaccttttttctctttctcccccgcccataaaaagattctttcaaaactgttatattctcgaaagtgtgaggaaagatttcaggagtaaagtctgtattgccgaaaggcggtacagacttttcctttggaggacaccgatatgagtattttgcagacaaaagacctgaagaaatattatggttcaggggatacccaggtcaaggcgctggacggagtggatctttccgtggagcaaggggagtttgtggccattgtgggaacctctggctcgggaaaatccactttgctccatatgctgggcgggctggatcgtcccacttccggctctgttctggtggacggaaaggatattttctctttgaaagatgaaggcctcaccattttccgccggcggaagatcggttttgtcttccaggcttacaacctggtgccggtgctcagcgtgtgggagaacattgttcttcccattcagttggatgggagaaaagtggatcgggagtatgtgcgggaggtcatcggcatattgggactggagaagaaactgaaaagccttcccaatcagctttccggtggacagcagcaacgggtggcgatcgcccgggccatggccacaaaacccgccatattgttggccgatgaacccaccggcaacctggacagcaaaaccagccaggatgtgctcagcctgatgaaagtgacagggcagaaatttgctcagaccatggtgatgatcacccacaacgaagaaattgcacaaatggcccatcgcattgtccgcattgaggatgggcgtattgtcacacggtgaggaggtgcctcgatgaaagtttccaatcaaggctgcattcgccgtctgagtctgcgctttcttctggccagccggacgcggaacatcgtggctgtcctggccatcgcattgacagctgtgcttttcacctcgcttttcaccatcgcactgtccattaacgaaggaatacaagaaaatgccttccgtcaggccgggggatgggctcatggcacctttaagagcctgagcaaagaacagtttgatgcgttgaaaggcgatcccctgataaaggaatggggcttacgccgctttttgggaatgcccgaggaggcgccctttcacaaatcccatgtggaaatcagctattgtgacgaaaaagaagcgcattttatatattgtgacccggtggaaggccggctgcccaaggaaaacaccaacgaggccgccacggatacccgtgttttgaagctcttggggatcacaccaaaggtgggagagcagttcactgtcacttttttggtggatggccacgaaaccacccagacctttacattgtgcggatggtgggagtacgatgaggccatcacagccagccacattttgattccggaaagccgggtagaggccgttttgcaggaaacgggcgtcacacccccaggggaggaccagttgaccggcggatattccatggatgtgatgctgaaaaacggctcccgcgccatcgaatccgacatggtgaagatcctggaagaccatggttatgaaaaagggcatcgtggccagggagaaaactggattgccatcggtgtcaactggggttacaccggcgcccagctttccagcaaactggacccgacgacggccgtggttttgttggccatgctgattcttattctgctcaccggttatctcatcatctataatgtgtttcagatttctgtggcaggggatatccacttttatggtttgctgaaaaccattggcaccacgccccggcagctgcgtcgggtcatccgaatccaggcgctgatcctttcgttgatgggcattcccatcggcctggtgctgggctggcttctgggaggtgttctcaccccgctggtggcggcccgcctcaacggagtcactgaaatggtatcggtcagcccggttctttttgcagcatcggctgcctttgctttggtgaccgttttcatctcttgcagacgcccgggaaaggtggcggggagggtctcgccggtggaggcggtgcgttatactgacggaaaagtttcccgcagtaaggagaaaaaaggagatgggaaggtatccctgttgtccatggcctgggccaatctgggacgcaatcggggaaaaaccgctgtgaccatgctttctttggctttggcggtggtgcttctcaccatgacggtcacctttgccggaagctttgatatggaaaaattcatttccggatttactgccagtgatttcattgtggcggacgggggaaaattccaatccacggatgatttcagtgaggaaacggccgtaccggaagaggtgatcgatgctattgatgcccagggaggcattacagagagcggcagaatctatggcaaagtgtcccccgttgaggaatttgtcaccgaagattattaccgttcgattcagagccagtggaactctcaggagcagatcgattccatgatcggttatatggagcgaaccccggaggggcttttggcagacagggcccagctttatggcatggagtcttttgccctggaccatttgactgtgctggaaggcgatctttccgctctcagtcaaccggatagttacgccatggccgcagtttattcggaagacgactatgggaaagcagaggagaacagccactgggccaagctgggagacaaagtgactttgcggtatgtggagcgatatgagtattacgatcccattaccggccaggtctacgagaagttagaggatgttcccaacgaggtaaattgcattgcgcgggcggtagaataccgggatgtggaatatacggtggccgccttggtgaccgttcccaatgcgttcagttatcgttattttggcgcagatgagtttgttctgggagcagatgcctttgtccgtgataccggtacccgttgtgtgatgtactatgcgttcgatacgacgaaaaagtccaatgcacccatggagagttttcttcaggattacacggaaaaccaaaacccccagttggattatgagagcaaaagcacctatgccggggaatttgaaaatgtgcgccggatgtttttgatcctgggcggggccttgagttttgtggtgggactggtgggtgtactgaacttcttcaatgccattctcactgggattgcagctcgccggcgggagctggcggtgctccagtccatcggcatgaccacccggcaaatgcagattctgctgtctttggaaggactgctgtatacgctgggggccgccgttttggcaacggtgctggcgctcattgctgtgcccttcttgagcagaaccttaaaccatatgctgtggtttttcacctatcgttttacggtttggcctattttgatgattttgccgctgtttgcggtgatgggggtggcgattcctctgttcagtggccgggcggcccggcgccgttccgtggtggaccgtctgcggcaggaataagagtcaacaagcctttgggagtctgtcttgggcaggctctcaaaggctgtttttctccatttgtacaattccgctcattggtgtaaaataaagatgctgcgccagatataggttttgcagcatctttcaaattccatgcaacaaataagagggggataccatggaagaaaagaacgggagcaaaagcccaaaaagccatttttatctcaaatggccctggaatgtgctggtttacattctgttggtgattgcgttgcgcatttttgccattcctgtgattctgctgattatgcggtggaacaaaaaacagcagcccgatggcccggcggaaggctattgcctccagcgcacaaggggaaggctgatccagctgttgtgggccgctatcattctgctggcggtggccgcgttgagtgtatacctggtgacaagctggatggaaggtgggccggaacggggctatacagactatatcattatgatcataggcggcatggccgtggtgggcggtttgctcatcgccatttacgaagcctataccggcgtgcgggatgtgttctgcccggaaaaaagccgcctggcccaatccatccgcaatcagctgacttacccggaggaagcgccgccggtgaaggaactctttgccatggtggatgaggacatccggcgcaatggccagtggttcggcaatctggccgtgggggaaaagtggattttaggggatgaggtctcttatattccccgcatccgcggcgtctttttcaaagatgagatccggacccatcacagcaatggccagctgcgttcttcccggattatgcagctttggatcgtggacgaccgccagaaccggcagctgaccgatttcaaatcgcccaaagcgctgaaagcggcctttgagtttctccagaagcgcgtcccggccgccgtctttggcctctatgattcccaggaatacaaagcccttgcctatgccaatgaggacgaatggtacgaaaaggaccgggcttaccggcagaaaaccgcccagctgcaagaagaaatgcagaaggagcaggaaagacaaagccagaatcaggtgctgaccatgcccgatggttcggtcacctcccggatcaccggggacagcctgagccagctgctgcttcagtgccgcaggcagggggaaagccgctcttttcagctggtgcccggcatcccgtttcaaggggaggggcgtgttttcagccgtctggtctgtttcccgggagaagggtcggagccggtgcgtatttttgtggaagaatactctgggtcaccttcggagccggggatctacggctggagcaataccatgacagtttatgaagcggagactttgctccgggcctggctgcgcgggcaggttccttctctgcatggctgggataaaatggaacgcaccagccgtggctgggcacaggcgctttcccggccataatccaaaagtccattggagcacaaaatatccccctgcaagctgcagggggatatttttcagaaaagagagagaatcaggcgttttgcacggcttcttgttcggcttggacttctacgcactgcatgacctttttcttcttcatgtagaaatgcatcatcaggaagcgggccacctggtccacggcgatgacgatccagatgaagaccaacggagcgtggaacacataggccgacaaggcggccaagggaatgcggaacagccagatgccgatcatggcgatgaacatgggggctttggtatcgcccatgctgccataaatggttcccttcatggtgcgctgcacattctgaggaatgtagatcaggcccatgaccatcaggtaatatttgccgatttccatcagttcggggatgtcggtgaccgctctcatcagcagcatgggggcaaagatcatcaccagaccgccgatgccgctgacaatggcgttcatccacatctgctggcggaaatactcccggaagaggggggcgtttttctggcctttggctttgccggccagggcggtggcggccacggtgaagccgatgacaggcagttcggtgaacagctcggcgctgccgcccagggagaacccggcataggcatcggagccataggtgaggatgatcttgctcatgaagatggccgaaagctgccaggcgccgtcttcaatggcaacaggaatggctttgaggaaggtctgcttgatggattcccggtctttcagcttgaagctggtgaggccggcttcccggaaagcgggcttgcgataaagcaggaaggtgcccacgcagccgccggcgatctgggccgcaatggtggctaggccggcgcccatcaggtccatctccagggcaaagataaaggtgtaaccgcagacaatgttgatcacattgttcagcacctgcatgaacatgggggtacgggtgtcgcccatggcattgaagcaagcgccgttgagacgatggataacattaaagggcaggccgatgagcatgatgtacatataaccccgggcggcgtccagaatctctgcatcttccacgaagaaggagaggatctggctggggaagagcaccagagtcaggataaagacaaaggcgatgcccagggtgatggtaatgatgttctgatagccttgttttaattctttgtagcggtgctcgccgtacaggcggacataatagaccatggaaccgatgcggataccgctccacaccacattcagcaggctgatgatgcggatgacgatgccttgggaagtgacggccataccggtgagccggcccacaaaaccggcggagacgatctcggccagataggtgaagatggactccagaatcaccgggatgatcagaaccagaatatcttttcggatttgttttttgttcagcgtagtatcggtgttagacataatcgtttcctcccagaatgattttcatcaaccccaccgttcatcgatggctttgatgcccaaaatatacatcttgatggcgtcaaggagcacagggatgttgtgggcttcatcagggccatgggcggcgccgtggccagcggggaagggcttgacttcatggggattgccgccgccaaagccgcagccgtggcggaacagtctggcataggtgcaggctcccatcacatagggctggtcttgggagtttgtctcgttgttataaagatcggtgagcatggtcaccatgggatcgtcggccggcacataatagcccgggttgcgcttggtgatctccagggagaaacccagctgggccgccgtggcctggagaatgggcagggcgtcctccacagggaaggagaccggcaggcgcacatcaaaggagaagcaaagctgatcgccctgggtatccagctggaaaagccgcagcagggtctggccgctgactgcatcctggcggtggagccccagcaaagcggcaatgggatcgtcacacagctcccgcagcacctggtcggtcagagcatcttccagcagaggtccgtgctccttcaccaggcgcgccaggggattgtcgccattgtcccggcggctttcggtgatggtttccccaccccggcaaagggtggcgctgtcgtggatcatccgctgcagctctccctggctgtgcaggctttccaccccgggatgcttgcgggcggagagggtgaattgaatctgtcccttttccccgttggtcacagggaagtcgtcgtccaccgcaaggccccaatcgggctggcccaccttttccaggtaataggccatgtcgtccatgccccgctcttcgttggagccaaagaccaggcggatatcatttttcagcgggatctgtttttcctggaagaaggccagcgcatagagggtggccatcagcggtcctttgtcgtccaccacgccccggcctacaatgtaatcaccctgaacagtgccgccgaagggaggatagagattgtccttgtcggcggggaccacatcggcatgggatgcgatcaccagacggcggccctgggacggctgaggcgggcggacctccagacaccggtaatcgtgattgacggcatccagcccctttttccggcagagccgggcgcagaaatccagggcccgggcacattggggaccatagggatagccttcggccccaaactcggccacgctggggatttgcacaaattcgcaaagatttttgacgatttcttctttgtgcgcagacagataatcgtcaatttcttgtttccagtccattttcccctccacgaaaacaataaattttgtcgcatcgctctcatccacctttatcaagttgacaatcccttcggctgcctttatgataaaagagaaaacaagagcgaataatttgatataaataaaaatatgagtgttaaattttatttataccaaaatcgataactagagtgtagcagagtaatcggggattttcaacaagttttcaaaaaaagttgaacaaaataagaagggtaaattttacacatatcaaaataaccaaaaaaggaggggcctatgacacaaaatgaacaaattggcgccagaatcaaagcttgccgggtggccaaaggactgaccctgaaacagctgagccagctttccgagctttcggtggggtttctatcccaggcggagcgaggtctggcggccatcagcctcaattccctgtatcgcctggccaccgagctggaggtggatgtgggatctttctttggcaaggacccggaagaggaaaaacgggattcctttgtggtgcggggctatgagcgcaactgcctgcgggtgacgccggagtttgtctgctatgccctgtgtcccgatcccaagaaatccgctatattcccggagatctatgagctgcgccccggggccgggaaggggaaggagttttttcagaataaacaggaagaatacttatatgttatcgaaggggtgctccatgcctggatcgatgagcaggaatacaccctgtatcccggcgacagcatgtggattccttccaactgcaagcataaatggcagaacaacacttcccagatggtgaagatcttttccgtgggcatccggctggagcatccgccggaacaggccgatggttgacaaacggggaaaaacaggataaaataagctctgtcaaatgcgatgatcggaaaaagtagcaggagctcttggcttcagagaggccgtggttggtgcaaacggctgcaaggatcttgtgaaatacctccgtgagcgggaccccaaaacccaggaaggggagtaggcggtcacaggtgcgcctgttacagcgcaggagtgtgtttgcactcgtggaggcgtctttccgcaagggggacgcaaatagaggtggtaccgcggatttttcgccctctgctgatttctggcagagggcgtttttgcgttcctgcccccataggaggaatgaatcaatgacagtgtatgaggaactgaaagcccgtggccttgtggcccaggtgacaaacgaagaagagatctccaagatgatcaacgaaggcaaagcggtgttttacatcggctttgactgcacagccgacagcctgacagccggtcatttcatggccctgaccctgatgaagcggctgcagatggcaggcaaccggcctatcgctctgatcggcggcggcactaccatgatcggcgatccctccggccgcaccgatatgcggaaaatgctcaccaaggaagatattgattacaacgcccagtgcttcaagcgccagatggagaaattcatcgagttcggcgaaggaaaggccaagatgctcaacaacgccgactggctgctgaaactgaactatgtggagcttctgcgggaagtgggcgcctgcttctcggtgaacaatatgctgcgggccaagtgctatgagcagcggatggaaaagggtctgtccttcctggaattcaactacatgatcatgcagtcttatgacttctatcatctgttccagcacgaaggctgcaatatgcagtttggcggcgatgaccagtggagcaatatgctgggcggcaccgagctgatccgcaagaagctgggcaaggatgcccacgccatgaccatcactctgctcaccgactcccagggcaacaagatgggcaagactgcaggcaacgccgtgtggctggatcccaacaagacctctccttacgagttctaccagtactggcggaatgtgggagatgccgatgtgctcaaatgcatccgtatgctcaccttcctgcccttggagcagatccaggagatggacagctgggaaggcgctcagctgaaccaggccaaggagatcctggcctttgagctgacccgcatggtccatggggaggaggaagcccagaaggcccaggaagcctcccggggtctctttgccggcggcggcgacaccagcaatatgccttccaccacattgacacctgccgatttgcaggatggcgccatcggccttttggatctgatggtcaagtgcggcctgactccctccaaaggggaggcccggcggctgatcacccagggcggcgtgctggtgaaaggggaaaaggtcaccgatcccaccgtgcgctttaccgcagaagactttgcccaggaatttatcatcaaaaagggcaaaaaggtcttccatctggtgcagatgggagaataaaaagcacaaaaaaagaagtgaacaggtccagtaaaaacggacagtgacaaaagaccccctgatgtaggaaaat
